United States Patent Application Publication US 2026/0092266 A1 - sequence listing, part 11

SEQ ID NO: 1783 - DNA, 23279 bp, synthetic construct
  misc_feature 1..23279: note = Synthetic
  source 1..23279: mol_type = other DNA
aattccgattggtaaacctatatataatactcaactatacatcgtccaggctaattctgagaaccttcaaccgattgggatagcaggtgagctatgcattgctggggtcggtttagctagagggtacctgaatcgaccggagcttacggaagagaaatttgtgaaaaatccgtttgtcgcgggagaacgaatgtatagaacaggggacttagcaaggtggctaccagatggaaatattgaatatttgggccgaattgatgatcaagtaaaaatccgtggggttaggatcgaacttggtgagattgagtcacaaatgcgtaagcttaatggtctaagagaagtagtcgttgtagcgaaggaagatcaagcgaaggaaaaattcctctgcgcatatatggttacggatagagaggtaagtacagcagaaatacgtgcccatttaacaactcagctaccgatcgcgatgattcctactacgtttatttcacttgaagcgatgccattaactgcaaatggaaaaattgacaagcgatcgttaccagatccagataattttttgcttaacacagaatatgtggctcctcgaacacaattggaagtacaacttgctactgtctggcaacaagttttaggtattgatcgagttggatgtaaggacgatttctttgcattaggtggacattccttacgtgctatgatggttctatctcaaatgcataaagagtatcaaatggatattcctttacgtgtcctatttgaaaaaccaacgatcgaagaaatagcccaatacttggagagcgagcgcacgaagcagatcatttctatccgacctgctacaaagaaagattactatccggtttcagcagcacaacgaagaatgtttattcttaaccagtttgatgggatagatatcagctataacatgccatctatcatgctactggaaggaaaacttgatctggtaaaactagaaaccgcttttaaaggtttaatcaaccgtcatgagagcttgcgtacatcctttgagttagtaaatggttctcctgtacagaaaatccattcagtagttgattttgaagtcgattatcaggtaactgttgaagaagagctggaagaaatcattgatgagtttatcaaaccattccagttaaatatggcaccattgcttcgcgtcaagcttgttcaaacccgattggatcgttatttgttactagtagatacgcatcatattatttctgatggagtatcatctgggatcatcatcagcgaattggtggaattgtatcaagggaatacgttaccggagcttacgattcaatataaggatttttctgaatggcaacatgaacagtctcagacggatttgtataaaaaacaggaagaccactgggttcaaacatttgcagatgaaattcctgtgttaaatctaccgacagattttccgagaccaaatacacaaagctttgacggagatgtaatcacaagaggaactggcaaagagcttatggaaggcttgtacaagatagctgcagacacaggaaccacactttatatggtcttgttagccgcatacaatgtacttctttccaaatattctggtcaagaagatctgattgtgggtacaccggttacaggtcgatcgcatgttgatttacagagcactgttgggatgtttgtcaatacattggccatgcgaaataaaccagctagatcaaaatcatttagagagtttttaatagaagtaaaactaaatgcattacaagcttatgagaatcaggattatccatttgaagagctagtggagaaactggagctacaaagcgatgtaagcagaaatccaatgtttgataccatgtttactctccaaaacagaggggaagattctattgaattagatgagctacggtttattacctatgaaggggaaaataaatggaaacactctaaattcgatatcacctttatcgccacagaagaaagagatcaaatcatgattggtgtggaatactgcaccaaattgtaccgtcaggaaacaatagaacgcttgacgacaaatttccttcagattataaaagcgatcgtagataatcctgaagtgaagctagctactatcgaaatattgacgaatgcagaaaaaaatcagcttttacaagagtttaataacacagaaagaaactatcagcaagatacaacgattcatcagctttttgaagaacaggtaagaaaaacaccagatcaggtagcacttatctggaacaagaaggagttgacttatcaagagctaaatgaaagagccaaccaattagctcgtacgttacgtaataaaggaatcgttcccaatcaactagtagctattatggtagatcgttccgtagaaatgattgttggtatcatgggtatcttgaaagctggagcagcctatgtccctattgatccagcttatcctactgaacgtattgaatatgtcttagaagatagcggtgctgttcttttactgacccagtcgcatttgttcaatggattagcagttaatatggtgaggctagatttagatgaggagcaaaattatgcagttgatggaaccaatctcacagttgtgaaccaaccaactgacttggcatatgtaatctatacttcaggtacaactggtaaaccaaaaggtgtcatgattgaacatcattccatcgtgaactgcctgcaatggagaagagacgagtatgcatttaatccaaaggataaagctctgcagattttctcatttgcttttgatggatttgtagctagtttgtttgctcctatgcttggaggggccacttcgatcttgccaagggaagaagaggcaaaagatccatttgcactacgaaaattgatcgcctctgaatcaatcactcattactatggtgttccaagtctgtttaatgcaattgtggatagcgctacagcagaggatttacaccaaatacgttgtgtcactcttggaggagaaaaattatcaccacaaattgtccacaagattaaacaaaaaaatcctgctattgagattaacaatgagtatggacccacggagaatagtgtagttacgacgatccaaagagcaattggagtagatcaagcgattacaattggtcgaccgctagccaatgtaactgtctatattgttaataatgagcatcatttacagcctataggagttgtaggggagttatgcatagcaggtcgtggattgggtagaggttatttaaatcgaccagaattaacagaagagaagttcgttgctaatccatttgtacctggggagcgcatgtataaaacgggtgatttggccaagtggcgtccagatggcacgatagaatatgttggtcgggtagatgaacaagtcaaagtacgaggtttccgaattgagataggagagatcgaatctaccattcttcagtatcatggtgttggggaggtagtggttactgctcaacaggatcaacatgcacagcaatatttatgtgcttactttgtagctgaaaaggaagttgtactggctgatctgagaaaatttgtttccaaggaactcccagcctacatggttcctacttacttcgtacagcttttagaactacctactactgctaacggaaaagtagataagagagcattgccaaagcctcagaacgtcggcgttgcagcaaaagaatatattgctcctagaaacatggtagaggaacaattggctgccatttggcaagaagtgttagaggtagagaaaattggaatcaccgatcatttttttgaaatcgggggacattccttaaaagcgatgcttctcatatcaaaggtgtatgagtacatgcaggaagagttgccgttgcatcttgtattccagcatccaacgattgaaaaaatggcagagtttattttgcataagcagtacgagcaaaacgcgggttacccgattctattaaataaagaaacaaatcgacctgtatttagctttacaccgattgcagcccacagtaccttctatcaaaagcttgctgaagaagtcaacgacatttctttatatagctttgacttcatagaagaagacaatcgcattgagcagtacgtcaatgcaattactcagatcgattctgaggggccgtatactttgatggggtattcctctggcggtaacttagcttttgaagtagctaaagtattggaaaaccaaggaagacaggtgtccagcattattttatttgactcctattggaaggataaagcaattgaacaaacggctactgaagcaagaaaagaaattggagcctattttaaaaaaatagcagaaaataacgagctgtttaatatgaaaaaagaggatctagagcagttcataactaacgattttatcaaacaaagtttttttcaaaacatgttcagttatctgatgtttcataatcaattggtgaataaaggtaatacaaaggccgctattcatctcatccaagcagaatgcgagcaaggaaacgtaacagcctatgaggctgaaaaatggaatgaggaagtgtgggcacgggcatctgaacgatttataaactatcgtggctatggagatcatccgaggatgcttagcggagaacaagttactaaaaatggctccatactcaaagagattctcgaagcgagttttgctctgaagtaaataagttactttagacgcagaccacatgccaggtataaaaggagcaactgctaaatttgattcagttgaacatactacagcgtatatggttgattacactccgacaactggtggagaaccaatgaaaaatcataaatgggtaacagagagtgaactttcaactaaataaaggttttaacaatagggttagaaaataaagaagcaattcttgatggattgcttctttatttgtcctatattaaggcgtatattcagcacatgaagcgcgaaaaggaatagaaaatcaaagaaatttgttacgatccatacaatgcaactcaattcgctgctgatatggaagcagaaggctataccatgattgaaattaggcaaggggtgcgtactctatcagagccgactaagaattttagagaaatggtcttagaaaagaaggtcctaatgacaagaaccctgtcctggaatggtcaattggaaacgcagttaccaagatggatgcccaagaaaatattggtcttttcttttgcaagggggcgatctggtttttgacaaaggagaacttgcaatggggttgacaagggatatcttcaagctgggtggaacgactttgaagttaaggcaggctcagcatgatagagagtggtagtagtacgcataaagtgacagcatacttacaagctgatacggagttttactatacagtacgagtctgggatcaatacaacaacgctagtttagtaatagacaataccttaaaacatataaagctccaacagctactccattattacctgtaggtagtagggacaaaccaggaggcgccagtttagcacctaccctaaaatgggattactatgatcctcaaggttttaatcaatactcttttgagataagtattgccgtaacagatctgtttttacaattacaatcagcagataatgctgtggcttttaaaaaaattgatttaaaataaagatggagttaaatgttatgattttgatgccaaagtataatgaaatgctcaaaagtaaaaaatcaatattaactgaactaatagaaaggaagagaagaaaatgattaataaagtcggtcaaattatgttatatgtaaataaccaagatgaggcattgcaattttggacagaaaaagtagggtttagcgtagtttctgaagaagatgatggtcaagggttaagatggattgaaattgctccaacaaatgaggcaggaacgagtatcattctccacaataaggaactaattgccaaaatgcagcctgaattaaatcttaatacaccttcgctgatgtttttctcggaagatctcgataagttatataaagacttttcagataaaaaaattacagtcggggaaattgtaagtatgccttctggtagagtgtttaactttgctgataatgaaaaaaattactttgcagtcatggaaaaaaagtaaatcataaaattatagaagaaaacatcaaaagtcgtttggatgtgagtgaacaatatacaccgtctgttatcaatcaagcttttttataaaaatcgagccatcatttataagtgaggaatccattttgatcaatcttttttcaaaatggattcttttattttggtgtaaaatgcaggtttacgcgcatattttgatcaaactgtttgagttgataataaatgcgtaactgtttattaagtaatatctggagagaaaactctggagcaggtgcctaaacaactaatagataaagacctgaagtgaaacgacaactaactgtactgggatatgaggatttagccaagtaacgccttctcgatcagagaggggttttttcattcatggggagctgataggctcccttttcatttttgcccctagggggtgataaggagagggaaaagcatggaagagagttaatgaacgcattccttcaacaggggccgttcgctgctctgtttgtttggctgttattctctacaaaaaaggaaggaagagagagcgaggcccaactagtaaaacaggctcagacacgcgtccccaaaatgattacattcttttagctattgttgagatggcaatagcctataatgcaataaacgctttattgttcaaggggagatttactcgaagctggcaagatagcttttattgaggcaacggctgtcattgggattcattcaggagttaaaaattcgtttcagaagggagatgtggagcaatgaaaccacaggattttatagataagatagcacctagtgctgtagctgacatgaagaaaacaaagatacccgcgtctcttacaattgctcaggcaatcctggaatcagcttggggagagagtggattaactaagcgagggaataacttattcggtatcaaaggaacaggcccagcaggtgtttgcgctatgcctacaaaggagaattacaacggtcaatggacaactatcacggctaatttcagagcttacaacaactggggagagtctattgcagaccattcaaagctaattctaaacggtacaagagacaagcctacacgctatcatggcgtgttaggtgctgattttaagactgcttgccatgctatccacaaaggcggttatgccactgatccgggttatccaggtaagcttatcggattgattgaaaagtatgggttagctaaatatgacaaggaggaaataacgatgaaaccagaggtagcaaatgaaattattagccatttacaagggcaatgggctttttacaatcaaatgggaattaaggataaggctgtaaggatcgggcaattggcagatgagttgagggttgcaagtgggcaaggaagaaagaatgaataataacggtttagagtgtgccagttacgtgctggcacaatttattttttgttataaaacagaacgtacattcgtatcaaatgtagattggtggtcaaataatgatagatacaattaacaaaaaatctgtgaaaaataaaataatcgctaacttcttgagcagagaagagaataagagtctttatgacaaagtgatttcaaaccctttagatactggagcaagtgaaaaactaaatgaaagtttcatagaatattttggtgaaataaggttggtaaaatattttgcttctttaatagagttttcttccatcaattattctaagaaaaatcgtgaggcagaagaaaaactagtccccataatttttgagaatgacgcaaaagaaacaaattctaatgaggatgattactttacagaaaacaatgaccttttagaggtaattggaaacgaaagtttgtacatagcgttaaccacattaactgataaagaaaaattgatattaaagtatttagttattgatgagtacgatgttagttatatttcaaagaagacaaatacaactaagcaatcagtttcaaagacgaagattagggcactaaataagttgaaaaagttacttgtggaaaggtagatgtcatgactttaattgaattgattaaaaaagcaaagctacatgatagagaagcaatgattaaaattattgaaaaatttgagccgaaaattcggaaagagattgcaaagacacctaatcatttaaaagaagatgtaagacaagaaatcacaaaaaatataatagaagcagtatacagatatgatatgaaaaacatccctgatttatttggatatattaattttaatgaaaaaaaagattaggttgactatttttgtttttttataccttaccttatatgaaacgtaaaagatcgaatgttttgaagggaaacacttgatcttacccttccgttcaaatataagaattgaggtgtttttttgggaaattttataattacttttaaaacatttattccagaagctaaaatagaagaacctgtctggggtcactggtataaaggtgataatcgaggttttgatttttatggaagttatcgtaccaaacaaaaaattgtaattaattttgataataagactattgaagataagccttatattggcgaaactcataatttgacaacaggagaaacaggaacggcacctacgagtgaccttaaattacttgatgtacaatggagtggttcaaatcaagtaaaatttaaagttgtttgctcaagtaaaaatcctttggttaaaggagctccggcgattgattacgagtttaaagtaacttttaaatcagatggtactggatttattgaaggattgcatgacgggttcccaaattatgaagtatatatcaatacttcaagttcattgggaagaaataaaaacgttatttatacgtatggtcataaaaatgaatcacctagggctctctttcctccaatggataagggtgtaagtcgtcgtccatttgcagttcgcattggcaagtaaaaaaagagaattatctaaaaatataaaaaatcaaaaaggctccttttcaatagaatgggagcccttttgattcttaactctatacaatgataagcaataagattgtgaaaatcggaccactaaaacttaataaagtcgaaattaatttagtgtttttaaattgcgctacgaaaaacataattgaaccgaatatagtaatgaaaggtaaaatgattgccttaggataaagcgtatagagtacagctccgaaaatgctacctaatacaatgaagaaaaatgtacaaatcagccagcttttaattctactttttcgtaaaatagtaagtaacaaccagccaaagatgcaacaaatataattaaataatgaaataaataaaataacagcatcaaaacctgattttcttaaatcagaaaaatcaattgtatgacttaaagaaaatataaagaaaattaaattagcaaagaatagagataatcctgctccagacaagtatgatcgcatttagatcataacccccttacgttaatattaattattataccataaaatgggttttgtttaatggttcttaatcttactaacgtgtaaattttgaaatgttaggttgttagatgagaatataaacatcgggcaattggcagacgagctgagaatagctaggggacaggagaaacagaacgaaggctagattatcgtgtcagcattttcaataatgaatatataaaatagacagataaatgagattgacttcgatgatatatggatataaaatgaaagtatcatatcatatcaagttttggtaagttgctatagtaagggcaacagacccgaggcgttggggatcgcctagcccgtttttacgggctctccccatattcaaaataatgacagacgagcaccttggagcatttatttccgaggtgcttttttttctgggaggggtagaatggcatacacaatgggaatagatgtggggattgcttcgtgtggatgggctattgtagatcttgaaagacaacgaataatagatattggtgttcgaacttttgagaaagcagagaatccgaaaaatggagaggctcttgctgttccaaggagagaagctagatcaagccgtaggagattacggagaaaaaaacatcgcattgaaagattaaagtatatgtttgttcggaatggactggcggttgatattcaacatcttgagcagacgttacgtagtcaaaatgaaattgatgtatggcaattacgagtagatggtttggatcgaatgttaactcaaaaagagtggcttcgtgtattaattcatcttgcacaacgtcgtggttttcaatcaaatcgaaaaacagatggttcaagtgaagatggacaggttcttgtaaatgtaacggagaatgacagactaatggaagagaaagattatcgaaccgtagcggaaatgatggtaaaagatgaaaaattctctgaccataagcgaaataaaaatggaaattatcatggggtagtgagcagagcttctttattagttgaaatacatacattatttgaatcccaaagacagcaccataattttttggcatcaaaagatttcgagctggaatatattaatatttggtcttcacaacggcctgttgcaacaaaagatcaaatagaaaaaatgattggtacatgtactttcttaccgaaagaaaagagagctccaaaggcatcttggcattttcaatattttatgcttttgcaaacgatcaatcatatccgtataacaaatgcacaaggcacgagaccattgaataaagaagaaattgaacaagtggtcaatatggcacttaccaaatcaaaggtatcttaccatgatattagaaaagtccttgatttatcagaagaatatcaatttgttggcttggattatggaaaagaggatgaaaaaaagaaagttgaaagtaaggaaacgatcatcaaattagatgattaccataagttaaataaaatttttaatgaagtggaattagctaaaggagaaacttgggaagctgttgattatgatacagtagcgtatgctctcactttctttaaagatgatgaagatattagagattatttgcaaaataaatataaagatagtaaaaatcgtcttgttaagaacgtagctaataaagaatacacaaatgaattgatagaaaaagtgagtacgctatcttttcgtaaggtggggcatttatcattgaaagccttacgaaagatcatcccgtttttggagcaaggcatgacctatgataaagcgtgccaagcggctggttttaactttcaaggtatatcaaaaaagaagagatctgttgtcttgccggtcattgaccaaatttccaacccagtagtaaatcgtgctcttactcaaacgcgtaaagtaattaatgctctaatcaaaaaatatggttcacctgaaaccatacacattgaaacagcaagagagttatcaaagagatttgatgaacgaaagaatattactaaggattataaggagaatagagacaagaacgaacgtgcaaaaaaacacttatcggaattagggattattaatcctactggtcttgatatagtaaagtacaagctgtggtgtgagcaacaagggcgctgtatgtacagcaaccaacccatctcctttgaaagactaagagaatcaggttataccgaggtagatcacattattccatacagccgaagtatgaatgatagttataacaatcgcgtattggttatgactagggaaaatcgtgaaaagagtaatcaaactccttatgaatatatgggtaatgatacgcaaagatgggatgagtttgaacaaagagtcacaacaaatccacaaataaaaaaggagaaacgacagaacctcttgctaaaaggattcactaatcgtcgggaattagaaatgttagaaagaaacttaaatgatacacgtcatataactaagtatctttcccattttattagtacgaatttggaattctctcctagtgataaaaagaaaaaggtagttaatacaagcggtcgtatcacttcccatttaagaagtagatggggattagaaaaaaatcgtgagcaaaatgatttacaccatgcaatggacgcggttgtaattgctgtcacctcagactcgtttatacaacaggtaacgaactactataaacggaaagaaagaagagagttgaatggggatgataagttccctctaccttggaagttttttagagaagaagtcatagcaagattaagccctaacccaaaagaacaaattgaagcattgcccaaccatttttatagcgaagatgaacttgctgatcttcaaccgatttttgtgtcaagaatgcccaagcgtagtataactggagaggcgcatcaggcacagtttcgccgagttgtgggtaaaacgaaagagggtaaaaatattactgcaaagaaaactgctttagttgatattagctatgataaaaatggtgattttaatatgtatggaagagaaacagatcctgctacttatgaagcaattaaagaaagatatctcgaatttggaggaaatgctaaaaaagcattttcaacggatttacataaaccgaaaaaagatggcaccaaagggccactgataaaatctgtgagaataatggaaaataaaacattggtacatcccgtaaataaaggaaaaggcgttgtgtataacagctctattgtaaggacagatgtatttcaaagaaaagagaaatattatttactacctgtgtacgtaacagatgtaaccaaggggaaactaccaaataaggtgattgctgctaaaaagggatacgatgattggattgaggttgatgatagcttcacatttttatacagtctatatccgaatgatttaatattcatcagacaaaatccaaaaaagaaaatatcattaaaaaaacgtattgagagtcattctatttctgatagtaaagaggttcaagaaattcttacctattataaaggggttgatagttcaactgctgctatagagtttattactcatgatggtagttactatgcaaaaggtgttggtgtccaaaatctagattgttttgaaaaatatcaagttgatattctgggtaattattccaaagtgaaaggagaaaaacgacttgagttggagacatctgataataaccacaaaggcaaagatgtcaattcgattaaatcaactagtcgttaaacaagaagaagaggttaccatacctcttgaagatatcgcatctattgtggttgaagaaaatcaagttgtgttaacagctgctctattaagtaaatgcagtgaatatggaattggtttgtatacttgcgatgaaaagcatttacccaatggtgtgttacttccctttcagagtcattcaaggcaattaagggtacttgaaacccaatataacctttcaaagccatttaaaaaaagagtgtggcaaaaaataattacaactaagataatgaatcaagcattgtgcttatcttatttggataaaactggagaaagtgaactgcttgcaattcgcaataccgttgattcaggtgactctacgaatagagaggcatatgctgctaaagtttattttcaacatttgtttgggaaacggtttattcgaagggaagaccatataataaaccactccctcaattatggttattcgatccttagaggaaatgtagctagagttttagtacagtatggattctttccatgtctaggaattgaccatcacaatgaaaataacgcatttaatttagctgatgattttatggaggtttttcgcccattggttgatttatttgtcgtgaagcattttcatgaggagatggaatttacaccgaagtggagagcaggattgtataatgtagtgaatcatcaagttgaactagaaggtgaaagatattcctgtaatcgagctattgaagaaatgattaaaagctacgttacagcatgcagaacaagtatgtatgagagactgagaacaccaacattactccctttgaagattcattcatatgagtaaatatatgcgaatacttgtcttttttgatctaccggtgaaaaggaagcaggatcgtaaggcttactttgcatttagaaagtttttaatagcagatggatatgatatgctccagttttcagtctattctcgaatttgtaatggcaatgaaggaacacataagcatttggaaaggctgtcacgtaatttgccctcaaagggttcggtacgatcgttgattattactgaaaagcaatatgaaaagatgaaattttttgttgggaaaccaaaaataaaagaagagaaagtaaacagtgtgcaactaacatttttctgaaaaagaaaattattaataggaagaaaggagtttttcttacctttttaaaataccaaaagccttgaaagggttgatctttcaaggctttttgggcacgtatcatatcatatcgagttttagtaaggaactatagctagataaaaaacatagaaaaaaaacccttcatcatatcatatcgagttttagtaaggaactatagctgaaaccagcaggattcaaattagggtttaatcatatcatatcgagttttagtaaggaactatagcaaaaagggaggtatgagaaatcaaagcagtatcatatcatatcgagttttagtaaggaactatagcgttctgtcgatggtggggaatcagaagataatcatatcatatcgagttttagtaaggaactatagccattaatctagcatatacttcgctttgttaatcatatcatatcgagttttagtaaggaactatagcattctgtccgtgatcattcagagtttttgttgaagccacgttattccaagattattaatgccgattggcgtactgcttgccatgagattgagaaagcgggctatgcaactgattcggaatatgctgaaaaacttattaaacgtattgaagagtaccaaccttacaaatacgaccaaggagctgatagaatggccacacctattttaattatcgatccagggcatggcggcactgattcagatacagtgggtaacggattgagagaaaaggatctcactctccaaattagtttgtatcaatttaatagatttaaagagctaggcttgcccgtagcgattacaaggacaacagatatcactctgaaaccatccacaacgtacaggagcggttaaacaaagcagggctaagtattgcatttcaaaccatataaacgctggtggtggcgaaggtgtggaggcgatccactcgattcatgacactggtaaacttgcgaaagtgcttgcccattctgttgtgaattgcggccaaaagttccgtaaggcgtatagccgccaaggaaacggaggcactgattactatttcatgcatcgagagaccggctcggtagacacaactattttggaatatggttttatcgacaataagggggatgctgcacgtttagaggctaactgggaggcgtatgcagaggctgttgtcaaagcattttgtggatacgttggacatccgtataaaccaaaaggaggagttgcagctatgagcgacttagataaatcattagaggcccttgtaaaagctggtgtcattcaatcacctgagtattggaaaacaaatactgttcaaggcgggaaagtaaaaggtgaaaatgccgccacactaatttagaacatggccaaaaaattaggggtatagaattcaatagcctattagactaaaatgccgttcaagtgataggcatttttcttttttccctactgcacacacacacataacttactacatcaagggagctatttacgatgatctttaacatggattgcataactggagcaaaacaacacctacacgacgaaactattgacctactcattgcagatccaccctacaatctaggttttggttggcactacgcaaaccaagacgaaaaagcctagatttaacatcatcgcaaacgatcagctacacctacgagactatcagcgattcacttttcaatggctccgagaagcgtacagagttttgaagcctggtagacatatttacgtgtttatcgattggcgcatgtatccgctcctttatttgtggatgcagcgcgtcggatttacgataaaaaactgtctggtctggaacaaagtacacatgggcatgggctggcaataccgctatcagcatgaatttatcatttttgctgtaaaggggaagaacaaggtccgtcgtgtttcgaatcgtcgtgcaacggacatctggtcaataccaaatgtagcaggacaaaaaatgattcaccccactgaaaagccggtaaaacttatggagagtatcattctaaacagtagtcaggaaggcgaaacggtagcggatttctttctgggatctggtcctgtggtcgaagcagccaacaagcttagcagaaatataactggttttgaaattgatgaaaactattttaattaagcaagtagtagacaagaactgcctcctttatagggggcggttcttatacatagagaggaaaaataatacatagaagaaaagtgtttatgtcgaaaagagatcaatgagtgtaatctgaaaataaaataaaatataataaatttcaaaatgtgacattattttacaacaaacttttgataatctattaataagacattatctgacaaattttaggaggaataaaaatgttcaaaaagattttcgtgttgtccactttcttagctctatttgctaccacaattatagcaccttcacaaaatgcttttgcttctgcaaatccaactgaatcagtaactgtagcggtagaagaggattttacaaaagaggcccagccatataaagtggataaaattcaagtatcaaatagccaaactgcaaatgtattttatttcgaaaacgaagaagatgccgaaaaattccaagctgagagatattctgagtcaaccgcatccacatttcaagaacaacaattaactaaagaaaaaagatccatattaccttctgctttatacgggtatagctatttaggataccatggtaacatccagcatttttttaaggagaaaaaagtaaaaaacaatactaactctcctctaaaagacgttaaatttgattttaacgaacaaagaagcactagaacgtcatcttccgtttctgctgagtttcctaaagtattcaaaaccgaattgggttttgaatacgctacctcacatacctatacggtaagcattcctgtaaatatcccagcaaaacactacggacaagttataacatataacaatacagacgtatacaaatttaaacatacaacttatggtaattttaatgtatactatcctacagagagcgatgaatacgatatctatattgtaaaattgtaaagctgtaaagctgtaggaaaggagaaaacatgtccattcctcaaattgtacaaaagggaatagctttaatactttgcttaaccggttggtacgtcactagtgagagctcaatattgggaagggatgcagcatccgcttacatctcaggatttaaaagtattgatcctccggaatatttgaagttaatggagaattttatattctcctatcaattagctgggggaatatttttaagcattggattggtgtaccttctaaagggcttggatcgtcagaagtaaagacaaggagtatactcttccttgtcttttttttcattaataaacatgtaattttacccattgcttaatctcctcaccatctaataaaataggaacacacattcgtgttttagaggagatgttttgatggctagtaaaattcttgacccacttgtaacgaaatttattttgccagaacatgcagaaatgttacgtcagtatcatgaggataagaagctgatcgagaagccgatcattgaagaggatgagctggccgagttttgttataggatatctgactcatgccagtatgactacgcccttacgattagctggtggaaagaaacaaaagagggccgaggcgtgatagagtccgcttggggatgggtagataagtttgattttcaatttaaacagatcaagctaaagaatgatgaggatttttggtggattcctgtagaagatgtagtgagtgtggaagcttaagctgagaatcttataactgcatatagtgtattgtctgtgggaacagggatacagcaaacaccccactattaatagcctagtggggtgtttccacctaacatttaatagcttttcaaacggttttgcatatatgcgtgttagagacgttcgtctgaaagttctagtacatccgtaataccaatgctaagcacctcgcatattttcgtaagattattgagtggtagccgtacagtttcattattgcacatttcgttgattgacgagacgcgtatgcctgtcaggcgtgagagttctcgttgcgagattccacgttctttgagtagatcggcccggcggctttttgtatgtttggaaggaattagaaatctccttgtcgaaaggtgtagacgaggaggtggatactatgaaagttactttcgaaagcttcccggagtggaaacatagcgtagacccggactgggacgcaggccctcgttggaaaactgctcctgagtggaccggagacggtggacactaatatagggaggttacgtaatatgactgaaccagaatggtacgcagacccggggtattaatcgaaggagggtattacttatgacggaaccagattgggcggtacaacgtaattgcaatacgggagatccgggttggctagacgatcccggatactaagtaaaggagcgcacgatatggcagaaccagattggactaaacaacgatttgaccacggtggaatcggctggtaagtaatagcatttaccacgatgtacgcggaccagagtagtacgcagctactgctacgcttagtctcgtgggagctggattcatgtcgaggtgtacacttgacgtggctggcgctggtgccccgacctttcgggctatgagcgctggaatatattcggaattaacgaggaacaggctgcctctatgtcgaaagtaataggacgagaggagtgtactttattgggtaagtttggaaaactacttttaatttctattttactaggtactacttttattctattttattatttttattcaaaatcaaaagtagatgagtgggttgggattgaggttaatgactggcttgaccagaaactctctgatcatatatatagtcaatttgttctttcgttcacggttgatggggctaatgcgaataaactaaatgttatagcctcggaggaagttgctgagtatggaatatatctaaaagaaagagtttttaggaacaatttatgggttgatttttgcgaaaagagaaacataaatttacagtaccataagaaaaaagaagatatgtatcccgttgactgtgtagtgaacatttcaacaaaaaaaggtgacattcaggttgataataatctgatagtagacgtagatggtacgcggtatcatagacatttcgggggactctacacatcgaatggtttgattgaatctcaacgacgtgcgcatgaaatagagaagaataaggccattctttcacatcacgattgtggaaacagagctcgcttcggctctttggcatatgatacttgcgtaaaggcttttgagagagagaagaaagaaaaattaaaggaatacaggataaatgtgaaatagtgctaaacggtcgccgattacggcggcttttttatttagaaggaaatcttacagctatagaaggcactacctgttggaacaaggatacagataacccaccagtaaagatggctaggtctttttttcgtcaaaacctctgctttctcgctaaaggattcgacaaagccgacacgtaataacgtattaacgtaattacggaagcgaggcgaggatagttgataaaaagtcggttgaaagtgattttggccgagcgaaacatgcaacagcaagatttacttaggctgatgaaaaaaccagtttctcacggcgctatgagcaagatagtaaatgggacaacccctaagctggaaacggcagcggatatagcgcaagccttaaacgtacatatagacgatatttggttcctggaatgaagattttttatttggacaagcaatatattcctgacaggaacatacactgtaccattaagattaaggagctggtgcagatgtggatcgtccatcaacgaatggctgagctttggttcatcaataagacaagggagcttactgactcggaaatgacagaaatgagccattgcctgagtgcaaacgctcaaagagcttgggagattgcaaaactcaaaaacttatccctgatcgccagtatgacgaacgatatggactggcagcatgagctatgttcaaggatagagaagatagaaggctgacaacattgacaacgcaatgaagtaaatgacaagcaaaaaagctaaaaataatcattgttaatcgcaataaaatagcgtagttgcgcttcattcagcttatgtgtaaagtaataattaaatcatgatttattcatataaatttgctcatatgttcatttataattgacccatatgagtcatatagttataatagtcatataattataataattatgaatccatagagaaaagaggttaactatgaaaaaaatgatagcaatttcttttttgtctttggcgatagttggattatccttttttccaactaacattcaggcatctggtattccgtggactacatctccgggtatagatccgactaaaggttatagtggtggtggtagtggtggtggcttacaatgccactcatttgactgctgaaaatagatactacctgtgaaaactatgaagacctgagttattctatataacttgaacgaaagatgcggaatgggttctacagcaaagacatcccatatcctacatgcaaagcattcgttcagctaatatagtaaaaagagcttcttcgacgtttaaaatattccaggcgtaaatgctggaaatacataaaaagctgctgattattcagcggctttttattttggtggattgcatatcacatatatgatgtggtgtcggaataggtagacgataatcaggtataggggagcattccgggcttggtaagtagtatgcgttggccgaatagagatggaaagcagtacgcaaggcggtacatctacccatagcaataaaacgaggcgtccagttcacgcctcctatatctggaaggagcaaatccttgcccacatcgttattatgttttttctaaccttttgcataggccgcattcttaactgagtgtggtcatttttatttccgcactattccacctatgatacaatatatccaaatgaaataaagaggatgtgtgacctggtgacagagcattgggaattttgatagtttcctttgaaatatctccttcactcctgtttgatctatttgacaaccaaattgacaacgcacttaaataaatcaggtaaatttaaatcatcttaattacacacaaaccgcactacgataaggttaatgcacttaaattaaccaacgtaaagatgtttgaccaaattgacagagtgggggccgcttgtttgaacccagtccggatcaccataatagaaacgttaaaaaccttgattatcaaggctttttttgatgttacagggctgtttaatttactggtacaggctctaaaatactaacttggggacggattggggacgaaactttttttgtcctcttttttgtcttctaaaatcgagttatgcatttttgaggactgatatattttgtagtttatatcccgatccgaaggcatacgtttcaacgttggtgagatgagcctttaattatttataagcacgaaatccctctaggggcttcctagagggataattttattaaaacaacttaataatcaccttaaaaaacatgagaaccccctccgtagtgtaggagggggtatcttattatctactgtattcttgaacttcaaagctttcaatatgactgtagctaatgaagtcttttctagaattgaaaggtccgatgttgtatttcttattaacgattggggattttccactgttacttaaaggggtgcatttcataatatcaatttaaaaatcaaaaaatccttcatcatacaaatggtcagaatcaggggatacatcttcaattttagtaaataaactttcgaatttatcctctgtgattaactgatcgataatggatgtaatcgtctcggctttgatattgtcgactatcaccatatcgcttgaccagaaatatagtccactcatattttcaccgcattctttattatgttgtcttatactttcaatgtttttataagtaaagaatgaggcaacatatcttgttcgattcgggaaggttacgatgacatctgtattttcgtcgtaaggatcaaactctccttcaccaatttctgatctaatccaaatgttttttttctgatgtttctttaattgattcatcttcatctatagaaccccttttacaaatatttaattataaagctttctcaatcgatcaattaccgtttgctgattatgtttatctgatttccctaaaatctcaaaagtatctcctttcattctataatatactcttgctccttcctctcctctaagttcatgtacatttccaaataaaggtcttgaacctttatttgggtttaggcctcttaggtatttttcgaccaagttattagcttccctttgaataatagggcttttcatagctttctcagtctcttttaagataactttatcttcatcgatcctagatttcacaaaatatttaccaatcttctgtcgtcctttgaggacatcatttgcaagatcgattacatcatcaccgtattttttcagtaggtcatacgtttttttaccgacctttgctcccttacctgcagggaatagagagagaattgcgaatcctttctctgcatcactagcttttggatcaaaaattgtttttacatcatctaaaattaagaagtccagtcctgctttggcagcgtctaataaaaagttaccagcatcaactagccatctcttactagaatcaatccaatcagaggctgtatcttttaaatcatcccaccatgaattag

SEQ ID NO: 1784 - DNA, 23264 bp, synthetic construct
  misc_feature 1..23264: note = Synthetic
  source 1..23264: mol_type = other DNA
attttgtactaaatcaccagccttttagatcttgcggcgcgctgtcattgataggcggcaaggcgcgccttctttttgaacatgatgaaattgattttgcattcagctggctactcgccacgtttcacactcagcttgtatggaagatgaaaacggaaaatcggaaattttatagatgaacgatgggctttatattttatcgcacttcaaacatgaatgaatcatttctgcttattgcatgcaggtattgtttatgataagatataaaacgaaatgaccgaaacgtccatttggtcaaaaagatgaacgcccctgttagataaaaagaaacaaatgattgatgcaacaactcatcagagtgaatggcacatgactttaaacgttgattgggggaaggaacgcgaaccattgtttcaacaaaagattgcccaacggttcggctgatatcggtaaaaaggattgtctccatgaccatccttctctttttcacaaaaaatgactaaatggacaaatcggtcaatattattaaaaaggaggttccgcatgtgcgtgcatttcaattatggatgcaggaatggaaagcagttgcatccaatcggaaaacactgattccgattatagctgtcttatttattccgcttctatacagcggcatgtttttatgggcgttttgggatccatacgatcatttggacgaacttcctgtcgccgtggtaaacaaagacaaggggacaacgtttgaggggaaagcgtttcatctcggcgatgatcttgttgaaaagttaaaagaaaaaaaacagtttaactggcattttgtaaacgaacatgaaggggaaaaaggattaaaagaacaaaagtactatatgctcattcaaatccctgaagatttttcacaaaatgcgacgacgttgcaagacgatcacccgaaaaaacttcaacttatttacaagcccaatgaaggatttaactttttatcagcccaaattggcggaacagcggttgaaaaaatcaaaacagaagtagccaaaacgttaacggaaacgtacgcagaaaatatgtttgaaaacattcaaacattagcagacgggttaacaaaagcgagcgatggagccaaacaattacatgatggtctcggcgaggcaaaaaatggaacaaacaaactgtatgatggaatgaaaaaagcggaggatggatccaaagatttgcatcatcatttagcgacacttgccgaaaaatccatggcctttactgacggattgaatcaagcagtcaatggttccacgcaagttcaagcaggggttcaaatgcttgacaacgggatgaaacacatggtcgacgggcaagggcagctgcttgacggagcaaaacaggcgcaagagggaaccgcaaatcttgcttccggtgcaaaacgcgtatatgaaggaatgcaaacactcgatgcccgcatgccgcagcttttgcaaggttcggaacaattaagcgggggagccgaaaagctagcatcatcgcttgcgcaatggcaacaaggggcggctcgggttcaaacaggggcgacccaagtaacaggcgggcttgaacagttagcggcgcagcttgatgcactcattgctcaaacccccgatccgacacaaaaggcggtgtatgagcggctaaaggaaaatgttgagaaattatcattcggaagcaaacaagtcgaaaacggcattgcgcagttaaacgatggagccaaagcattacaatcaggagcagcgtcgttaaacagcggggcgaaacagctgcatgaagggcatattgctctcgaccgcggggtcgacgaactgctttctggacaacagcagcttgtcaatggcgccaatgcactcttgaacggccaagaaaagcttgttgcaggcatgaacacgttgcacgaaaaaatgaaagaagcggaacaaggagctgacaaactcgcgaagggcggccaaacactgacctctggtctgcaagtgcttgctcaaggagctgatcggctgcaagacggcgcccatcaattggcggatggttcgcagcaactagcaagcggaatgaatgaattaacgagtgggacaaggcatttgcaaaatgggatgaatcgactgacagacggctcggaagaactagcggatcagttaaaagaaggggccaaaaaagcaagcgacgtaaaagcaaataaagacgtatacgacatgtttgcagaaccggtgaaagtaaaaaatgaaaaagtgaatgaagtgccaaactacggaacaggatttacaccatatttcttgtcgttaggcttgtttgttggggcgcttttactctcgattgtcttcccgcttcgcgaaccagcagcggttccacgttcgccatttcattggttttttgcaaaatttggtgtgctcattggggttgggatttttcaagcgcttctggccgatagcgtattgctttacggacttgacttacaagtgaaaagcgttccgttctttatcttgtttagcgtcgtcacaagcattgcctttttatctgtcattcaatttctcgtcacaaccttcggggatccgggacggtttattgggattgtcgtattaattttgcaattaacaacaagcgccggaacgttcccgctcgagctcattccgcgttcgttgcagcattttaacgcatggctcccaatgacctattctgttttcggattcaaagcggtcatctcaagcggcaatttctcatttatgtgggaaaacatcggtaagttgctgctgtttatcgtcgccatgatggttggaacgatggcgtattttacgatgcaacatcgccggcgatttgcaacagccgtcgaacaagcttctgaggcataatatgcttcagaagctttatttttcacctcacatttcgcaccctcccgacgaaaatcgggaggattttttcgttctgatatcaaatgaatttccttttgagtcagtcccatgcctaaaatgagaaatattcttttcttcatcccatggcacaaacactatgtatggatagagcgatttttaacgctgaacttgacggatatggacatggatgagagcatctacgtctaacatgatacggaacgactaacgatggtcaaaaaagattgccatcgctagtcgtgttggccaaaacgttattctgaaaagcgagataaaaaatcctttagcctagtcgataaaaaatcgggaaagattttagaaacatacggtgaaattatacagcccctagaacaagttgcaacaaaaacacgcattcacgatggcattgacatagggcataaccaagtctccgacatctcggatttcgatgggaaacaggcggatgatgatgacagagatcgcgatgatgaggaacaaaccgattagagcgccacccaaccgcgcatgcggattccatcgaattctcgccaagccgacgatcaacgagccgatggcgaatccgagaaacgagccgtacgcataatatccgacatcaaacgtcggaaacaaaaaggaaaacaagaacacaaacaaagcgccgccaacatcaagcccatacgaccgaaccacgtcttcccctccttcgtccccacaatgtcagaaaaaacagatgcccgtcaaaatcatcgtccatctcgcggcggatcccctattcatgatatactcaaaaatccttcaaaaaaatgttcgcttttcacctaattttctccttccccctctacaatacaaaccgtaagccagtccactgccgaaaaaaggaggtgacgatgtgaaaaaggcaaaaacgttcctattcatcgcgctcgctgctctcgttggatggagcgcgtttcatgttctgacgccgcatgaagtgatggcgcacggccgtccgggcgttccatttgccggcgtgcacgatggattcggacatcaccatcgagagttcggcatgggatcgcgcgaaggctggatgatggcaggtttgttcatttggtggctcattccgtttttgctcgtgggcgcgggggcgatatggctcgccgcggcgcggtcgaagcgctggatcggttgggcgcttgtcgctttaggcgttgctgcgatcttgccgaaatgggtgctgatcttgctggcgctggccgccgtgtacaccttagggcgccgtcaagcgcgaaaaacggcaattgccgaagtatgggcgccagcactgccgtccgttcccgtcgattggttggatgaatgggaaaaaacaatacaaaaggaggccaaacaacatgggcatttttcgccggatcaaaacgattattctcgctgaggcgaatgaacaaattgaccgctgggaagaccccgttgccatgacgaaacaatatttgcgccagcttgagcaaaaactcgaacaaggccgccaagcgctcacccaacaatgggtcgccgagcggcgctatgagacgctcatcgcccaagccgaagcgaccattgagaaacgaagccgccaagcgaaactggcgctcgagcgcaacgaagaatcggtcgccaaactggcgctgcgtgataaactgttgtacgagaaaaagctggaggcgtacaaacaacaatacgaagccatcaaagcgaaaacagttgaggtcgccaatcgcttgaaccaactacgcgaacggtacgacgaactcgccgccaagcagctcgagctcgcggcgcgggtgaacgccgctcaagcgttgaaacaaatcgacacggcgctcgcttcgttttccgccgatgaggcgctgcgcggcttcgcccgcatggaagagcgcgtcatcgccttagaagccgaagcggccgccgcccggttcggtacgaatgctgcgttgtcccccgtgccatttgaggaagaagtggaacgtgaattagcgaaatggaaagaagcccaagccaataacgcctaatcccctccccctttgacatagatgacccccttgccgggcaggcaagggggatggtgtttgttcagggaaatggcaccgctccccaccgtcgcacggcctgactctcgctttcccccgttcggaagcaaaatcgtttcctttgtttttccatcgtggtaaaatcattagagaaacgaaataatacaggagatgacctcctatgaactggaagcgaagcgtccgcgttctttggctgtgcaatttcatggtttctgccgggatgacgatggtcattccctttttgtcgctctttttatggcaaatgggcgtcactgagcaccacgccttgagcatctggacaggacttgtgttttccgtcacgttcctatcagccgctgtcatggcgccgatttggggggtattcgccgataagtacggccagcgcgccaacctcatccgcgcggggatcggcatgggcttgatcaccggatgcatggcgttcgccgcctcaccgatggcgctgcttgctctccgatttcttgtcggctttttctctggatttatcactgtctcgttttcatacttggcccgcgttgtgccgagagaccatagcggcgaggcgctcgggacgctgcagacgggaagcatcgccggcaacatcatcgggccgctcatcggcggcgccttatccgacctgttcggcttccgcccggtgtttctcgtgaccgggctttgcattttactgacgctcttgccggtcattttttggctcgaaaaagatcccgtcgtgccgcagacaaaagaaaacaaggccagcttcaaagaagtattcagacaccggccgctcatcgtcttatttatcgccacgtttctcgtgcaaatcgcggttcttggcgtcaactcgatgatgacgatttttgtccaatcgctcatcggccattctagcaatctcgcctttctatccggcctcgcctcgtcgatcaccggcatcgcgacgatcatcggcgcaccgtacttagggaaactcggcgaccggatcgggcaggagaaaacattaccgatactgcttgtgctgtccggcttgttcgccttgccgcaagtatggacggacaacatttatgagctgtacgtgtggcgcttcttgcaagggcttgttgttggcggcgtatggccgtctattcaagcgctcatcaacgcgcaaagcccgcgccgcattcaagggcgggtgttcggcgtcacggcaagcagccgcttcctcggcaacttgactggcccgaccgccgcaggcgcgatcgcagggttcttttccatttcctccattttcgtcttatctggtctcttgttgatcgccaccggcgcattggtcgggtatgcgacgcatgaccgtgcatggcgcgaggaaatgaaagagaagatcgccgcttggacgcatcgtctccatagtcggtactgacaaccacagcggcaagaggcgcggcagaaaaaacgaaacggcccgaagaaccattcctttcgggccgtttcctctcatcgtttcatttctccgtccatttgatccatcgaagcaacgaatacggaatcgcttccccgatgcgcccgttccgcccagtcgtcgtttccgccatcgtcaatgaattccaaatcgcttcctctgtcgcctcaacagccgcctgaaacaactcgttcatgagcggcgcatcatcgcggacaagcggagggactgattgaagaacagaatcggaaaaatgagcaatcgtataggcgttggaaaacgcgatgacaatatcaccgctcccgtgatggacatggcttcccgtccgcgccagccccaccgccgcccgcttcgccagccgcttcaactgccgcgcatcaagcggcgcatcggtcgcgacgatcatcataatcgaaccagccggcacatcccgttcatcaaacgacggcggcacatacggcacaaaccgcagctcttcacgccgcccgaaattgctcacgacaagcgctccgaccgtatacatcccgcccgcgatccgcgacgagctgccaatgccccctttccagccgaagcacatcatacccgtccccgcgccgaccgccccttcttccatatcgacgcgcgcctcggcaatcgcctgtttcgcatgctccttcgtcaccgaaagcgcccgcgccgtattcaaatagctgtcattgcattccccgacgacaatgttggccgacccggtcgtatctccgatctccggcgtcatcgcaagcatatactctagcgtcccttgccagacagcgccgacactgaacgtattggtcagcataatcggcgactcgatcaacccaagttcctcgacctgcaccaacccgaccgttttcccaaaaccgttcaaaacaaaacaagccgcgggcaccttctccaaaaaccagttgcccccatgcggcaacaccgccgtcaccccagtgcggatcactgtccgctcattcatatcttcccgaatcgtcacatgaccgacccgcaccccaggcacatcggtgacttgattgcgctcccctgtcggaagcgtgccgatggaaaaaccaagatcgcgaagtttagagcgcattgcaacctccatttacttccgaatgatgtgaagccaactgatggaaacaactccaaacgaaccaaaagctcggacattgaacgctctcccacctacgcccacgcgtggaagtggggggctcctcggcgcgagatgataaatctccaaatattttttccatatctttgttgaatcgacatcatcatttctttggtttggctgcaacccaaccagtcttgtacctgctcatcgggttcgaatgattcttttatttcaaagtttcaatcccttataggtacgataaaaacacaatatgaccgatcttttgtccctttgaatttcaatccctcgtaggtacgataaaaactcatttgatacagcctcatttttggtgtgaaacagttttatttcaatccctcgtaggtacgataaaaacaatgtttttcccatccctgtcggcaaattcagacgaatttcaatccctcgtaggtacgataaaaacccaaaaatgcttgttgtatcaagtatttcgatctaacactgttttcagagtaccacgttccaaaaattctgtcaatacccttcaacctcgatggctgtaagtctgaaccgccaaaaattattgtcgtcgatcccccggggtttttgcacgattggaggtcgacgacaatcttgcggctggtttatccacttgcgaggcgaaacattccaaacccttgtgaatttcgactgccaagaccgacgtggtacaaaaatgtcaactgttctggcgaagaacaaagacgataatgtcccatccagcctgtaatatatatgtccttgaatagtgtgaccacacgatgacgccgatgaacatagatcggttgaatcgataatcgttccgctggcggaacaccatagtacgctgcatatttgtgacagaaattcaattcaatcaagtgggggaatacctcatcatcaggatcaaaaaattgcgttttctttctcccatccatcgtctcatatgtgctgtatacggtcagtggagaaagcatgacaacgtcaatttcatgcccccgtatgtcaacgctctccattttgacacttttcacttcaatcaactgtccgtaaagctcaatctccctttgcaccaagaatctctgcccaagttgttgagtcagctctggaagagcggtatcgatatgccattggaaatcccccaaaaaatgaattgttttcctttctcgatccacttgatgcgttccaaataaacggctaaaggtaaacagtttaaatgaacgtttctcgtggcgaaatcccctgtcatgcaaaaacgcggctaattgttcattttctaacgaacggtacaataatccttgcaacaaatgctgataatgcagcggcaaggaaaccgtcccttgccgtccgctcatggtcactgtcaatctcatgttttttcctgccttccttattgtataccatttgacttatagaatgaattggacctttgtcaacagaatggacacaaaaaatcgagagaattacgcagaaatacgatacatacgttcgtattgattgggcgtcaagtactcaatcgcagagtgaatccgtttcccgttgtagaaacaagtgatatattcaaaaatgtgctttttcgcctgttcacgcgtctggaatttttccaggtaaatcagttccttcttcaacacgctatgaaaagattcgatacaggcattctcgtagcaattgcccttgcgactcatactgctggtcatcccgtattttctcaaacgcgcctagtattcacgcgacgcatatcggctgccgcgatcggaatgatgcagcacttcaccgcgcggtcgttggaggtggtaggcttgatccagcgcttggatgaccagttccttcgtcatccactcgtccatatggaaaccgacgattttacgcgtacatagatccataatgctcgccaaatatagccagccttcatgttgcggatcacttggtcatcggacttcagttttccacttcctggaaaagcttactgtccgctctgcttgtaccctgccacccagcggtacaaggtattgtcgttgattcccagttcccggcgacctgtgccaccggcttgccttcttccagaatcattcgaatggtttgtaatttgaattccttgtcgtacgatttacccattttagacacctcgaatccatttgattttattttcacactctcgattctccgtgttcactttttagtctagcaccacgggtacgtttcactttttccttcaaacatgattttactcaaatgcaccgattttaaggaatacgtggaaaaaagcacttgcatttcccgaatttccccattattataataataggatcataccacagcaatgatctcagggttactatgataagggctttctgcctaaggcagactgacccgcggcgttggggatcgcctgtcgcccgcttttagcgggcattccccatccttgcgcaaactcagaccttggcggaaaacgctaaggtcttttttactacatagctatcgggaggggattgacatgagatacaaaattggccttgatatcggcattacctctgtgggttgggcagtcattaatctggatattcctcgcatcgaagatttgggcgtccgcatttttgatagtgcagaaaatccaaagacaggagaatcactagctcttccacgccgcctcgctcgctcagcccggcgtcggctgcgccgccgcaagcatcgtcttgaacgcattcgccgtctgctcatccgtgaaggagtcttaacgaaagaagaactggacaagctattcgaggagaaacacgaaatcgacgtctggcaactgcgcgttgaagcattggatcgaaaactaaataacgatgaattagtccgtgtcctccttcatctagccaagcggcgcggcttcaaatccaaccgccaaagcgagcgcagcaacaaagaaaacagcacgatgctcaaacatatcgaagaaaaccgggccattctctcaggctatcggaccgtcggcgaaatgattgtgaaagatccaaagtttgcgctccataaacgcaataaaggcgaaaattacacaaacacgatcgcccgcgatgacttagaacgcgagattcgactcattttctccaaacagcgcgagtttggaaacatgagttgtacagaagagtttgaaaatgaatatatcgccatttgggcttcgcaacgtcctgtcgcttccaaagatgatattgagaaaaaggtgggcttttgtacctttgaaccgaaagaaaaacgggcacccaaggcaacatacacattccaatcgttcatcgcatgggagcacatcaataaattgcggctcgtctccccatcaggcacacgggggctcactgataaggagcgccgccttttgtatgaacaggcgttccaaaaaaacaaaattacctatcatgatatacggacattgctccatttgcctgatgatacctactttaaaggcattgtgtacgattggggcgaatcgctaaagcaaaacgaaaacatccgattcctcgaactcgacgcctatcatcagattcggaaagccatcgataaagtgtatggaaaaggaaagtcaagttcgtttcttcccatcgatttcgatacattcggttatgccttgacgttgtttaaagatgatgccgatattcgcagctacttgcgaaacgaatatgaacaaaacgggaaacggatagcaaatttggcgaacaaggtatatgacaacgaactgattgaagaactgttgaacttgtcatttacaaaattcggccatttgtcgctaaaggcgctccgcaacattctcccgtatatggaacaaggtgaggtctactcttctgcttgcgagaaggctggatatacatttacagggccaaagaaaaaacaaaaaacggtgctgcttccgactattccgccgatcgtcaatccggttgtcatgcgcgcattgacacaggcgcgaaaagtggtgaatgccattatcaaaaagtatggttcgccggtatccattcatatcgagctagctcgcgatttatcacaaacgtttgacgaacggcgcaaaacaaaaagagaacaagatgaaaaccggaagagaaacgaaaccgccatccgccagctcatggaatacgggctgacgctaaatccaaccggtcttgacattgtcaaattcaaactgtggagcgaacaaaacgggagatgcgcctactcgcttcaaccgatcgaaatcgagcggttgcttgaaccgggttatgtagaagtggatcacgtaatcccgtacagccgcagtttggacgacagttatacaaataaagtgttggtattgacaaaagaaaaccgcgaaaaaggcaaccgcattcctgccgagtatttaggtgtcggaactgaacgctggcagcagtttgaaacgtttgtgttaacaaacaagcagttttccaaaaagaaacgggatcgactgctccggcttcattacgatgaaaatgaagaaatggaatttaaaagccgaaatttaaatgacactcggtatatttcacgctttttcgccaactttattcgtgaacatctgaagttcgccgaaagtgacgacaagcaaaaagtatatacggtcaacggccgtgttacctcccatttgcgcagccgctgggatttcaacaaaaaccgtgaagaatccgatttgcatcatgcagtagatgccgccatcgtcgcctgcacaacgccaagcgatatcgccaaagtcaccgccttttaccaacggcgcgagcaaaacaaagaactggccaaaaagaccgaaccgcagtttccgcaaccttggccgcacttcgccgatgaactgcgggcgcgtttatcaaaacatccgaaagagagtataaaagctctcaatcttggaaattatgatgatcagaaactcgaatcgttgcagccggtttttgtatcccgcatgccgaagcggagcgtcacaggggcggctcatcaagagacattgcgacgttatattggcatcgatgaacggagcgggaaaatccaaactgttgtcaaaacgaaactgtccgaaatcaagctggatgcaagcggacattttcctatgtacggcaaagaaagtgacccaaggacatacgaagcgatccgccagcggttgcttgagcataacaatgatccgaaaaaagcattccaggaacctctgtacaaaccgaaaaagaacggggaaccagggcctatcattcggacagtgaaaatcatcgacacaaaaaaccaagtcatcccgctcaatgacggcaaaaccgtcgcctacaacagcaacatcgttcgaattgacgtatttgaaaaagatgggaaatactattgtgttcccgtctatacaatggacatcatgaaaggtgttttgccaaacaaagccatcgagccgaacaaaccgtactctgagtggaaggaaatgacggaagactatacgttccgattcagcttgtacccgaatgatctcattcgcattgagcttcctcgggaaaaaacagtgaaaacagccgcaggcgaagagatcaacattaaagatatgtttgtctactacaaaacgattgactcagccaacgggggattagagttgatcagccatgacaacagtttctcgctccgtggcgtcggttcaagaaccctcaaacgattcgagaaatatcaagtagatgtgctcggcaacatctacaaagtgagaggggaaaagagagttgggttggcgtcatctgctcattcgaaaaccggggaaactatccgtccgttacaatcaactcgtgattgaacaggaagaaaaagtttctatcccgttggaggatatttgttccattatcatcgaggagcaagctgtcagcgttacagcagtcgctttaagcaaaatggccgaacataacattgcattattcacctgtgaccaaaaacggctccccaatggggttctgcagccgttccaaaaacattctcgtcaagtgggcgtgctgcacatgcagtacgcctactccaagccttttaaaaagcgaatttggcagcgggtcgtgatccaaaaactcatcaatcaaggaaagtgtttggagttcctgaacaaagaaggagccgacgagctataccgcatcagcaaaaccgtcgactctggagacagcaataaccgtgaagcgtatggagccaaaaagtacttccagtatttatttggcagtgaatttacccgacgaagcgactcagtggtgaacgcttctttaaattacggatacgccattatgcggggactcgtcgcccgctctctcgttgggtatggttttttcccatgcttaggaatttaccatgataacgagttgaacaaatttaatctcgccgacgactttatggaagtattgcgtccgctcgttgacctatacgtggcccaacacattcaaccggacgatgaattttctccgtccattcgggcagacttatataatttagccaacatggacatactagtgaatggagaaaaactgaccgtcgtgaacgcggtggaagaaatgacaaaaagcttcgtcactgcaagccgaagccaagacccttcgttgttgaaattgccggaacttctcccgttacaactgcacgtgtatgagtaagtttatgcggttgctcgtctttttcgatcttcccgtcgtgaccaaccgggagaagcgcgaataccggcgatttcgcacattcctgctaaacgaagggtacgatatgttgcagttttcggtctacagccgcgtctgccacggacatgaagcaacggacaaacacttggcaagattaaaacgcaacttacctcctcgaggatcgattcgggcgatggtcgtaacggaaaagcagtacgcaaaaatgcagctgcttcttggggaaccgacagcacaagaaaagaaaatcacatccacccaacttacacttttttaaaaaaacggaaatggtccccttttttgcataagcatatttgcattttttgaaagcaaaaaagcctgcgatccttgagatagcaggcttttttggatacgtattataccacagcgataatctcaggggaactatgaccatttcgtgttgtcaatcgccagtttgttgattataccacagcgataatctcaggggaactatgacgttgcaatcgttccgcttgcttctgctgttattataccacagcgataatctcaggggaactatgaccttcggtttgacccggaatacgaaaaaatattataccacagcgataatctcaggggaactatgacttaaaaaccttgtcacgatcctcagctgattataccacagcgataatctcaggggaactatgacttgcttgttggtctgctttaatacggtttaattataccacagcgataatctcaggggaactatgacagcatcttaacattaacatccttgcctttgattataccacagcgataatctcaggggaactatgactatgcgtcagtttggtaacatcccagatcgattataccacagcgataatctcaggggaactatgacacaacgtttgaaactcgtttacgtcgaggaattataccacagcgataatctcaggggaactatgacaaacgcataaaaccattgtcgtcgatcccccgggatttttgcacgattgggggtcgacgacaatgtgaggctcgacggcgaagagtctgctctgcttaccccttcacccgttcgatcttctcaaccggcagcccggtcagttcgtggatcgtgtcgacatcataccctttcgccagcattctcttcaccacgtcgagcttcccttcctcaatcccttgttggcgcccttgtttaataccttgtttgatcccttgtttgaccccttgttcgattcccttctcgattcccttttccattccccgctgttcgtacgagacgatgagctccatcacttgcttcgcctccttcgtctccatttggctcacctcgtttcgcagtttgacttcctcctcttcggacaaccgcaaatacgtttcaaaaaaaccgaacaacagccgctgtttcgcctcatcgagctcaaggcggacgagcatgcgcaaaaattcttttttcacttcgaccttttcttcttcattataccccattttgcttaacaaggcagcggcgacgggattgtcatggcggatgtacgcgcgccacggcagtttgcgcagctccaccgtcaagtaacgaaaatcgagaacggtcaagaacggaaactggacgaccaatgaggaaggttcatcgtggtgttcatcatagctgaagatggcgatcggaacaatacggcggcggtatttttgaaacaagcggctgaagtagaggaacattcgctcggggaaggtccgctgtgcgtagctttggtgttcgacatgaacaatgacgagcccatcttcccctttcatcttcgtttccaccaacaaatcgacgcggtgcttctctccggccgtcacgtcggtaaacagttcttctgtgaggaaagaaaggcggtgaacgtcgatgtgctcgtacacgttgggaaagaaaagaagcaaaaactcttcgaaaaacgtcgacagcagctctttgaacaaccggtcgtgatcgattcgcggtttggccacgtttcccctccttgcgacatggaattcacgatatgtattcgctctacgcgacgcaattccttctcatgaatgtaactttttaggaaggaggcccgatcgctttgggctccttcccttgtccttcctctagctcgtgaatggactacccgttgatatcccctgtcaacctcccaatgatcgcctcttgatacccggcttttttctttcgcccgatggcttctttcaccggccgcaatggttccgatgtgacggatgcgagtttggcgaggcgctcgggtgtgagttcaacgactgggttggcggccgcataatcgtccaaggaaaagcgccagagcgtgacggcctgtccataccgttcaagcagccgctctgccatggccaatccttccggatcgaagtcgccggaataatacagcttggcgccagaggccgcgagcaaatcgagcagcttcatcgtcgccaaattcatttgcccgttcgtgctgacaagcggggcgcgggtgtcaagcaacgtcgaaaaaacaccggcgttttccacaatgtacaccgtcttgccgcgggcgggatgggcgccaacaagcgacaaaacgtccctaagcggcatgttcagcgccgtgttcgtctccgaggcggcggagaagacgggatgcgggccgccctcggtttcagcaaggatgttggcgcatgtgacaaagttcaaaatatcttcgcggagcaggccgacggactgcaacagttcattgacactctctacggacgccacatcccactggcctggtgtcgtcgcttgcaaggcggacaacaacaatctcccaggaagagtggacaaatcgaacgcgtgcgggtcgctggccacttgctgggcaaagagcgggaggcgcatatatgaagagagcgggaggcagcagagggcggcgccgacaaggcggacggcggcctcaaggccgccgcggtcggcttcgtacgccgtttggacgaagcgttggccgcggacggccgcgaaccaatgatgttcctctgcaaggcgtgcgaaaaaacgctcccgctcttccgcctctgcctggcgccgttctttgttcgacataagcgggacgccgaaataatgttcgagcagttcgacgagtccaacacccgcaaaccttgtctgtccgagctgtttttcaaagtcggagagaaagacgcgggagacgtctttgccgaaaaaggcggcgatcgactcccgctcttccttggagaacgactgcaacgaaaccgcgccgccgacgcggccgagcgactcgtacttgcgtttcatttcgacaaacagccgcttaaagccctgttcggagcggaaaaaggcggccgcttctttgacggtgctcacgttttgatcatctcccattctttgtcatcaaccatgagctgtttgacacgcccgttccaacggtaatgaataacggtgacaaacgatgcattgcgcgggcggacgagttcgcaaatggacaaagcgggcacggtgtcgtagtcgccccaaagcgcctgcgagttcatgatatagttaaagccaagctgttcgacaaggccgaacagattgcggatgttgttttcgtcaacgccggcgaacgcctcgtcgagcgagatgatgtacggggcgtcatcgcccgcttcttggtagcgcgaatacgccgcggcgaaaaggggaatgtacatcgccatcgccttttccccgccgctgaattggtaaaaacggtggttcgtcagctcgcgtttcggctcatttgttttttcatagtacaaggtgaaggcaaaccatttccgatagtcgagcacttctttaataatttgatggagtgtgttgccttggccgcgctcctcaagcaattcgcgggcgcgggcgattttcgagcggaaatggttcgtcacccgctgcaaatcttcctctttcaacagccgcgaatcgatccgcaacagacggaccaactctttcgtatccagctccgcttccgtctccgccgttttcggcttccattgaatggacagcacgagccctgatgacgtgtcaagacctcccatcagtttgttcatatcgctcacccaccgctcggcgcgctggatgcggctgcgcaaaatgcggccgactgattttaaaatgacgtcctcatacagctcgcggtcttgctccttcatatactcgtgctgcaaggcgatgtcgcgctccacctcggcgagcacggcaaacggcgtggcacgctggcctttgtagtcgagataaatgacgtgccgttcttgtttttcccgccaatcggccgctttcatcgccatctcgtcgtctggggcggcggcgatccattcggactccttttgttccgccagccgctcgaacgtcgcccggtattcggtcaagttggacgactcttggaagaagacggtgttcagccgcgccaaaagcgaggaacgcgtctcttttaacactgcttcataccgttgtttcgcttctctggcctgctccaaaagcgaacgtgaacgatcaagatccacgagcccaagcgccgcttcatcggcaaacgaccgctcccacatggcggccagctggcaggcgaactcttcccgctgcgctcctttttcccgctcttcgactaagcgcatgaggcgctgttccgtgcgcgcccgttcgttgacaaggcgcggaatttcttggcgcaaaaacgccaatcgttcttggatgcgggcgatttccgcgcgaatgtcatccgctcccatttgggcgagcgtccgttccatctcaacgatctccaaggagatccgctctttttcatcccgaatccgatttcgttcgcctttcgcttcgtcgatctccgtttccagcgccgcgagccgctcgcgctgttgggcgatcatggcctcggtatggcgcgtttcgcggtaaagcacttcgagttcgtgcaaatggcggacgtacgatttcatggcgagctgggcttgttcgcagccgtccaaggtaaaagccaaatcaagctcggccgactcgtcatggagctgttgtttgatttgtttccattcgcgcgcgaggagggcggctttttcttcttgccgcttccattcccgttctttgctttcggcttggcggcgggcttcttgcccttcctcaaacgcggtgcgcacatcgcggtccgatgggaaggacacaaaccagtcggcaagcgcttggatggccgctcccaccgcctgatgctcacgacgtagacggtcgatctcttgtcccacagcggcgatctcggcttccagcgccgcgatgttctcaagccgccaccgctcccgcgccgcacggccgatgaacatcgcccgcgctctccgcggcgcatggccacggacaaggccgagcgaatagcgtcctgtttcgtcgatcgtcatgccgcctttttgttccgcatcggtgatcacgatgcttcggagcacttcctcaacccgctccgccgacacaggggcatccgcatctgggcgcaaataatcggccaacgtatgcaccatatgaaccggtttcgggatgagcacacggtcgcagtcgacgtcgacatcgcgggccgcaatgagggcgtcaagcaacccagcgtgcgaaagcgccgattcgatccgctcgcgcacatcgtcaggcacatcgtcgacaaattcgaccgcggcataaaacgggacaaacggaatcccttcccgttccaatgccaagcgggcggctgtcgtttgttcatcccgttcgggttcagggtcgcgttgttcccgccattgacgcagttcggcctcacgttctgcccgtttctcttccaacagacggatgtcatgttcgagccgccatttctcatcctttttcttaccgacggcatcgtaatacgcttgaacgaacgggcgcttcagatcatcgagcgaatacagctcatagagggcgcccatttgtcgcaaaaacgcctgaatgtccgcttcggaaacgtcgattcctccttgctcgacccaggcaagcacggcttgttcaaaccgctctttctcctgctcgagcagctcttcccatttctgttgctgatgacgccattcgtccatttcccgccgccgctcgcccgcttcggtgctcgcttcttcatagcgtcgtttcacatcgtcatgcctgcgccaaaggcgcgccaactcctcgagctgctcgatatggcggtcagcttcctgtttccaagcggcaaacgaaaactcttgttgcttttggcgatggcggtgaaaatcgtcttcgttcgtttcatgcaaagaaaaggctccttcttccgcatccgctcgcagctgcgccaactcgtcttcaagtttccgttcaaggtcatccagccgcgcttccgattcatcgaggcggcggcgatgttggcgttccagccgttctttttccgcgatcgtctgctcgtgccgctcccaccgctcctgcagacgctccctctccgatttcaactgttcatacttctccgcttgctggaacacttcgtggccagccaagtcgatttcacgtgaacgcagcacgtcttcttcacggcggaggcgggtgatggactcatcaagctcatcaagcgtctttcgcgcctgctcttcttcatcgtgaaggcggtgttgtgcagcagcgagctgttcagcttgcttgaccgcttttacgtattctgtcgccttttcggcgatcatatattcgttgtaaaggcggtattgatcgcaaagacgcttcaacgcccgctcgtcgcgttcgagctgctcaagctgctgcttcgcctggtccatgttttcgatcgtgtccgataaatggcggagctcgtcgtcggtcaacggaggcagcgagctttccaaaatttcataaatcacggtcggcttaaagtctttggacagcttcgggctgcgcagttgaatgagcagctcgatcaattcttgaaacgcctcaagcgattcaaagcgaaacacatgcttattgacgagctccatatagtctttttgcgtctcgacgaccgtcccgcccgcgccgagcgctgtggccagctcccgcttggtcagcgggattttttcacctgttttttcttgtttatacaactgaaggtcatagccgatgcggcggttgtcaaagaggacaaacccccagaaatcgaggcttttttgccgcttcgcgcgcaggccgatgcccgttgtgacgtattggtcggattctttccgtttatattccaaaaacaaatacccggtccgctcatcgcgattgacgacatctttttccccaagcaagtagtcttccatgcgccgcgcccgtgaaccgaacggatcgaggcgatcgggcgtcttcttgccgtctaaaagcaccgggatcaagctttgcatcgtcaccgacttgcccgccccgttgcttccccgcaagagcagcttaccgtcagcgaaatgaaaatactgctcgtcgtaataccaaaaattaatcagccccgcacgatgaagcacccatggattcgccatgttctcctccctctttcgcgtcaaaatcatccggataccgtcccgacatccgcccgaggaggggataaaggacgatcattccggtgtcgtgctccacatcggccatgcgccattcgttgagcgccgcaagcacttcgcggacaagctcggcagccgacatgtcgcggtacgttttcccccacccagccccgtagcggcgccggcaatcggcaagccaggcggaaaattgttcaggcgtcaatcgtatgcggccgtattcatccggcggatattccccaagccgctcgcgcaccaaggcggcaaaatgaaggatgacctccgacgttcctttctgatcaggaaatacggtgtacggcgcctgccgttcgggaagcgtcaacatggcggcgtttttgtacaattcataccgaaacggcgtatgcgcttcgatatcatcccgcagccgatggcggaagttgcgcaagtagtaaaagtcttgctcgtccccttccgtccggtgcaccgccggggataaaaacagctttcgatacaggcgatggcgccgataatcttgcggtgatgctttccactcctcggcgagcaattcgtcgatcgattcatattgcaacaaatctttcggatacgtgcgcataaaataacgagccaacactggcacttcgtacaacgcctcttcctccacatgctgggcgaacgcctcaatctccccatccatccggcggacgagtccgatttgttccgccgttttcaacacgcggatgagcgcgcgccgatgcgaatagttcgtccaatcgaccggtagatcacccgggtacatggcgcggatttcttcacatacgtcagaaagcaaaaacttttcttccactgcttttccttccaaatacgccatcaaacagcaaaacaacgcatagtcaagcggctcttgaaacgactcgatgcccatccacggctccggttcggcgggaattttctcgagcttggcaaaatagcggtgaacgatgagccgatagccaaacttctcctccacatactttttcaacacatgttcgcgctcacggacgagctgatacaaatccggctctttgtcgcgaatgatccaaaattgttcgaacagcgcggcgagcgcctctttcgccttgtcgtcaaacgccgtttccatcctcactcacctcgcgaaagcacatgaatttcgtagttcggcattacgagttctccatcttctgcgcgaaggcaaatcgtcccctctttgttcaccacgttgacaacccacccgttttccgtcttcattgcttgcccctcgcgccccatcgctttggcgatccagccgagcagcgttttccgtacgtatggggtcacctcaggaaggtcggcaagcacgattttcccgtcggtcacaaattgcttcagctcggcttcctcgcgcgctttttcttccaaatagcgaagacgcgcttcttctttctcccgttctttgtcttcaatcgcctgcggctttttcttttccccataatggcggacgcgcggtttcgtcacccactcggctggcggctcgtcccatacgtcgcggtatatgttgtctgtcgccccgaaatcggcgacgagatgtttcgtatggaagcaaccgaacacgaccgctgacaggcagtgcgcctcttcaatcgattcaaggcgggaaaaccaacgggccaaatgcaagta

SEQ ID NO: 1785 - DNA, 23264 bp, synthetic construct
  variation 18027..18124: note = n is a, c, g, or t
  source 1..23264: mol_type = other DNA
  misc_feature 1..23264: note = Synthetic
atatatacgttgtcgcacatcagttcatactcttttctttgcacgcggttcatatattgaagcaaatcttcaatgcttcgttccacatcttccgacaacacacgagccgcaaataaagaaaacaaaacagaaatgactaaaacaacaatcgtccacgtccagtagcctgaaaacgtatttttcccctcagcaaacaacttcacttccgtcgctaacacaaataataaaactgggaaaataccaatgaataacacacttaaccctatttttattttcatcggcacatatacgacattcgttgctcggatcgtttcatgaaacccgtgcattctcccgatttgcatcatctcgcgaataagcggtcgcatcgtgcgtagcgttaaaaaaaactcaatcatcgcatgaagcatcgcgataagcaacgcgccaaacaaagcataaacaacatacatatatggaatgcgcaacacatctatgaaaataagcgaaagcgtcaacgcaatggccggaatagaaagccctaaaaagtgtggaagcgcaatacgtctcactgtaagaagcggaaagcgcttcgcctgaacaagcgcccaataaaactgttgttccgttatattgttgtcataaaaaatacgccgaatcggatcaatatctttttgaaaggcgcgatattcaataaataacatgatgcaaaatgaaaaaaattgaataaataacaacatcattaaatccacttgccgaatatgcagcgccatgaccattagcgtactaccgacaccgacaacggctaaaaccgagccaatcgtatagtttataaacaatttctttaacgtttcttcatatacgtgcacacccgtccctcctccctattcttttttcattataacaagaatgaaaaaaatccgatacgatccttttctttacatatcattcataaaaattctgaaaaattaaacatattttttacaaactatacaaaactattaaactgcattaatattcaccttctataatcaacggtgttgatatacaaacttaggagggaaaagaatgtccgttaagaaagtgcttgcacatacgctgatcgcatcagctgttcttgcttctccactcgtttcaacgacaacatggaacgtggaagcaaaggctgtcgaaaaacaaacaatccaaaaaacaaattggagtgttaacggaacggtgataccaatttccgctacgacgatttctggtggaaattggattatagctgctccagagctcgctaaattattaggagctacgtattcttatgacaagaaggaaaaaacatacaaactagcgaaaaaaggagcagttgttcaagtcaaagccaatgacaaagttgccgtcatcaatgggaaaaaagtaacgatgaacgtcgcacctaaaatggtaaacaacacgttatacgtcccagctgtagcgatcgttcaagcgtttggcggacagttgcaaacaaatgcgagccctattcttctttccacaaacggaaacgtgcaaacaaaaaaagtgaccctttcagttgatggacaagcaactccattcgacgcgatagcgatcggtcaaaaaacactctactctctgtctgatatggcaaaagcatttggtgtagcgatgaatgtcgatgggaaaacaaaaacaatcactttaagtggaaaaggaaaaaaagcttctttccttcttcatcaacaaggctcgtcggtagtcaaagtaaacggtaagttttatgctgacttacgcggtatggtaacaaaattaggcggtgaaatcgagcacggtaatccattatttatcgccacaaatggatttttaaaaggaacaaactttaacccgcaatggctcagcaatgaatacgtcatcgtcacaaacgaaaacgatgagcctgtatcgaaaattgtgcacattccatcgcgtaaagtgatcgcaacgctcgaaagcggagaccttgctttatctccggataagaaaaaaggggcatatgtagacgataatggtcaattgttcatcgtcgacctagcaacaaaaaaagcgattcctgtaggcacagatgacgatgtaaaagtggaacttacatggtcaccagacagttctatcatttacttctttaaaggaaataatagcgatgtaattgcttccatcaatgttcaaacaggtgaagtgacaaaaattgttgacgacaaagtaaaatataaatccgaccttcgtctatcaaatgacggtacaaaactaatgtacacggccgcaaaagaagcaaaggcaaactatacagatgattcaaaaacagaaatcgactcaattgatacaactggtacagagccacaattgtacgttgttgatttaacgacagccgataaaaagccaacagcagtaacaacagatacaaacaataaaacattttctttcttcgctggtgatgcgatcgtttatttaagcgctaatccagacgatgaagacgcgcttcctgtattaaaggcgattgtttccggtcaagagcaaaacatggcgacaactatgaatatcacatatgtcgcaacaaaaggaagtatcgtgttcgtcttagtagaagagaaagatggatcttactcaatctatcgcgccacagcaccacaagcacaatggacgcgcatttttaacacaaaaacgacgataacagcaattgctccttctccattcggtaatgaaattgctgtaacgattccaactgatgaaggagaaaagattgctatcgtcatgaacaataaattaattgatatcacaaaataaattttgtaagaggtgaaaagtaatgaatttaaaatcatttattaaaaagttctctcttgtcgcattgtctactagtttgttattcggttcttctcttgctgtgacagaaaaaacagaagcatctcaacaaacaggtaaaatcgttatcgctggctcgtcagcactgcttccactaacacaacaagcagcaaaagaatttaaaaaagcaaatccaaaagttgcagtttctgtatctgggacagcatctatcgtcggacctcaatcagtttcaaaaggatcatcaacgatcggagcttgtgactgggatgcaacaaaacctgtacctggatttaatgcatttaaagggttaaacgcgtacccaattgcagtcattccgtttgcaacaattgtccataaagacaatcctgtcaaaaacttaactacaaaacaattgcaagacattttcgctggaaaaattaaaaactggaaagaagtcggcggaaaagatgaaccaattatcgttgtcaaccgcgtgcacgggtcgggaacgcgcgtaaactaccaacttggcgcccttaaaggtgctccttttatgacacaaggtgaaaattataaagaagttctttcaaacggaaatatgattgaagctgttcgtacaacgccaaacgcaattggttacacagaccttgcatacattaaaggtgatattaaagcagtagcatataacggtgtcgagccaacagtacaaaacgtcattaacgggaaatatcctgtttggggttacggctatttgttaacaaaaggtcctgcaacaggagcaaataaagcgttcatcgactttgttcaaagcaaaaagttccaagaaggttcgctgaaaaaattaaagtttatcccaattacagcaatgaaaaagaaataagtgacttgcagcctccttcatgagggggctgtcttttatatgataaacgaggaggaaacaacatggcgttacctgccgaacatgttcgcatccaacatgaacaaacgaaaacaaaacaatggcgcacaaagtatatgaaaaataatgcctttcgttacgcttgtttagcaagtgcactttctttaggcgtcgctctcttttcgatcgtcatttttattagccaaacggggtttctcgtgtttaaagatgtatcatggaaagaattctttttttcagctacgtgggagccttttgaagaaaaatacggagcagctgtatttattctcggcacgttgtacttaacttttttaacgttaataatatgtacacctattgccctagcaatcgccattttcatcgctgagattgcaccaacctggttaaaaaacatcatgcgcccgatgctagatttactagtcggcattccttccattgtgtacggatttttagggttaacgattttaattccattcattcgtgaaacgacaggcacgctcgttggtgatggctttctcgctgctgctctcgtattaacgatgatggttttaccgactgtcactcgcattagtgatgatgccatttgtgcggtaccgcaacatttgcgcgaggcgggctacgcgcttgggagcacgaagcttcaagtcattacacgcatcgttcttccagctgcccgaccaggtattttaacagctattattttaggcatgacacgtgcaatcggtgaaacgatggctgttgttatggttatcgggaatactgcacagttcggttgggacttgcttacaccaacatcagtgttaacgagcaacattgttatgcaaattacaaacgttcaatttgactcgacatggaactatgcactatacatgatggcatttttacttttattcatttctctcgtattaattattattattcgtcaacttcgtccaaagggagagtaatccatgaaagattcgttgtttcataatcatcggaaaacaatcgccagtgcgatttatacaaaccgtctgtttcatatttttgttactattattacagtcacgacatttctactcatcatcggattattgtataacattttaggaaaaggtttgccgaaactatcgctcgattttcttgtaaaattacctgatgaattagaagctggcggtgggatcggaccattcttattcaactccttttacgttctcattttatctctcattttgtcgttgccaattggcattggagctggcatttttcttgcagaatacgcaccgaacaaccgatttacggagtttgtgcgcacatctgtcgaaagcttagcatccgttccttctatcgttttcggtttgtttggttacgtattgtttgttgaatatgtcggcatcggcttaacgatcattggagctgccattacactcgcgttgttaaacttacctgtgctagctcgcgtcacagaagaagcgattcaagcagtgccacaagacattcgtgaagcatctctcgcgctgggagcgacaaaatcacagacgatattaaaagttgtactcccggctgcattaaatggtattttaactggaattagcctcgttgcgtgtcgcgcctttggtgaatcagccatcattattttggcaggcggaacatcgacatcaggatttatgtgggatttcaacttgttatcacaaggcggtacacttcctgtccacttatggtatgttcaatcagaagcgctcgtaccagatgcaaaagaaattgctgaaaagtctgcggccattcttgttcttattgttttaatgattagctttactgttcgtttccctctttggattcaaacgctaattacaaaaataaaagcaacccctcgcaaaagttaagcgaggggttctcattttaatgcgccgcatgtccagatgttaacacccaaatcgatcctgcgacaatgacgatcgcaacgaacaccgcatatgccatattaataacgttcgtttttccatcttctccttctgtgacgtgcataaacataaatagttgaagtcccgcttgaatgaccgcgagtgaaccgatgatccacatgacgatcgtatatgatacgttcatttttaatgcgacgaacaccgcgacaaacgttaaaataagcgaaaagaaaaacccaacaacgtggctaacgggatatttgcttttatgttccatttaccccaccatcccttttaaataaacgaacgtaaaaatgaaaatccaaacgacatcaaggaaatgccaatataaactaatgataaacatttttcttgcagtcattggcgtcaaaccgcgttgaaggagttgaataatgagcataatcgcccaaatgattccgaacgtcacgtgcgcaccgtgcgtgccaagcagcacgaaaaagctcgataaaaatgcgctcgtttgcatcgtcgctccttcatgcacgtaatgaataaattcgcgaatttccatgaataaaaagcctgcccctaataaaagggtgataataaaccaaacgagcagttttttcatatcgcgttgtcgcatgaaaaagacagctaacccacacgtgaagctactcgtcaacaacaacaacgtttcaataagcacatcgttcagcttaaatatgtcgcttggtgttgggccaccggcatagcggtgacctaatacaccatagacggcaaacaacgtcgcaaatagcacaatttctgcaccgagaaaaatccaaaaacctaaaatatttaatcggttttgttccgtttgatattcgagtggaagcgaatgattgacgttagccgacatgattttccgtccccccttctacgtttctccacgtacgttctgttcgtttaatctcatcgacgcttacataatagccatcattgtaatcaaacgaacgaatgacaagcccgatgacaatcccaattgccgcaacagctgctgcgatgtgcgcttcaaagacgaggaagaaacctgtaatcccaaacacgaccgccatataaaacggcaaaccggagttgctcggcatatgaatttttttgatgtcgctttctttcaacgtaagcgtttcgccacgttttttcatatgccaaaacgcatctaattgtttcacttctggaacgaccgcaaagttataaaattgtactggcgatgcagtcatccattcaagcgtgcgcgcatcccatggatcgtgggaaacattgcgcttcgcataacggaagctccaataaatgttataacaaaataccgcaaagccgatcgccaaaataatagaaccgatcgcagaaacgagaaacagcggcgcaaaccctgattctgctgaatacgtatacgcgcgacgaaccgctccttttaagccaaggaaaaacatcggcataaacgtgacgttaaatccgatcacaaacaaccagaagtgatatttgccaagcttttcgtttaacataaaaccgaacatttttggccaccaatagtacaatcctgcaaataccgcaaacacaacgcccggaattaatacgtaatggaagtgcgcgactaaaaatagcgtattgtgatattgatagtccgcagccgccattgctaacataacccctgtcactccgccgatgacgaagtttggcacgaaagcgagcgcccataacatggcagttgtaaattgaatgcgtccttttcgcatcgtaaacagccagttaaaaattttcacccctgtcggaacagcgatgagcatcgttgtaatcgagaaaaacgagttcaccgcaggacctgcatccatcgtgtaaaaatggtgcacccatacgatcatacttaaaaacgcaataccaacgatcgaaacgaccatggatgtgtatccaaacaacgtttttcgtgaaaacgtcgcaatcacttctgagaaaataccgaacgccggcaaaataacgatatacacttctgggtggccccacagccagaacaagtttgcccaaagcatatcgcttccgcctgaagaaagcgtaaagaaatgcgttccgtacaaacggtcaaacgtcattaacgctaaggcaactgtaaaaatcgggaacgctgcgacaataatgattgatgtaatgaatgttgtccatgtaaacatcggcattttcatcaacgtcatgcccggtgcacgcatttttaaaatcgtgacgataaagttaatccccgtcattaacgtcccaagacctgcaatttgcagcgcaatggcatagtagttatttccaattcccggactaaactcttttccagcaagcgggaagtacgacgtccatcctgcatctggtgaaccgccgacaacgaacgaaatgttaaataacatcgccccgctaaaaaatagccaaaagctaagtgcgttcaactgaggaaacgccacatcgcgcgccccaatttgtaaaggaacgacaacgttcattaaaccgatcaaaaacggcatcgccataaacaaaatcataatgacgccatgtgttgtaaaaatttcattgtagtgttgcgcatctaaaaagttcatttctgggcgagctgtttgcgccttcattaacagtccatccatcccaccgcggaaaaacatgagtacacctgataaaatgtacataatcccaatttttttatggtcaactgtcgtaagccattcgcgccataaccaaccccattttttaaagtacgttaacccaacgacaatcgcaacgacagtcaatacaatcgcaatttgtgaaccgacaagaagcgggtctcctccaacaaatatttcattccacttaatgcccatgatgttcacctccactatcactctctaaagctttttgttcctcatcgttacaagttgatgagtttttatagttatcttcacgaataaaaattttcccttgatatccatgtccgcgatataattctggatttgtgtacgttttcgagtgcggatcagcatggtttacccattgtaaatgcgtatcgacaaacgtcaatcgtcctaaatgtgtcggcaacaacaattgctcatatttttctttcgttagtttcggtgccgtttgtttcacttcttccacccatttttcaaactcttgtggcgtttgcgctaacacttcaaactgcatatgcgcatacccgcgtccgttaaagtttgtattccgcccttcatacgaacccggacgatctgcaacgacgtacaattccgtctccattttgttcatcgtatatttttgtccagctagcgccggtacccaaaacgactgcatcgtggacgcggaagtcattttaaataacacaaggcgacctgctggaatgttgacgtagtttactgtttcaatattttgttcagggtagctaaaaatccatttccaatcggctgacgtcacatgaatgacgagcggttttttgtcttcataccctttcggcggtttttctaaatcatataacgttctcatcgttgggatcgttagtgcgatgacgatcaaaatcggaataactgtccatacaatttcaagcaccgtacttccgtgctcttcaggcggttcttcccctttccgttcagggcgatcacgatatttccatacgatgtaagcaaacaatgcaaatacaacgacaacaacgagaagcatccaccaaatcgaccagttaatcagttctgtaatgcttcgtgcagctggtccttgcggctgaaacacaaccatctcacagccaccaagaagcggaagcaatcccgctataactaaggcaaacaaacgcttcatctgtcttcacctcaacaaaattgtgattcattgaacaaagaaacaaatacaaaacgaacgaatttaattagctttgtagtattaacactattgaaatgattttaacatgtattgtaaaaataattgtgacgaaaaaaggaaggaagaaaatgcatcgaggaaaaataagcagcaaatggattgacaaaaagaaaaacacttttctcaatctcaaaaaatgagcgagaaaagcgttatcttttatataatacatggaaataaaaaaagaaataggtttttcactcgaaaacttgtcacattttcgttaaaattttttcgaaatttgttcaaaaataaaatctatctaattcatagaatttaatgttgaaatttctaataaaatcctttactatagcattaagatcgtaccacagcaacgatctcagggttactatgataagggctctactttcagggagtagatgacccgtggcgttggggatcgcctaagccctttaggggcactccccatttcactacagactaagacctcggcagaatgctggggtcttttttgttacataaggaggggaaacacgtgagatacaagattggattggacataggtattacttcagtcgggtgggctattattaaccttgataagattagaatcgaagatcttggagtacgtatttttgataaagctgaacaaccacagggagaacctctttctctcccacgacgagtcgcacgatctacacgcaggagattacgccgaagaaaacatcgcttagaacgtatccgtcgtcttttagtgcgtgaaggtgttttaacaaaaaatgaaatgaacaacttgtttaagaaccgtcatttagttgacgtatggcaattgcgtgttgatgctctagaaagaaaattaaataacgatgagcttgctcgtgtactcttacaccttgccaaacgtcgtggatttaggtcaaatcgaaaaagtgaacataatacgaacgaagatagtattatttttaaacagattgagcataatcagtccattttaagtcattatcgaacggtggctgatatgattgtccatgatgaaaaatttaaaaatcataaacgcaataaatctgaagactactcaaacatgattgctcgccatagtttagaacaagaaattcaatgtatctttagtaaacaacgcgaatttcacaatcctgtttgctctgaacaatttgagaaacaatatttgcgcatttggtcatctcaaagacctttcgcttcaaaagatgacatcgagaaaaaagttggtttttgtacgtttgagtcagaagagagaagggctccaaaagccacttacacatttcaatcatttgtagcatgggaacatattaacaagttaagattagtttctttagaaggaataagagcgttaaccgatgaagaaagacgtttgatttacaggcaagcttttttgaaaaataaagtaacatattatgacatccgtaaattacttcagttgcaagatgacataaaatttaaaggtctcgtttatgatgctaatcaaccgttgaaaaagatagagaatgttcgttttctcgagttagacgcttaccataaaatccgaaaatgtgttgaacaagtttatggaaaagaagcatcaacaatgttttcaagtgatgattttgatacttttggttatgctcttacaattttcaaaaatgatgaagatatttactcttatttacaaaatgtgtatgtacgtgctgacggtaaggtaattcataacttaactaataaaatctatgaagaacctctaattgagcaattgcttcaactatctttttcgaaatttggtcatctatcgttgaaagctatgaggaacatactacctcacatggagaacggagaattatattcaaaggcatgtgaactggcaggatataattttaatggtccaagaaaaaaagagaaaacagttctactacctaacatacctgacatcacaaatccagtcgttatgagggctttaactcaagcacgtaaagtcgttaacgcaattattaaaaaatatggatcacctgtatctatccacattgaattagctcgggacctatcacattcgtatgatgaaagacgcaaaatacagaaggctcaagatgacaatcgcaaaaaaaatgaaacagctattaaacaattagtagagtatggtttaacaaaaaacccctctggattggatattgtgaaatttaaactatggagtgagcaaaatggtcaatgtatgtactcattagagcggattgagttagaacgcctacttgaagatggatatgttgaagtcgatcacattttaccttatagccgtagtttagatgatggttatgccaacaaagcactcgtgctaacgagagaaaatcgacaaaaaggtaaccgcacaccggtagagtatctgggattcggcacagatcgttggcagaggttcgaaaattttgttttaacaaataagcaattttcaaaagccaaaaaaagaaacttgcttcgcttacattatcaagaaacagaagaaaaagagttcaaagagcgaaatttaaatgacacaagatacatttcacgcttttttgctaacttcataaaagagcatttaaagtttgccgatggaggtaaagaacaaaaagtatacaccgtcaatgggaaaattactgctcatctccgcagccgttgggatttcaacaaaaatcgtgaacaatctgatttacaccatgcagtagacgcagttatcgttgcttgcgcttcacctgacataatacaaaaagtcactaatttttataaaaatcgagaacaaaacaaagaacttgctaagaagaaagagtctttctttcctcaaccttggccgtccttttcagatgaattgaaggcaaggttatcaaaatttccaaaagaaagtataaaatctttaaaaatcggaaattatgataataacaaactcgaatcgttgaaaccagtttttgtttcacggatgccaaaaagaagtatcacaggatccgctcatcaagaaacgttgagacgttacgtaggtgtagataaaaaaagcggtaaaatccaaacagcagtaaaaacaaagctcacagatattaagttggattctaacggtcacttcccaatgtatggaaaagaaagcgatccaagaacatatgaggcgatccgccagcgccttcttgaacatggcaacgatccaaaaaaagcttttcaacaaccattatataaaccaaagaaaaacggggagcctggtccaatcattcgaactgtgaaaatcgttgatgtcaaaaacttagtcgttcatttagacgatgggaaaacagtcgcttacaatagcaatatcgttcgtactgacgttttcgaaagagatgggaagttttattgtgtaccagtatacacaatggatatcatgagaggggttctaccaaataaggcaatcgaagcaaataagccatattctgaatggagagaaatgaccgaagagtatactttccgatttagtctttatccaaatgatcttatacgagtggagttaccgaaagaaaaaaccattaaagattcgttaggaaaagaactaaaaatcaaagatattttcgtatactttaaaacaattgactctgcaaacggcggattagatttaataagtcatgatcaaagtttttctttacgcggtgtcggttcaaaaaccctcaagcgattcgagaaataccaagtagatgtgttaggaaacgtctacaaagtgaaaggggaaaagagggttgggttggcgtcacatcatgatcagaaaggcaagcaaattgtccattcgttacaatcagttagtgattgagcaagaagatacgatttctattcctttagaagacttatgttccatagtcattgaggaacatgtcgtcaccattactgctgctgcattaagtaaaatggcagagtataatattgctttatttacatgtgatcaaaaacggcttccaaatggactgttaaatacatttcaaaagcattctcgtcaactaagcgtgctgcaaatgcagtacgcttactctaaaccgtttaagaaaaggatatggcaacaaattgtatcacaaaaattaacgaatcaaggaaagtgtttagagtttttaagtaaggatggtgctgatgatctatatcgtataagtaaaacggtcgattccggagatacaaacaatcgtgaagcttatggagccaaaaaatattttcgttacttgtttggagatcgtttcaatcggcgaaatgataacacaattaatattgcattaaactatggatatgccattatgagaggaattgttgctagatcattagtcaattacggattttttccatgtataggaatttatcatgacaatgaattaaataagtttaatttagcagatgatttcatggaagttcttcgcccactcattgatttgcatgtagcccaacatattcaagaggatgacgaattttcatcatccattcgatccgacttatataatttggtgaatgtggatatactaataggcaaggagaagctaacagtcaccaatgcagttgaagaaatggtgaagagcttcgtaacagctagtcgaaacgaaaacccttcatttttaaaattgccggaacttctccctatccaagtacacaactatgagtaaatttatgagattgcttgtgttttttgacctacctgtcgttactaagcaggagaaacggcactacagacaattccgtacatttttattaaacgaagggtatgatatgttacaattctctgtgtatagtcggatctgcaatgggcatgaatctgctgataaacatcttaataggctaaaaagaaacctaccaccaaaaggatcaatacgagcgatgattgtcacggaaaaacaatatgcaaaaatgcaatttcttttgggagaacctactccaagagaaaaaacaattacggcaacacaactttcacttttttaaaaaacagatggaggacaaatcttttttccatcttctcagcctttttaaaatgatcaaaaagcctgtaaccgttgatattacaggctttttgacacacgtatcataccacagcaacaacctcaggggaactatgactatgcaacaaggcacgccttgcgtccgcgcatcataccacagcaacaacctcaggggaactatgaccgaaatcctgttcgtattcggacaaatgagatcataccacagcaacaacctcaggggaactatgacgtttcttcacctcgaagcaccttcgttaaatcataccacagcaacaacctcaggggaactatgactttcagcaaccaactttgtcatttcctgatatcataccacagcaacaacctcaggggaactatgactccaatattgcgtgatcgtgcggaaaaggaatcataccacagcaacaacctcaggggaactatgactgctagcaggggcgaccccccagcgtcaaatcataccacagcaacaacctcaggggaactatgacctttttcttatgtaaatcgtatcattatttatcataccacagcaacaacctcaggggaactatgactcaatattacacgctatcgtttcatttgaaatcataccacagcaacaacctcaggggaactatgacaatatacttaactttaatctcgctttttcatcataccacagcaacaacctcaggggaactatgacagcctaggcggtcattttgctggaacgggaatcataccacagcaacaacctcaggggaactatgaccattataacctcctgctcgtcatacatgtgatcataccacagcaacaacctcaggggaactatgacaggtagttttatctcgtatttgagtagtttatcataccacagcaacaacctcaggggaactatgactaaatccatttctaaatcacttatacgcccatcataccacagcaacaacctcaggggaactatgacgaaaaaccttcgcttacaacgcctgtctgcatcataccacagcaacaacctcagacatcctcatataattgcagcctactactaaattcaactataaccaatgcactttccactaaaacaaaaagtgccccttaaggaacactctttatttcaacaacttccgtacccacttgagcgcatttggaaagtttggatagcgcaacgggatatcgaatttcgttgtttgttttaacacgctcttgtagtgagtgaacgcatcaaagcttgcttttccgtgatatgcaccgatgccactttgtccaacaccaccaaacggtaaatgaggattggcaacatgcataaccgtatcgtttatacatcccccaccgaaatgaacttgctgtaatatttgttgttgtacgtcgcgatcttctgtaaacaaataaagcgcaagcggcttttcgtagtcgttgatcatttgaatggcttcatcaatcgtttcaaacgtgagaatgggcaagatagggccgaaaatttcttcttgcatcacgtcatcatcccatgttatatcatcaagcaatgtcggttcaatccaacgttgctcaatgtcgtatgctccaccgtgtacaactgtaccgtttgctaagaagcgaacgagccgttctgtatgccgcaccgtcactatacgactgtacgtatttttatcactgtacaattgctcaatatactgtttcattcgttcaataagcaacgatttaacagacgcatgcacgaacacatagtcaggtgcaatgcacgtttgcccagcatttaaaaacttcccccatacgatccgcttggcagctaagtcgagatgggcagaagcatcgacgatcgctggacttttcccaccaagttctaatgtgacaggcgtcaaatgttttgcagcagcagccatcaccattttccctaccggcacacttcccgtgaaaaaaatatgatcaaaaggcaagtgaagtagcttttgactaacgtctacacctccctctaccacagcaacatattcctctgaaaacgcctcagaaacaatcgttttcagcaaagacgacgtctctggtgtatattcagatggcttgacaatcgcacaatttcctgcggcgatcgctccgattaacggacttatcgcgagctgaaatggataattccatggcgcaataattaaactgacaccgtatggctctggatatatgtaactttttgaaccaaagtgtgtcaatggcgtcggtacacgttgcggcttcatccaatcgcttagacgtttcattacaaaacgaatctcttcataaacgatgccaatttccgtcgtatacgcttcaaatggggatttatgcagctctttttttaacgtgtccgtaacggcctgttcatacttttttattgtctctttcaaacgtgttaattgctttaagcgaaactcaagagaaagtgtttcgcctgtttgaaaataatgcttttgtttttgaagtagctgctccatatttctcacccttatcacacctatttttcaaatgtttaaaaacttaaacatataaaatgaaaaattcggcctttagttatctaaaggcactcattttctacagcttgaatcaattcttttaataattcaacggccttttcaatagacaacacataatatcgcaatgtccctttttgttctactgacactagtccttgatcgcgcaaaatttttaaatgatgcgaaatcgctggacgggataaacttgaccgttctgtaatttcattgactgtcagcttatcatgttctgcaagcaacaatacaatatcttgacggtgaggatcgcttaacgcttgaaataacggtatgcacgatcgaaacacctcgatcgctttttgtcccattcctctcttcctttcttttgtttaaaagtttaaacatttgataaaaacatcatattctctttttccctgtttgtcaactctcctttgtctcctcaactattccaaaattaccttttagtctcctacttttttccgccacaacatttcttgttttactagctgtaaaatcatgaagcgttacaataatcagcttcaatcactacttatttcctctacttcttgtcacccatttgccagccgttctctactaaaacatcattgagaaaatgtgctcatctataagcagcttgcctaaaaaatgaaaatgttcgctagtcatccgttgtcgattcgtgtaaaatggaaacgaaaaggaggtgaatgacatggtggaacagttgctttacgaaattcttcacgaagtaaaagcaacacgagaaaaagtcgaatcgctagaaaaacgagtggaagcagttgagaaaaaggtggaatccattgaaaaagaagtatcttccttacgcaaacaagttcaagtactagacgaaaaagtgcaagcaatcgatgggaaagtgcaagcactagacgaaaaagtgcaagcgctagacgagaaagtgcaaacactcgacggaaaagttcaagcgctagacgagaaagtgcaaacactcgacggaaaagtccaagcgctagacgagaaagtgcaaacactcgacggaaaagttcaagcgctagacgagaaagtgcaaacactcgacggaaaagtccaagcgctagacnnnnnnnnnnnnnnnnnnnnnnnnnnnnnnnnnnnnnnnnnnnnnnnnnnnnnnnnnnnnnnnnnnnnnnnnnnnnnnnnnnnnnnnnnnnnnnnnnnacgagaaagtacagctacttgacgaacgaacactcgaaacaaaagcgatttgtgaagcgattcgtcacggtcaagaggtgcttgccgcaaaatacgatgcactcgcactcgatgtccacaacatgcaaggaaacatcacccgcttaaccaacatactagaagagaaagtactccctgccctcaccgaccacgaatcgagcatccaagtattaaacaatcgtgtatttaaagtggaaagcaccttgcaaaagcttgttcatctgtaagaaaagcggcattgtccgatggcaatgccgctttttcattatcgtttatttatctcttcaagcaatagtttattcacaagcggtgggtttgcttgtccttttgttgctttcataatttgaccgactaagaagccaattgcacggtcttttccgtttttaaagtcttcaatcgattgtggattcgcatcgagcacttccaatacgattttgcgtagcgttgcttcgtcagaaatttgcacaagaccttgttgtttgacgatttgctctggatcgccacctttttccacgagttctttaaagattttcttcgcaatttttgacgaaatcgtgccgttttgaatgagtttaatcatgcttgctaagctttctggcgttaaagcaatgtcatgcaattctttttgttctgcgtttaaatatgcagatacttcaaccatcagccagttcgatgcaagcttcggatccgctccattcgcaaccgttgcttcgaaaaagtctgccatttcttttgtcaacgttaatactttcgcatcgtactctggcaaaccaagttcctcaatgtaccgttttttccgtgcgtcaggaagctctggaatcgacgcacgcacgcgttctttccattcatcgtcaatataaagcatgactaaatctggttctgggaagtagcgatagtcttctgaaccttctttcgtgcgcattaaaaccgttgttttcgtcgcttcatcgaaacggcgcgtttcttgctggatgacgccgccagacaacaaaattttctcttggcgcttcgcttcgtactcaagtccttggcgaacgaagttaaacgagtttaagtttttcaattccgtttttgtgccaaacttgtctgagccgattggacggagggaaatgttcgcgtcacaacgaagcgaaccttcttccattttacagtcggatacgcctgtatattgaataattgactttaatttttctaaatacgcatacgcttcctctggcgagcgaatgtccggttccgatacgatttcaataagcggtgtgccttggcggttaaagtcaactaacgaataaccgtcccctgtgtgtgttagtttccctgcatcttcttctaaatgaatgcgcgtaatgccgatttttttctttttgccgttcacttcaatttcgatccagccgttttgcccaatcggttgatcgtattgtgaaatttggtacgctttcgggttgtctgggtaaaagtagtttttccgatcaaatttcgtttctgtcgcgatttcgcagtttaatgccattgctgctttcatcgcatattcgaccgcttgtttgtttaacaccggaagaacgcctggataccctaagtcaatgacgctcgtttgtgtatttgggggcgctccgaatgcgtttgggctgcttgagaaaattttcgatttcgttttcagctcgacgtgcacttcaagtccgatgacaatttcaaaattcatcactatttccccccttacaacgttggtttttgtttatgataatctgttgcttgttcgaacgcatgtgccacacgataaattgtgctttcatcaaaatgtttgccgataatttgcagaccgactggcaagccgttgacaaatccgcacggaatcgaaatgcccggaacgccggcaagattgactggaatcgttaaaatatcgtttgcgtacatcgttaacgggtcgctcgttttttcgccaattttaaacgctggcgttggtgttgtcggcccgataatgacgtcatatttttcaaagacgttttcaaagtcttgtttaatgagcgtccgcactttttgagcttttttgtaatatgcatcataatagccggagcttaacgcgaacgttccgagcataatgcggcgtttcacttcgttgccgaacccttcactgcgcgtttgcttgtacatttcgattaagtttttcgcattgtctgtccgatagccgtaacgaacaccgtcaaagcgcgcgagatttgccgatgcttcagaagacgctaataaatagtacgtcgcaagcgcatattttgaatgaggaagcgatacttcttcccacgtcgcacctaagccttctaatacttttagggcatcgagcaccgactggcgcacttcttctgataccccttcgcctaaatattctttcggaacggcaatttttagcccttggatgtcccctgttaaggcagaaacgtagtcaggtacatcgacattggcagaagtagagtccatcgggtctacaccagaaatgacttgtagtaaatacgcgttatcttccacgttgcgcgtaattggaccaatttggtcaagcgaagaggcaaacgcgacaagtccatagcgcgatacgcggccatatgttggttttaaaccgacgacgccacaaaacgcggctggttgacgaatcgaaccacctgtatctgatccgagcgcaaatggcacttctcctgccgctaccgctgcagctgaccccccgcttgagccacccggtacacgttctaaatcccatggattgcgcgtaagttgaaacccagagttttctgttgacgatcccatcgcaaactcgtccatatttaatttaccgatcgttactgcatcagcttgatgtaaacgctcaacgactgttgcatcataaatcggatcgaagttgtataaaattttgctcgcacacgttgtgcgaagtccttttgtcacaatattatctttaatgccaattggcatcccgaaaagtaagccaaattccttttctgttgcaagtttctcatctagctcttttgctttcgcacgcgcttgttcttcgtttaacgttaaaaacgcttgtactttttcgtctacttcatgaatacgtttaaacgattcatctactaaatccgaaacggaaatttcttttttatgtaataaactgtgcaattcagatacacgataatcgaacaatgacatattcttccctccttactctaaaatggctggcacacggaattggccgtcttgatggtctggtgcatttttcaatacgtcttctagcggaagtccagccgtcggtacatcttcacgcatcacatttttcatatttaacacgtgcgacgttggcggaacgttttctgtatctagctcgtttaactgctccgcaaacgtaataatcgcatctaattgcttcgcaaatatcgctgcttcttcttctgtaattgctaaacgtgctaaatgcgccacatgcttgacttgctcgattgaaattcgtgacatatgtttcacctccgatattatcgacctttcacaatactatgatgataccaaactttcgcgcagtgaagcaacatttgccattcattttgctcacgtaaaaaatctctcattgacgaaaaaaaagtgtcagtgtagaatgaaaaaaattttcaaaaaaacaactcgtataatttcggaaatatggtccgaaagtttctaccaaacgaccgtaaatcgtttgactacggggattgctcctcgtatcgagttggagaggaggaacatcaatgaaacaacttactgtagcttcaaaaaaacaattcgccgatgttgtcgtcaaaaatggaaaaattgtcaacgtctttacacacgaaatcgtgcaagcggatattgcgattgccgatgggaaaattgtcggtatcggtgcatatgatgggcacaccgtcattgacgccaaagggaaatacgtttgccctgggctaattgacggacacgtccacattgaatcatcaatggttacaccgagcgaatttgctcgcgtcgtcgttccacacggcgtcacaaccgtcattaccgatccacacgaaattgcgaacgtcgcgggaacaaaaggcattgaatttatgctaaacgattcgaacgacattccacttgatgtatatgtaatgctaccgtcgtgcgtacccgcaaccgattttgaacacgctggtgcgacgcttcatgccgaacagttagcaccgtttttttcccatccgcgcgtacttgggcttgcggaagtaatggactatccgtcgcttttgcaaggaaaacaacatatgctcgctaaactgaccgctgcgatggaagcaaataaactgatcgatggccatttagctggtcttgatgaaacagccgttaacgtgtaccgaagcgccaatgttcataccgatcacgagtgtgtcacagtagacgaagcgctcgctcgcgtgcgacgtggcatgtacgttttaattcgtgaaggatccgtcgcaaaagatttgcacaaactacttccagcagttaatacgtataacgcgcgccgctttttattttgtacagacgataaacatattgacgaacttgtcactgaagggagcatcgatcatcatattcgcctagcgattcaagctggtatggagccgataacagccattcaaatggcgacattaaacgccgcagaatgttatcgcctatatacgaaaggcgcgatcgctcctgggtatgatgccgactttttgcttgtggatgatttacagtcgttttcgattacgcatgtctttaaaaaagggacgctcgttgctgaaaacggacgcgctaccttttccgtagcaaaaacaacttcgattgacaaaacaattatacagtccgtccatgcaaaaaaaataacaaaagaagatatacaaattccatttacgcgtggaaatcgtgcaaatgtcattcaaattattccaaatcatttgcatacaaaacatctcatcacagaagtgcatgttgaaaacggcgcctttcagccgtcgctcgagcaagatttactaaaacttgttgttgtcgaacgccaccgtggtcttggagccggtgttggtatcgtcaacggattccaattaaaaaaaggggcaatcgcctcatccattgc

SEQ ID NO: 1786 - DNA, 23249 bp, synthetic construct
  source 1..23249: mol_type = other DNA
  misc_feature 1..23249: note = Synthetic
gactttttcagcggcttctaaactgctcaaactgttcatcggttttaggcgtttccgaatctccttgatcgttcgttcgatggcattggtcgtataaatcacacttcgaatactgcttggatagtccataaaggtgagaaggacatccaactcattggcccaagattggacttcccttgggtatttgtgagaccatttggattgaaactgttgaaacatctccaatgcgatttctttattcggagaacgataaatgagtttcaggtcctccgccatttcgaattgatcttttttccgaacacggctgagggtgttgcggactttgtgcacgacacagcgctgcacatcggctttcggatacaccgccttaaaggcttcctccaaccccggaaggccatcgaagacgccaagaagcacttccttgacgcctcttttgtagagctgttggagaatctcctgccatacataggcgctttcttgtcctcctacgaagaaatcaagaatttcacgatacccttcttcgttcacccccaataccacataaataacttctttctctaccgtatcccggcgaagtttcacgtacaagccgtccaaatataagaccgaataacgctggtgtagtggacgagcgtgccatttctcgatgtcttccttcacgacatcggtaatccggctgatcgtcgcaggagaataggtgcttcctagaattcgttcgataaacttgccaatttcacgcgtgctcatgccactttggtacatcctaatgattgcttcctccagccagcccgtgtgccgttggtaaggggcaaacaactgtgtttgaaattccccgtttcggtctcttggaaccaaaagaccctcaatccggccatattgtgtatctagatttcgctgatagtagccgtttctcatattcggcgttccagcctgttcgatttcgaggaaatttttgatttcttcccgcataatcagttctaatttttcttttacaaactgacgaatggcattttccagttgatttgcccagtcgacattcggtatacttcttttagacataggtagggtactcctttctctggaatgtgttgtggtccaaatcagagaataccctaccttttttcttttgttctagcaaaatgctttacacaaaattttatacatcatctcctttgatactcagagaaatattttttggctataagggtatgatattccctccttctctacttgataggataatcttgttatagaatgtaagctcgtttttgtgaataagacacctcctgattcatctccccttgtcttcgcttcaaagagaaactctttgaaacaacgtcaaactacctaccaagtctaccacacactccttttcagatcagcaatataaccggacgccgaccgaggatttgagcatctcaccacattggatggaatctcagctgccttcatctgcttcccattctccttctcacctcgttgctgtatgtaccagaagggaatcgaagccgtcatcctacacatcctaagtgctgtagtggttcctccgcgctattcagagtcttttcgtcgatcctgcagtaaagatgcgtgatcaccaccgtcaagtcgattgtattcgcaggggggcttttcaaataaaaaaccgccccttcccagctgatacagccgaaaagaggcgttattttcttatgattgattgttttgtttggttttgagcgtcaccgaaacggttgtctcgaatccatcgcgataaatggtcagtttgatgcgttcatctaccgatgtttttgtatacaaatatttgcgcaaggcgctgacgctgtcgattttatccccattgattgccacgatgacatctttcgacttcaacccggcctcggccgcaggcgagaacggttcgactgcggtgacagcagcgccttgtgtcacgcttgatggaagtttcagttcgtcgttgcgtacgtcggcagacaaatcagcgacatcgacgagttggacaccaaggtacgggcgcttgactgttccatctttcatgagctgctcgacgatcggttgggcgttttcgctcgggatggcaaagccgagtccttcaacacccgtttgggcaattttcatgctgttgatgccaatgacttgcccggcgctgttaatgagcgcaccgccgctgttgcccggattgatcgccgcgtcggtttggatgacatcgatttcccaattacccactgaggtggatacgggcatcgtccgtttgccgctgacgatcccttccgtcaccgtccgcgacaagtcaaggccaagcggattgccgattgccgcgactggttcgccgattggtacatttgacgagtcgccgaaactcgctactttcgttacgccattggccggaattttcaagacggccaaatcggttaacgcatcggcgccaacgatgtccgctttcactttttttccgttcgcaagtgccacttcgacttcgttcgctccttcaatgacatggttgttcgtcacaatgtatgccgtattgccatcttttttgaaaatcacgcccgaacctgttcccgcttctgtattttgcacttggttagagaaaaaatccgcttgcttctggatgttgatgaccccaacgacagcatcagccacttcgttgatcgccgcgatcatattcgtgtttgtgctcgcagtcggctgcaacggcaatgtttcactttttttcccattcgtttgggtcaattgggtttgggcgacgtttccttgattcagccatttgggcgccacataccatgtcgccacgctgccgatcaccgctcccgcgacagaagccgccagccatgacacgaaacgaccgcgtcgtttcggttgtgggggtggtgttggttcgaatgtcatcatgtccatagctcttctcctccttgatgatgaatcgtcatcgataaccaagcattagacagattggctcgcattctggcgaaacagcgaaaaggcggatgaaacaccatcctatcgccgacatctatcggtcgcacgcatagcgaagaccacccagtccgacacttagctgtcggcgtcatactagagctcaatcgcatcttctgttcctcccatttcctcttcccccatcatcatagtcaagaaaagtgaaaaaatagtgaaagaaaccatctcttcggagtgactcctcccttcccttctgattttcacctttttttcacgcatctttgttatgataaaagaaatgatgggaaacgggaggaacggccatgaaagtattgctcgccgaagatgatctccacttaggggaactaatcgtccatttgttaaagaaaaaagggattgaccatatcgactgggtacaagaaggagaagacgcgtacgactacgcgatggcggagttttacgatgtcgtcgtgctcgattggatgctcccaaacggcgatggagtcgatatttgccgacgattgaggcaaaatggttatacgggcgccattttgatactgacggcaaaagacgcagtgcaagaccgcgtcaccgggcttgaagctggggcggatgattatttggttaagccgtttgaaattgatgaacttgttgcccgcttaaaagcgctcgctcggcgcacgttcgtcccgcttcaagaggaaacagtaacttttcacggcttcaccttgaatcgaacaagccatacgctgcatcgcaataatgaggaaatttcccttaccccgcgcgagtttcagcttctcgatcttctcgtccaaaaccaaggccaagttgtgccgcgcgagacgatcctagaccgcgtctggggatgggacgctgatgtatccatgaaaacgattgacgcgacgattaaattgcttcgtaaaaagttgaaagacgatgtcatccaaacggtgcggggagtgggatataaaattgataaataactggaacgagtggcgccaatggctgcgccgtttaggtaacgcggacttgttccgccgcactcattggcggctgaccgcgctttatagcggcattttcaccttatttctcgctttgtttgtcgttattgccgccgccttgttttattggatcacgacatccgagcaagagcagcgcatcactcgcctcgccgaacaggaggccaataccattgaacagtttttgttaaaacaaagcaattttgacttgttcgatgaccaaagtctcgtgctgttcagcgaagatcaactctttttttacgtcatcagcccaaccggccgtctgctcgccggggatgaagtccaccggcgcctgcgcccgtattttttaagcgccttgtctcatctggacacgaacgaacagaccccagtctatctgaccgtatcattgcctaaacatatgccgggcctagcccgcgacgctgcgcgtgattggcgagtgctcaccgccgcccacccgctcgtcattcggggagatgtcgtcggcatgctttatatcgggatggacgtgacatcgttttttggagtgtttcattggctgctgatcgtgctcatcggtcttgccattctgtttctcgccgtcggggtggcgcttagtttctttatgtccaagcgagctctcgtgccgattgaagaagcgtacgagcggcagcgccagtttgtcgccgacgcctcgcatgagttgcgcacgccgcttagtgtcgtcttttcatccgttgaggcgctcacactggaagaagatgtgatgaaaaacgaattggcccaccgtctgctcgatcgccttcgtgaagagttgaagcggatcacgaagttgatgaacgacctcttgacgctcgcccgcgcggatgcaaaacatgccgcgttggagctggcgaaacaaacgtttgacttccgcccgcacgctgagcgaacattccagctcatctcggagctggcagcgaaaaaacagatcacaatgaattttcacgccccggagcaggcgatggtgacagccgatccggacaagttgacgcaactgctgtacattttgcttgataacgccatcaaatacaccccagaaggcggaaatgtgacgctgtcgatccgcaccgaaccgaaacaattcgtcctttctgtcaaagacaccggcatcggcattccgccggaagatatgggccggattttcgaccgcttctaccgtgtcgacaaagcgcgctcccgccaacaaggtggccacggtctgggactatcgatcgccaaatggatcgtcgacgcccatggtggtacgatccacgttcaaagccaactcggccaagggacagaatttcttgtcctcctgcccgcttaacccacagctttttttatcacaacgaaaggtgtcccctatagaacgggacacctttcattctctatccacaatcagtttaaaaagatttcgcttttcacctaattttctccttcgcctactacaatgcaaactgtaagctagtccaccaccgaaaaaggaggtgtcgatattgaagaaacttcgagcgctcgctctgctcgcccttattgtgctcgccggggtcagcctatttcatgtgctcacgccacatgaagtgatcgtgtacaggcgcctaagtgttctgtttgacggcatgcacggcggctttgggcatcaccacctgatctttcgtgtagagccgcgcgcaggctggttgattcccggcttgctcatgtggttcatcccactgctgcttgtcggcgttggcgcgatatggcttgtggcgaagcgatcgaagcgctggattggctgggcgcttatcaccttagggatcgccgccctgttgccgaaatgggtgttactcggattggcgctggccgccgtatatgccttcggacgccatcaaacgcgaaaatcagtagccgcggaaacatggaaaccaacaaccgcacccatttccaccgactggctcgatgaatgggaaaaaattgtacaaaaggagggcaaaacaaatgggtgtgttccgccggatcaaaacaatcgttctcgctgaagtgaacgaacaaatcgatcaatgggaagatccgatcgccatgacgaaacaatatttacgcgaactcgaacaacaactcgaacaagggcgccaagcgctcgcccaacaatgggtcaccgaacagcgttatgcaacgctcatcgcgcaagcggaagaaacggtggaaaagcggaatcgtcaagccaagttggcgctcgaacgcaacgaagaagccgtcgccaagttggcattgggcgacaaactgctgtatgagaagaaactagaaacctacaagcaacaatatgaaacgatcaaagcaaaaacagccgaaatcgtccgccgcctcaatcagctgcgcgaacgatatgacgagcttgccgccaaacagctagagctcaccgcacgcgtcaatgctgccaaagcgttaaaacaaatcgacacgacactcgcttcgttttctgccgatgaggcgctgcgcggcttcgcccgcatggaagaacgcgtcatcgcgttagaagccgaagcgtccgctgctcgattcggaacgaacgctgtgttgtcccctgtgccgtttgaggaagaagtggaacgtgaattagcgaaatggaaggaagcccaatcgacgaacgcctaatctccccctcccccccttttcacatagatgacccccttgccccacctggcaagggggattggtttgttccgctctagttgatttcccgccatggatgagcaaaatcatttcctctatttttccattgtagtagaatgattagagaaacgaaataattcaggagatgacttcccatggactggaagcgaagcgtccgcattttatggctgtgcaattttatggtttcggctggaatgaccatggtcattccctttttatcgctcttcctatggcaaatgggtgtcactgaacatcatgccttaagcatgtggacagggctcgtcttttccgccacctttttatcggctgcgattatggcaccgatttggggcatgtttgccgataaatacggccagcgcgccaatttgattcgcgctggaatcggcatgggcctcctcaccgcctgcatggcgtttgccgcatcgccgatggcactgcttgtgctccgatttcttgttggctttttctcgggattcatcaccgtctcgttttcctatttggcccgcatcgttccaaaagaccatagcggcgaggcactcggaacactgcaaaccggaagtatcgccggcaacattatcggaccgctcatcggcggcgctttatccgacctatttggcttccgtccagtgtttttggtgaccgggctttgcattttgcttacgctcttgcctgtaatgttttggctcgaaaaagatccggtcgtgccgcagacgaaaaagaacaaagcgagcttcaaggaagtgttcgaacatcggccgctcatcatcttgtttatcgctacgtttcttgtgcaaatcgctgttcttggcgtcaattcgatgatgaccatttttgtccaatcgttagtcggcaacacaagcaatctcgcatttctgtccggcctcgcctcatccatcaccggcattgcgacgatcatcggcgcgccgtacttaggaaaactcggcgaccggatcgggcaggagaaaacattaccgatactgcttgtgctgtccggtttgttcgccttgccgcaagtatggacagacaatatttacgccctgtacgtgtggcgcttcttgcaagggctggtagtcggcggcgtatggccagccattcaggcactcatcaatgtgcaaagcccacgccgcattcaagggcgggtgttcggcgtcaccgccagcagccgctttcttggcaacttgaccggtcctaccgctgcaggtgccatcgccagcctattttccatcgcctacatttttgccttctccagcctcttgctcattgtcaccggcgccttagtcggctatgcccatcgtcgttcatcaagcgtgtggcgcaaagagatgaaagaaaaactcaccacttggacacatcgccttcatagtcggcactaagcgtcttgtcggaatcgaacgcaaagaaggtgtccgtaaagaaatgagatgatccccttatagtagacagaaaaagaaagcccgcggatctgtttactatggaggggatttttctatgaaaaaataaaaaaacccatgagcaaggtttgctccttacctaggcatggaaatgaggaactaaggggcacacactttcacagaaaagttccatgagcaatttttgctctccacccgggcatgaaaatcccccttttcttcccataatgaagagtaggcgcaaacagctcaataggacgttatacttaatggtggcttggaccctgtacagaaaagcgttcgaatccactgggtgcaccacccattgtccgccctttcccgatgcggaggaaaggtgacgacgaacggaaaactgccgcatttctcccgtggattcgctgtttgcgcactcgatcatcgaaaaggaggattttcatcatggatgtcatctatcctcgctgcgcaggattggatgttcatgccgaaaccatcgtcgcctgcgcgctatgggaagaagatggacacattcaaaaggacattcaaaccttctccacgttctcgaagggacttggcgacctgcttgagtggctcgaagaacatggcgttacccatgtcgccatggaatccaccggcgtgtattggaaaccggtcttcgccttcctcgagggctatgtcgacttgacactggccaatccgcagcggatcaaaaatgtcccgggaagaaaaaccgatgtctctgacgccgagtggatcgccaagctgctccgccatggactcgttgaaaaaagtttcgtccccccagcggatattcgcgaattgcgggattttacccgcctccgcaaaaagtgggtcggacagctgacttcggagaaaaaccggattcaaaaagtgctcgagtcttccaatgtcaaactcggctcggtcctctccgatctcttcggcgtttccggaaaagacatcctcgcccggctgcttgagaagggatacgtggacaaggacgagttggatcaatgcctgcgcggaaggctcaaaaagaaaaagcaagcggtgtacgattcgctgctcggcaccttgaccgaacacgagctccgtctccttcgcctcttgtggaaacacgttgaggaattggagcagttaatcgaagaagtcgaccagcacatcgaccgcctgctcgagccgtatcgcgaggaagtcgaattgctgatgaccatgcccggagtgaaaaaacaaaccgccgccgtcatcatagccgagatgggaaccgacatgagcgtctttgaaacgccggaacgggcggcttcatggactggattgtcccccggcaaccatgaaagcgccggaaagcgaaagagcacgcgcacgacaaaaggcaatccccatctccgatcggcgttatgcgaggcggcatggtcagcagctcgatccaagacgcatcccttgtcccgaaagttttggtcgttggcggcccggtgcgggaagaaaaaagccctcatcgccattgctcggcggatgttggtgatcatcttttgcatgatctcccgcaaagagccgttccgccaaccacaacttatttagtctagccaaaaggcagacaggttatacgagatgcctaaaatcgggcacctctgctttcctattgccttttttggccattttcagtatacccgcacggatcaggagcgtataccgcactcaccaagtggtggggattttcacgaaaaaaggacttgattttcccaaatataaacattattatagtaatagggttataccacagcaatgatctcagggttactatgataagggctttctacctataggcagactgacccgtggcgttggggatcgcctatcgcccgctttcttcgggcattccccactcttaggcgaacgaagaccttggcggaaaacgtcaaggtcttttttactataaaactattgtgcatgggaggggaaaacaatatgaagtataaaatcggtcttgatatcggcattacgtctatcggttgggctgtcattaatttggacattcctcgcatcgaagatttaggtgtccgcatttttgacagagcggaaaacccgaaaaccggggagtcactagctcttccacgtcgcctcgcccgctccgcccgacgtcgtctgcggcgtcgcaaacatcgactggagcgcattcgccgcctgttcgtccgcgaaggaattttaacgaaggaagagctgaacaagctgtttgaaaaaaagcacgaaatcgacgtctggcagcttcgtgttgaagcactggatcgaaaactaaataacgatgaattagcccgcatccttcttcatctggctaaacggcgtggatttagatccaaccgcaagagtgagcgcaccaacaaagaaaacagtacgatgctcaaacatattgaagaaaaccaatccattctttcaagttaccgaacggttgcagaaatggttgtcaaggatcagaaattttccctgcacaagcgtaataaagaggataattacaccaacactgttgcccgcgacgatcttgaacgggaaatcaaactgattttcgccaaacagcgcgaatatgggaacatcgtttgcacagaagcatttgaacacgagtatatttccatttgggcatcgcaacgcccttttgcttctaaggatgatatcgagaaaaaagtcggtttctgtacgtttgagcctaaagaaaaacgcgcgccaaaagcaacatacacattccagtccttcaccgtctgggaacatattaacaaacttcgtcttgtctccccgggaggcatccgggcactaaccgatgatgaacgtcgtcttatatacaagcaagcatttcataaaaataaaatcaccttccatgatgttcgaacattgcttaacttgcctgacgacacccgttttaaaggtcttttatatgaccgaaacaccacgctgaaggaaaatgagaaagttcgcttccttgaactcggcgcctatcataaaatacggaaagcgatcgacagcgtctatggcaaaggagcagcaaaatcatttcgtccgattgattttgatacatttggctacgcattaacgatgtttaaagacgacaccgacattcgcagttacttgcgaaacgaatacgaacaaaatggaaaacgaatggaaaatctagcggataaagtctatgatgaagaattgattgaagaacttttaaacttatcgttttctaagtttggtcatctatcccttaaagcgcttcgcaacatccttccatatatggaacaaggcgaagtctactcaaccgcttgtgaacgagcaggatatacatttacagggccaaagaaaaaacagaaaacggtattgctgccgaacattccgccgatcgccaatccggtcgtcatgcgcgcactgacacaggcacgcaaagtggtcaatgccattatcaaaaagtacggctcaccggtctccatccatatcgaactggcccgggaactatcacaatcctttgatgaacgacgtaaaatgcagaaagaacaggaaggaaaccgaaagaaaaacgaaactgccattcgccaacttgttgaatatgggctgacgctcaatccaactgggcttgacattgtgaaattcaaactatggagcgaacaaaacggaaaatgtgcctattcactccaaccgatcgaaatcgagcggttgctcgaaccaggctatacagaagtcgaccatgtgattccatacagccgaagcttggacgatagctataccaataaagttcttgtgttgacaaaggagaaccgtgaaaaaggaaaccgcaccccagctgaatatttaggattaggctcagaacgttggcaacagttcgagacgtttgtcttgacaaataagcagttttcgaaaaagaagcgggatcgactccttcggcttcattacgatgaaaacgaagaaaatgagtttaaaaatcgtaatctaaatgatacccgttatatctcacgcttcttggctaactttattcgcgaacatctcaaattcgccgacagcgatgacaaacaaaaagtatacacggtcaacggccgtattaccgcccatttacgcagccgttggaattttaacaaaaaccgggaagaatcgaatttgcatcatgccgtcgatgctgccatcgtcgcctgcacaacgccgagcgatatcgcccgagtcaccgccttctatcaacggcgcgaacaaaacaaagaactgtccaaaaagacggatccgcagtttccgcagccttggccgcactttgctgatgaactgcaggcgcgtttatcaaaaaatccaaaggagagtataaaagctctcaatcttggaaattatgataacgagaaactcgaatcgttgcagccggtttttgtctcccgaatgccgaagcggagcataacaggagcggctcatcaagaaacattgcggcgttatatcggcatcgacgaacggagcggaaaaatacagacggtcgtcaaaaagaaactatccgagatccaactggataaaacaggtcatttcccaatgtacgggaaagaaagcgatccaaggacatatgaagccattcgccaacggttgcttgaacataacaatgacccaaaaaaggcgtttcaagagcctctgtataaaccgaagaagaacggagaactaggtcctatcatccgaacaatcaaaatcatcgatacgacaaatcaagttattccgctcaacgatggcaaaacagtcgcctacaacagcaacatcgtgcgggtcgacgtctttgagaaagatggcaaatattattgtgtccctatctatacaatagatatgatgaaagggatcttgccaaacaaggcgatcgagccgaacaaaccgtactctgagtggaaggaaatgacggaggactatacattccgattcagtctatacccaaatgatcttatccgtatcgaatttccccgagaaaaaacaataaagactgctgtgggggaagaaatcaaaattaaggatctgttcgcctattatcaaaccatcgactcctccaatggagggttaagtttggttagccatgataacaacttttcgctccgcagcatcggttcaagaaccctcaaacgattcgagaaataccaagtagatgtgctaggcaacatctacaaagtgagaggggaaaagagagttggggtggcgtcatcttctcattcgaaagccggggaaactatccgtccgttataatcaactcgtgattgaacaggaagaaaaaatctcgattccattggaagacatttgttccattgtcatcgaggaacaagccgtaagcgtgactgcagtcgctctaagcaaaatggcagagtataacatcgccttgtttacttgcgaccaaaagcggcttccaaacgggatatggcaaccgttccaaaaacattcgcggcaagtaggcgtattgcatatgcagtacgcctactccaaaccttttaaaaaaagaatttggcagcgaattgtcattcaaaagttgatcaatcaaggaaaatgtctagaattccttaataaacaaggagctgatgaactataccgcatcagcaaaaccgtcgactccggagatagcaataaccgtgaagcatatggggcaaaaaagtatttccaatatttattcggcaatgagtttacacgtcgaagcgattcagtcataaatgcagctttaaactatggatatgccatcatgcgtggactcgtcgcccgttccctcgtcgggtatggatttttcccatgtctagggatttatcacgacaatgaattaaacaaatttaatcttgccgacgattttatggaagtactgcgtccgctcgtagacctatacgttgctcatcatgtccagccagatgatgaattttcttcttcaattcgggcagacttatataatttagtcaatatggatatactattgaatgaagaaaaactgaccgtggtaaacgcagtagaggaaatggcaaaaagtttcgtcactgcaagccgaagccaagatccttcgcttttgaaattgccggaacttcttccgttgcaattgcatgtttatgagtaaatttatgagattgctcgtcttttttgacctacccgttgtgaccaaacgggagaagcgcgaataccggcgatttcgtacattcctactaagcgaaggatatgatatgttgcaattttcggtttacagccgtgtttgccatggacatgaagcaacagacaaacatttggcgagattgaagcagaatctaccacctcaaggatccataagggcaatggtcgtaacggaaaagcaatatgcaaaaatgcaactgcttctcggggaaccaacagtgcaagaaaagaaactcacatccacacaactgacgcttttttaaaaaaacaacaacagttcccctttttcaagcaacaccgtttcgtttttttaaaacaaaaaagcctgcgatccttgagattgcaggcttttttggacatgtattataccacagcgataatctcaggggaactatgacagagttcttgcgctgcaagcgtgacttagaattataccacagcgataatctcaggggaactatgactaactcaggtgacggtgattctttttgttttattataccacagcgataatctcaggggaactatgactgatgtgcatacttttcctccaggtacttgtaagtttctacatagttgattaaagtgattttttacgtaatatatatcttatttcgcccctcataggtacgataaaaacggaatatagcgtttacgctcttccgtttcaaaatagtttcaatccctcataggtacgatacaaaccccaaaaagtgctgttatatcaagctttttcatcccatgttaccttcagaataacacggtcaaaaaattctgtcaatcacactcacccgtgatagctgtaggagccaagtgacaaaaacaaatgtcgtcgaccccctggggtttttgcacgattggaggtcgacgacaatagaggaatcgaattatttacccgttaggcagaacatgccgaacccttgggaatttcggctgcccaggccaacgtggtataaaaacgtcaactgctcgggagaagaggagagacggtaatgccccaaccaccctgtaatatacatatctttgaatagtgtcacaacgcgatggcgttggtggacatgaacgggttgaattgacaatctctccaccggcgggacaccatagtacgcttgatatttatggcgaaaattcagctcaatgagatggggaaatacctcatcatccggcccgaaaaaatgagttttctttcttctatcgatcgtctcatatgtgctgtatacagttagcggagaaagcatagccacctcgattgtgctttgacggatctcaaccttgtccattttcacacttttgacttcaaccggctgatcgtaaagccaaatctcccgccgcagcaacaactgctgcccgagttgctcggtcaactctggaaggatcgtatcgatatgccattggaattcgtccaaaaaccgtatcgttttcttcacccggtccacttcatgtcgtccaaaaaggcggctaaacgtaaacagtttgaaagaccgcttctcatggcggaatccaatctcatgtaaaaacgtcgcgagttgtttactttctagtgatcgatacaatagcccttgcaacaaatgctgataatgaagcggcagcgacacaggaccctgccgcccattcatggtaatggtcagtctcatgagaataccctgctttctataattccttctttctttatttataagcagaggcgtttcgatccctcataggtacgatacaaaccccaaaaagtgctgttatatcaagctttttcatcccttgttgccttcagaataacacggtcgaaaaattctgtcaatcatgctcgctcgtgatagctgtaggaacccagtgacaaacacaaatgtcgtcgaccccctggggtttttgcacgattggaggtcgacgacaaacgaatcttgcttcttagtgtccccacatggatcttctacttttttagtttgcccaccactgccaccgacaatcaggtcagttcactaatcgccttcacgttatatctcttgcgtcagcattcgcttcgcaatatgtatcttttctttcaccattccccactgttcgtacgaggccatccattctattcattatttcgctcacctcatttcgcaattggagctcctcttcttcacacaatcgcaaactatgtctcgaaacatccgaacaacagccgcccgagggccacctcttggccgcctgctgtttggcgctgcttcatcttcttggccatgggctgcaagctttcggcgatgacgaaggcgagcttggcgagcccgctcgggagaccggtaaactgacggggcggcggtaacattggggtcaaccagaatatcttgagttcggagtattcgggaggatctgagagcattcccgagcatttataagcatcaaggaggagagaacactgatcactacaagagcaagcgacagacggacagatcggccgataccaaatttgccagctacccccatattacgttacccttttattatgacgcttttcacccctccgcgtcattttgccgctttttttattctcttctcccctatgatactagcagaaaaaggaggaattatgttgcgaaaatggttcatgtctttgctcgctgtcgggcttgttttaggattggccgcctgcagcggaaaaagtgatgcgaaagggaaaatcgtaattaccggaaagaagtttaccgaacagatgattttgacgcatgtactagctgaatatgtgaaagccaacaccgatttggatgtcgaggtgaaggaaagtttaggcggtgcctttatgttgcagcaagccattgaaaacggggacatcgatatgtatgtcgaatatacagggacagggtatttaaacattttaaaacagccgtacgacccaacgaaaacgcccgaacaaatctacaatgaaacgaagaaattatataaggaaaaatacaacatcgcttggctcaaatcactcggatttaacaatacgtatgcattagcgatgcggagagaccttgctgaaaagctcggagttaaaacgtactccgatttagtgaaccattcatcttccctcacatttgggtcagacgccgagttttttgagcgaagcgacggctatgatgggcttgtcgatacgtacggattccacttcaagaaaacggtcaacatcgatccagacttgcaatacgaagcagcgaaaaatggaaagattgatgtcatcacggcctacacgacggatgcccgtattaagaaatatgacctcgttgtgctcaaagacgataaacagtacttcccaccatactacgccgtaccgatcatccgccaagaagtgttggatgccaacccgggattggaagaaaaactcaatcaactagcgaatattttaactgacgaaaaaatgatggaactcaacggcgaagtgaacttagaagggaaacagccgcgcaaggtggcgattgacttcttgaaatcggaaggactgatcgactagaaagtgaggaatgtggatgattcggtttgaaaacgtaacaaaacagtatgaagatgggttcgttgccttaaaaaatatcaatcttgaaatccgtaaaggagagctggttgccctcatcgggccgagcggctgcgggaaaacgacaacgatgcggatgatcaaccgcttaatcgagccgacatcgggaaaagtgtatatcgatggacaagacatttctgagcttgatccggtcgaactgcggcgtaacatcggctatgtcatccagcaaatcggcttgtttccacatatgacgatcgcggaaaacatcgcgctcgtgccgaagctgaaaaaatgggaaaaacacgcctatgaaaagcgggtcgatgagttgcttgagctcgtcggcttagatccagcgacgttcaagcatcgctatccgtcggagctcagcggcggccaacagcaacgtgtcggtgtcgtccgcgccttggctgctgaaccggacatcattttgatggacgagccatttagcgctctcgacccgatcagccgtgaacagctgcaagatgacatcatccgtctgcaagaggagattcacaaaaccattgtctttgtcacccatgatatggacgaagcgattaaaattgccgatcggattgcgctgatgaaagatggtgaaatcgtccagtttgcgacgccagaccaaatgcttcggcgaccagcgaactcgtttgtccgcgaatttattggtgaagatcggctgcaaatgcgaactcgccaaacagccgtgccaacagcggaagatttaatgtccgatgacgtcgcaacgatttcgccacggcgtggcttagccgaagcgttccggctaatgaaagcgagaaaagtagacagtttggttgtcgtcgataaaaagcactcgtttctcggcatcgtgacactcaaacaaatcgaacaacgatacaatgaggaacatttgcttgttgcggacatcgctgattacgatgtgacgacattacaaaaagaagcgggtgtcaccgacgtcgctgctttgttccaagactcggatgtacgcatcattccggtgctcgacggcgaccgtcttgttggcggtattacgcgctcaagcatgatgcgcgcgcttgctgagtggacatttcaacaacatgcataaaaaaatgaatgagatataggtggagaggaatgtcccgtttctgtccatcttgttggcaaaccgcttgaaacgatggctcgattaaaataagggttgaactgctgataagtggtttatggacaaggggatgcgactgcttgtttgaaaagtagccgctgaaatcactcatccggttggcggccggtttcagccgaggacgaagtggcggctgacccgccgcctttctgccgaatggcataccatgatgaagtcgcggctcatttcccgtcgcttttccccaaagggggaaaactagtccatctgccaacgattgtttcaccaaggaaggaataacacgatgaccaagcggctatccatctgccgctgtttttccaccaaggaggggtacaatggaattattgcaaacgtttatcgaacgacaagaagagatttggatcgcttttcaagagcacgtactgttatccgctattgccatgggcatcgccattgcggttgccgtgccgctcggtgtggtgttgacgcggtatcgcaaactcgctgagccgattatcggcattgccgccatcatccaaacgattccaagcttagcgttgcttgggtttatgttgccgattttcggcattggcaaactgccggcgatcatcgccttgacgctttatgctctattgccgattttgcgtaacacgtacacgggcattctcggcgttgacccggcgctcgttgatgccggacgaggaatggggatgacatcgcggcaaattttatggatggttgagcttcctctctctcttccggtcattatggctggcgtgcgcacagcaacggtgttgacgatcggcgtcgccgccttagcgacgtttatcggcgctggcgggcttggtgacttgatcgaccgcggtttgcgtatcgccgataaaaacttaattttagccggcgccatcccagctgccattttggcgattgtgtttgactggttgctgcgcaaagtggaaaagaaagtgacgccaaaagggctgtagctgtaatcagccctttgacgccaccccaacaagaattcgaacaccactctcccctgcttactcgccccggagcgggcgagaatatttatatagatataacccctgacgttcgtattaatcaaaatgaatgcttgtcaatgattatttgagtaaggatacaaaacggaggaagttcagtccagtttttgctgccataaataagatttgaaaatcattgtgggttgggtgattcccaccctacaaatgatatgttttgttcattagtcaaccgcctcaccatgaaaatggacactaccccttatgatgattcatccgcctcccactccctatgtacgaactacaacagcccccttgaccattctgtttcctcaccacatgtgacatcaacttaaccgctcaaatccatcgatatttccaatcattttcatccactggtcaatgaagagcgctgatcacggcaacagcaaacgataaaccaaggtacgaagcccaatctgtaaaaaacatcatccatgtgctcattttcttataaaaacattacattgagccattaatatgaaacacagcacggatatcgccatcgctcctttcgctaatgccagctaaaagcaacatcaccacccaattttctatatataggaggagaatgaacatgggagagtatatgttagagacccatcatgtaagcaaagcgtttgggaaacaactcgtcgtagatgatgtatccattaaagtcaagaaacagacggtttatggattgcttggaccaaatggagccggaaagtcaacccttttaaaaatgctgacagggcttttgcgtcctacgaaaggggaaatcatgatcaacggccatccttggagcagaaaagacttaaaagatatcggtgtgctgatcgaatcccctgctctttacggcaatctaacggctcatgaaaacttgcttgttcacgctaaattgcttcatttgcctgagtcgcggatccaagaagttttgaacatcgtcggcttagaaaatacagggaaaaagaaagcatctcaattttccctcggaatgaaacagcgattaggaattgccaaagcgcttttaaaccatccaaagctgctcattctcgacgaaccaacaaacggcttggacccattaggcatacaggacttgcgaaaactcattcaatcgtttaccgaaaacgggatcaccgtcattctatcgagccatattttgtccgaagttaagcaattagccgattatattggcattatccaaaacggaaaactcaggtacgaagggaaaatagacgaaagtcaagatctcgaaaaactctttgtcgatgtagtgaacgagtaatgaaggaggatggaaatcatgctcaatatgttcgagtcagaacgtttaaaatataagcggacgtttgcgaaaaaacttgtattcatcgctccgcttttctttgtcctgtacgccatcatcaccatgccaactataaattccacacacaattatttcgaatatgccgtatttaattggtggccattgatttttgttccgattggaacagccttgatcgcttccttgtcaacggtaagggagaaaaagtcaggaaacgataaagtattgcgttgtcacgacattagcatcgtgcgtctatggtggagcaaaatcaccgtcatcgcctattacatgttgctctcaacaatagagctgatcatcttacttgttttattgaaatggctttttcccaacagcctctcatcagctacggttgccgtattcgccagcttggtcatttggttgacctctttagcctatatcccgatcggattatttgtggccgagcggttcgggatggtagtctcgatcattgtcagtgtcattggcctcgccttaggggtagtcatggccgcacaaccgtattggctgttcatcccatggagctggggaatgaggatgatgtgcccgatcgtcggggttcatccgaacggtgttcctttggaaaaagggagtccgctattggatccttctgtcattccaataggcctggcgattgcccttgtcatgtttctattgttatcttttttaaccgccgtttggtttgcgcgaaaggaagtgtattaacatgtggtttcttcgccttctgtcatccgaatggataaaaacaaaacgcacagcgattcggatgatggtcatcatcacgccaatcatttattcgctctttatggtatggtatttttcgcactaccgtacctctacgttttggcagatgaaaatctatcaaggattttttgaagtaatggccgtttccttaccgatcattatctccctactgactgggctgatgtcctatcaagaagaaaaagcaggaagtttcatgaacatcttgaccggtcctgtatccaaagttcaatggtatgttggcaaactcacgctgctcatctttattgcatgcgcggacatcttgctagcgacgattctcatgctcgttggaatgaaatacgtactcaaagtggcgcacattcattatcagttatttttgcaaggagccatgctctccatcgtgggctcactcatccttttttccttgcatctgttcatcagctttgcctttggaatgggagcctcgatcgcagtaggaagcggcggatttctcatttccgccctgattggcgcaacttccttaggcgatcacgtatggagctatattccttgggcttgggctgttcgtctctcacaatttccgattcttatgatgcccgaagtaaagcaagccttgggggcgcagttgttaaattccttttcgctatcattatgggaaggaatagcctatgccctcctaagcttcatcatcgtcaccatcatcggttcgatctggtttcatcgttgggaaggaaatcaaccacatgaatgaaagttcactgctccctctcaatgggatggtaaaaaaggaggtttcagagtaacgatgaaaaactccatcttactcctcatgttgattggaatcctctttataggaggttgttcacttgtcagtgacttaaaaaagacagccacacaaaatatggagatcgatcggaaattaccaaaatacgagttgaacaaagaaaatttgcaagaaattcactatcaaggccgaacgtacatgattcaagcagcaaaagtcgatcggaatcaattgaacaaaccgatcgggaaagtagcggagacgattaccatcaatgagcatcatcaaatcttgagtaaaaaagagctgcgaaagatcgaagtcattcccgatcaaacggatgaaaaacgaactcacttgaactttggttgggtatacagcatcaaaggcgtaaacccagatgaagaagtggctgttacggtgaaccaccaatttttgattgctaaaagaaaataaaggcttagagactgtcagctagggaaagagaaattcctccctagctgcattctccactctctataacggcggaaagcccataaga

SEQ ID NO: 1787 - DNA, 23237 bp, synthetic construct
  source 1..23237: mol_type = other DNA
  misc_feature 1..23237: note = Synthetic
ttgcagaaatttacaaaattacatttgaacgtcggatggagtcacaagatgagagagggcaaatgttcatctttaaaattaaatcattatcttatactgttctaacggttggtatattaattggagtagcattagtagcaatatttaagttaatagataaggaatattttatttattatgtaatgcttgtgttttttattcaaagtatagtatcatccatttatttggctattgttcggaaagtataaaactgttcactagatagcggagtatttttacatattctattaatactattaattccttcttcaaaaatccccctaaaatgaaaaaatacgctattctttctgtagaatcataggaaaggatggcgtttttgtatgtctgtttctgtgtctgacgaattacaactatttgctcaagagattcaaagttttttatctccaaataccttacgggaccttgctagaaatgttggttttgtacaaagatccagtaagtaccaagcaaaagatttagtagctttatgtgtatgggtaagccaaaatgtcgctacgacgtctttaactcaattgtctagctgtttagaagcatcaacagaagtactcatcagtcctgaaggactgaatcaacgatttaatcaagcagccgtccaatttttacaacacatactagctgaactactaaatcaaaaattggccttatctatgccaatttcttctccatatacttctattttcaagcgtatccgtattttagattcaactgcatttcagctcccagatcccttttcatccgtttatccgggtgcaggaggatgcagccatacagcgggggtgaagattcagcttgagtatgatctattaagtggtcaattccttcatattcatacaggtccaggtaaacaacatgatcgaacctacggttccctgtgtgtcccaactgttacagcaaatgatttatgtatccgagatttaggctatttccatttgaaagatcttcaacatatacaagagaaaaaggcttactatatctcacgtatcaaatcgaatactcgtatttatcaaaaaaatcctaaccctgattattttcaagatggcagaatcaagaaaggtacagagtatatccagatagatatggaggttttaatgaactctcttcagccaagacaaacatgcgaaatatccaacgcttatgtaggaatgactgataaagtcccaactcgtgtgattattcatcgactaacaaaagaacaacaacaaaaacgattacaagatcaaacggtaagagaaaaaaagaaagggatgaagtattctcctcgtagtaaacgacttagcggtatcaatgtatatatgacaaatactcctacagatattgtcccaatgggacaagtacatgattggtattctttacgttggcaaattgagattttatttaaaacgtggaaatcattctttcatattcatcgttgtaaaaagataaaacgagaacgattggaatgccatttgtacgggcaactgattgccattctactctgttcttctaccatgtttcaaatgcggcaattacttcttagaaaaaagaagcgagaaatgagtgaatataaggccatatatatgattaaagattactttcttcttctttttcaagctatacaaaaagacacccaagagctatcaaagattctaattcgcttgttcaatctcctacagcaaaacgggcgaaaatctcatagatatgagaagaaaacagtctttgatatattaggtgtcgtttacaattgtaccatgtctgataatcaagcggcttaaatcaaaaaaatgaaacccattagggtttatttcgtatgcaaatctttaaattccctatacgtagcctttagaaaaaagaaataatctctactataattgacgttgtatgagcttagcttgatagcgatgtggtgctagcccattgccatcaacctatgaaaacaggtcacccccaaaacaataaataagctttttcgttacaagaaagcctaaaaatttcgttctgggggtgtaataaaattttagcttgatgggcatgggggattaccctattaatcttgctattggaataaaaacaacaagacccgaaccaaaagtaacatagttaaggaggtttataaatgacatttccagccttgtttactattgttttatcaatattaatcctatattttcttaataaagaagataatgaagggcagcaatgaatcttaaaaaatcttatagtaccggctgaaatgttaagtatattgactcaacattccagccatttttatttaaataaggattttattaaaaacctacatgtatatgtttttcattatataattaaattatcaatgtataaggatttttaattatatcaggaacaataatgattttgttatacatttgtttcggattgagtgcagtttttagcttaataaaggaattgaaaaaaccacagaaaaaccagttcctgattttagttgattctctaattttgctaggagcttttttcctattaggtagtatcttcatctaaatcacataacaagaactccattagagagcaaagcagcctagcgaaagctaactgcttttttattaaattaacgcttttattcaaaatgacacgataatgcattgcatcattttaaatactaggactagtaactatataaacttgtgcataaaacatttataggatactatattactgaacatataataaaaatcaatattcagaacatatgatttctattaaaagaaggagaaagaaaccgattttcaaacgatttctttctcttttttcaaaagtaaatagattaatatatattgttaaaagtcattatgaatggagttgttcaaaatggattttaagataaaaatacctactgatagcctggggttttactctttatcctgtccatattgtcatgagaattttaaggtacaagctggtgacattgattcggaagaggtattagaattatactgtccaatttgtggattgactgcggataattctaaattcacacctcctgaagtactagaacatgcaatgactatcgcaatgaattatgctcaaaatgaaatattcaatgtatttaagggttctagtaaaagtttaaaaggctcaggaatacatatgagtataaataaacctaaggaagaggttcctaatttactagtcgaggacgaaaatttagaaaaggttgaacttaattgttgtaacaaaatcattaaattgaatgttgcacaaatagcaacaaatgtatactgtcctttttgtggggtgaattaatatgagtccagaattacaattaacagaaaacgattataaaaaattatcattaaactttcgaaaagtggcaagtaggttccttcaaactaattttaccgaagcgaatgataatttagaaagatttttaatattcattgaagaatcgccagtaattcttcaatttattcaaaataataataccattgagtacaacattaaaaatatcattgaaaataccgaagatcatgataaatacaagttgcctgttcgtacttctgaggagattgcttttatttatcaatttttaaaatatatatttgcgaatgatataaagtattttaatatcattccaatgagctatagatccgggaagaaaattcaaaatactgttgataattttaaccaacaagtagtaaaacctcttgtggatcatatagttacatatttgggggagatggcaatagatatgggattggataaaagatcaagtacacaatttaacattcaagattttagagggcaactaaaccatgctgagagagagtcttcaataacagcacaccaagtttataatgaatcaaacattgaagatttaaagaaaatcggttctcaatttatacaagaacttttaaatgaaaaaagtgatttaggaattgacaaggaagaaacaaaagaatttctagaagctgcaattgaagaggttgaatcagaaaaacctaaaaaaactataataaaaaccgcaatcgaaaaagtcaaaaatgtcaatgaactagtaacaggtgggacagcattatatacatcaggtgaaaagcttttaagcttacttcagcaacacataggttaataattaggaatacgctcattagttgtattatcttttcatttatcataagatttatcataagatttgttataatttctacataaacttatataagtttatataagtattacattgtttatttttgcataaaataaaagaagagatgctagtaacatctcttctagtaactgctaccgcaaggtggtcagttgctaaatattatttgcttcttttagaaccgccctttcgcttgccggctttgggggcggttcttttatttttattactaagtttctttacaagctcattcgcataagctgttgcaaagactgtgagatgttactttcaaataaagcctgatcaaaaatgctttgaaaatccttatttaacgaggaacaaaaagagaccgttttgaaaaaagattaatcaaaatagtgtctttactttttggatgaaccttccgttttataaaaaagtttgattaaaatccatttagaattccttaattatgtaaaaaggcaataaggctactaaattttaaaatctaaaacaagcataaccccgttctaaatttaggacggggttaaaatatagttgtttaatcaataagtttatttcaacaggatgcttaagtgcttatttagtaatccatgttaaatcttttttatattaccttgctcatttacatataagatatgtgccgttttatttttatttaaaattaatgtaatagtatcttttgaaaccattttgtcgtcaattgagcgtattgcatcagaaaacaaatgaataggcggttcatcatttatatacttattgctactcatattagcactaatgaactctttgacttgttgaggttttacaccatatgcctgtaagtcttgtttgcattcaactggtacaaattcagatgtactagacaaactgtataaataagatttattttctttatgatctatgcaagcaactactaattgtaaaatagaataagcctcatctgtatgtacctgtttatacatatcatgtaggaatatagctgtcttttgaagatgttgaatcatttctttaactgacaatttatgattcaaactaaatataggttttattgcaccaattacagctttacctatacggtctgaaccggctattccaattatcatattttcacaaatcgggtgtatttttgtgtttgattcatatgtttcaagaatttgattacttctattcatatgactcatttttgtatcgcctgttattagaacataatcgtcttgtttcattccaattaatactgtcatctgaatttctccattctattccatattattgtcattctaacaatacatgtaaacatcaacgaattctgatgtgaatttccatttaattttcggataggaaatctcatatccatataaaaatttcagagtagtataagctctttctaaaatcaatccaggttctcccttgttgatataataatcatccaaaatatctttcacttggcatacattaaagccattgggctcactgaagtaaaatcgttcaattaaaatgtgtttcttatctgtgtcatcatcagcaactttttcttcttgtaaaacagaaattgcaaccaaattagcgaaatgtttactaccataatcatgaacccatgcagtatctttaatatattctttgaattctctttcaaattgatcatataattctctcatttattatccccctttgtttaaaattaaacctttatttaatagtttctacttcagcttcttctttttctaaatcttctagtaagaaatctaattctattattgtagatagagcattgaatagtcgcaaggcgtctacttgtttccaattacacggataatctcttccatgcaatacccaatctcgatttataatcggcaagcgagctggtcttttatcgaaatttccacttttaaatacacaatttaaatactctgcaacagaaatgtagcatattatgtatgtcctatcggtttcgacttctttctttacttttttatattgatctcttagaggtggttttcttttttgatttggatttaaatatttttgatatcttggtgaaataagaatatgggagatgttttcaataataataaatagattaggaataacaattaagtaattaccattttcataactctcaaagcattgtgtgagaagcacttcccactctttagtcaattcatgttcaagaatatgtgtttttataaattgaaattcttcttcttttgagtaaaacgataagaaagttgagtctaattcatcttggcctacgatttctgatattccaatagtttctcctggagccatgttcattgggatagtccatcctcttctccctaaactttcagcggatttcttttcctttcgctcaaactcttcccaatctatatcaattacgggtcgtaaggatactttaattgattctatcaaatgcgtgcgtagttctgcaattttctggaatgcttcctgcatttgtttattcgcattaatcccttgcggaaaaaacttatgtttgttcttgattagaaaatcagtattaatttgatgttccctctcttccatttctgcattttctcccctttgtataaaatatagtttttatttaataatcatctctcctgtaacgaggtttgagtacacattgtagggcgccttcaattgcaattcttctatgatagcctacacattcagtccagtatattcgaacatcgccttgaattgatttaaagaaaatatttctaggccttatgttttcctcataaagctttttgacatgttcacgcaatctatcacgtatccaaccttcaccaacatataaaacttcttcggtaatagggttaacaaatatatataatcctcgtttatccttaggaactaatttatcaatcttctttctaagaggtagatcattggtgtgcttttctttttcattatatttataattcatttcaaaattgaaccagtatgggtttgattcaagtggtaatagcgaattgtttactagaacatctttaagactattatcaaatttatcattgtctaacatataaactactcctttaaataaaacgagtttcctttattatatataattacatccaatgtataaaattaattatttatccattctcttttgattgtagataacatatcatttagtattctattcatttcttctactacaattttactattaggcattaatatattaaaacctattacttttttctttttggtatgttcccaaccacctacaatagcttcaacctggtaatgttcctgtatttcgtatattaatgaatataataaattttgttcgttagataagaaataacggtcatttaccatcaagtatttatctttagaatgtttatctctagattgagaagaacttttataagatatatcaaatagttcttctcggctagattcaatactcatataggatctagcttcaacactattcatttttttataaatgtctccattaatatagtaacggtaatttatattctttattgcttcctcgacctcagagattgcttgttgtttgtattgaaacaatattttatctgttaaatcttctctagctatatcaatcaattcatctttaaagatattgtaactaatatcagctgcagacgatgaaatttttgaagatatataatcaacatacttagaaatagaagcatcagatacctcgaatatgaattcactgttctttctggttggaattacttctataaaaggtatatcttcttcatcaaagtattggactttcacatcttcgtttgcatgtgttacataaacctctattacaaaagggtgagaattgtcatattcgtcttttactacaacgtcagctatagaatcccctacccattgctctactatagcaaacctctttttataaaacttcaacatttctaataatgatatttcgtaagaatctatattaatggcccttaaaaattctttgtatttctttttaaaataactcaaatcaattttaagttttatgtcttcttctttatttatcttattaacaagaaaatgcttcgcttcgaaatgtaagagggtttcacgagatatagaacaatcgcttccaggtttatgactaaagtgatgttcccttttattcccttttttaaaaattacgtcttcattacagtgtggacacctatatttaatatttttatatagtctatcttcaatatgtacgatattcgttccacacaaggcgaagttaagttttacactcacccagacgcactcctttctataaaattaaattctatattataacatcactatatataataccatatacttatttttctaactttctatactcttgcatatccctatacaaaaggggctcaaaggactaaaatacaagttatggaagctattatttcaatcgttagagcctatcatttttagttacatatgagattttttattaaaaactttaatcaaaaagggatgaaacggtacatctttttttataaacagttaagctttgttataaacgattaaactttatttcaaatccacagctcactaaaagatgaaatgccagccctgagcataaaagacagtgacatctttcaaattcaaatgctaaaaatagattcaaaaaaagagtaacatagcgctatgccatgatactctttttttattttaataatataaagtgttttttctgcactcaaaagcaactaattccttaaacaaaaatataaattactatttcaaaaaacaagagaacttaaggattaaactaacgaaaaatccttttttcatatgtgaaatccttatctaaagctataataacaaggtttttgatgcatccatcatagcattgcgatggttcttttggaactatagcccttcattatttttctaaaaaccttttaaatcatagcatagcgattttccttatggaactatagcaaataccacgtgtaacagattgggataaggatcatagcatagcaatctttcttatggaactatagctcgctgaccttcacagaacataatggcgtgatcatagcatagcgatggttcttatggaactatagctatctgttgactacatgctgggattatcagatcatagcatagcgatattttttatggaactatagtaacacgagatcatacttttcaagaggtataatcatagcatagcgatgtttcttatggaaccatagctgacgacacaatatacgcaaaaatgattataatcatagcattaatatttcttatggaactatagccaacgaccttgtaataagagtctagatacaatcatagcatagcgatattttttatggagctatagccaaacttactaactgcattaagtagtaaagatcatagcatagcgatatttcttatggaactatagcagcatgaaacaacagcataggaaacttgattatcatagcatacgatgttttctttggagttatagcgtaagtttgtcaaagacattacatttttctcaaacattgcataagtataacgacttttcttaggaatcatagagaacagaaataaagtttcacacaataaatttatattactattattcccattttcttaatttttataattatacgtttatctaggtataaagtttgattttagggttaataatgcaattatcaggatcatatcatagcgatgtttcttacgttactatagtaagggcaatgacccgtggcgtttggggatcgccttatcctttatggatattctccccatgtgaaaagcacctaagcataaggctaaggtgcttttattttgagaaacgtgaaggaggttgtgtaattgcgatatgtattaggattggatattggaatcgcatcatgtggttgggctgtaatcaatcaagaaaaagagagaattgaagatttaggggttcgtatttttgataaagctgaaaatcccaaagacggaaaatcgttggctgcacctaggcgtgacgctcgctctactaggagaaccctacgccgtaaaaagcatagaatgcaacggataaaggtacttttagtaaaacatggcttactatccaagaccgaactcgaccatctatatgaaagtgctactgaagtcgatgtttggaacttacgtttagatgctctagagcgcaaattatatccaaaagagtttgccagaattcttattcatcttgctaaaagaagaggatttaaatctaatagaaaagaaacaactctctcagaaaacgggcaaatcttagaaagcatttcagagaaccaacagattatggagaaacaaaattatagaactgttggagaaatgattctaaaagataaaaagtttgaaaaccataaaagaaacaaaaatggtacttatgttggtactgttactcgtcaacaacttcaagatgaaatacaaatgatattccatgcacaacgtttgtacaaaaacgattatgcaacagaagaatttgaaagtagctacttagaaatctgggcatctcaacgcccctatgcttctaaagatcaaattgaaaaaatgattggttactgtaccttagagcctaaagaaaaaagagcgcctaaagcttcttggtcatttcaatattttgtagcgctacaaaccataaacaacctccgattgatcagtaaagacaggatagaagaactctcttttgaggaaaagaaacaaattatgaatctagcacttgaaaaatcaattgttaaatacattgatatccgaaaattattatctgttcctaatgaatttcaatttaatagcctatcatattcagctgacacagtagatacagcagtggaaagtagaaaatgtatagaactcaaagaatatcactctattaataaggtatataaacaaatttacggggaaaatgccctaaatttattacctaaatattacgatacaattgcatatggactaactatctttaaagatgataaagatatcctagaatatttacaaaataaatatgtaaatgcaaaaggaaaacctataagtaattttgctaacaagacctacgatgacacatttattcaggcattactgaatctgaatttcacgaaaatgggacatttatcatttaaagctttaaaaaatattattccctttttagaagaagggctatcgtacgataaggcatgtgagaaggcaggatacaactttaagggaacatcctacacagaacaaacaaagtacctacctgttatccctcagaatacaaatcctgttgtacatcgtgctctttcacaaacaagaaaagttataaatgccattataaaaaaatatggttctccaaacgcaatccatattgaaactgcaagagaattatcgaaaacattccaagaaagaaaagaaatagatagtatgtaccaggataactctaaaaagaatgaacacgccattcataagttaaaagaattggggaacattaacccctcaggaataaatattgtgaaatttaagctttggaatgagcaagatggtagatgtatgtattctggaaaatatatcgaaccacatcggttatttgaagaaggttatacggaagtagatcacatactcccctatagccgtagcttagatgatagctataacaacaaaacattaacactaggaacagaaaatcagcgtaaaggaaacaaaattccttatgaatacatggggaatacttcaatttggaatgactttgaaacaagggtacagtcaaataaaaaaatcaacaaaaagaaacaacaaaaattacttttacaacacttttcatatgcgagagaacaggaatttattgaacgcaatctgaatgatacccgttatgccacaatatatctatcatcccttattcaacaacatctcatattctctgaaagttctcgtaagaaaaaagttcatacagttagtggaattataacatctcatttacgtagtagatggggatttaacaaagatcggaaagagggacatatccatcatgctttagatgcggtaatcgttgctgtcacatccgatcacatgattcaaagagtaacaaaatattataagttaaaagagttaaatagaaaccttcaagccaaaaggatgccgtttcctgaaccttgggaaggatttcgtttagagttagaagcaaggatttctccaaatacccagcaatatttaaagggccttcgttttaaaaattacgccgatgtcaatctatccgaaatcaaatctatctttgtttcaagaatgcctaagcactctatcactggtgaattacatcaagaaacgattcgaaaatttattggctataacgaaaaagggaaagtattaaccgcaataaagacaaagttagaagatattccttttgatgccaatggtgattttcccatgtatgggaaagaaagtgatttatacacgtataatgccataaaagaacgttatttaagtcataaaaaagataaacgcaaatcattccaagagcctttatacaaacccacaaaatcaggaggaattggaccacttataaaatctattaaaataatggatacaagaaccattgttaatcctgttaatcaaggtaaaggtgtcgtgtataatagtaaaattgctcgtactgatgtattcaaaaaggaggagaagtactatttaattcccatttacacaattgatcttatgaaaaatatcttacctcaaaaagcaattacagcaggaaaaggatatgaggattggacaaccattgatcctagctttacttttttatttagtctttttcccaatgatctaattcaaattgtcccctcaaaaaataaaacaattaaagctagaacaactgtatcgaaaaaagaggtattactaccctcactcacaggatattttaaaggtgttcatagtggaactgcggggattactgttgaaacacatgatggtagtgttatagcaaatgtaggctcaaagcaattactattaattgagaaatatcaagtagatgtacttggaaattatacaaaaataaaggaggaaaaacgcattgggctgacgacatataatgataacaaaaagatcgcagcttgctaatatggaattttcaatagggaaacatacggaaacaaagaaaatactatccctgctcaacttactttattttaaaaagaaaaaatcgcattctaaacaaatgaaatccttcctttttcaaatttaaaaaccttgtctacccctctagtgacaaggtttttttgacatctaccatagcatagcgatatttttatggaactatagcctcggtgtatatcaaaggacaaaagaatagaccataccatagcgatgtttcttttggaactatagtaggagactcggttttctgactaggagtcagaccatatcataacgatgtttctatggaactatagcgaattactaacaccacttaaaaaattatgaatcatagcatagcattatttcttttggaactatagttcagaggctgttacttttttgctgcttgacaccatatcatagcgatggttcttttggaactatagcctcccatgcagatattgcacttgctgttacaccatatcatagcgatggttcttttggaactatagccacattgcattccattcgaagtcggatgtgaccatatcataacgatggttcttttggaactatagtttgccaatgcatacaatcataagagattaaaccatatcatagcgatttttcttttggaactatagcagctgtctacgtgatttaaatatatctacaaccacatcatagcgttgcttcttttggaactatagcatgaaatcagttatggaacattttgatttgaccatatcatagtgatggttcttttggaactatagcgtaatgattgtactcatattcttcttgttaccatatcataatgttggttcttcggggactatagatgtttaaggatcgacacaaaatatttgtaaaaacacattaccttcaaaatgaaattgaattattttatatatagtttaaccaataaaatatgttccaaacctagctactcttacatatcattgtttttaatactttctttactaacctgaaatacatggtaattaaccattacaaatgccttgtataacgctatgacaatttaatacatgcaaatgaatgatcagtcacaattcccatgttctcatatacataacgaaatgtttcaaatcaagactaatatagtgttaaacaattgttgttcttcaaaaaaattacacatttacacatgtgtaaatgtgtaattctttaataaaggcttgtagccaaaaatacaaaagaattaaatgtaacatgtgctgctattggtacttttatatctctagtcttttcgtaactccatgcatataaacacccatttacaaagtaagggaagaagaacaaatcaaaatgcacggctgcaaagataccattagcaatgacaatcgttgttgtacgattaattggttcaaacagtttttctattccaaacggtagaatctttctgaagatccattcctcaattacaggagcaattaatagaggtacaattaaatagaagatattcaattctacttttgcattcacctgttctgcattgcctgtatcaattccacaataaccttttatataagaaaaaaggagactggacacgatagctagtccagtcgtcattaacacccatttccccttttctactaatctttttacattcaactttcttctccccttactatgattctcgtttattttttagcaaattcaaatgtgatctttccgctagaatcaagcttcagatacgcatcaaattcttttcctgatttccctttcattcctttgatcaatcctgttttcttacctgttaataattttttaacgtttgcttcgctgattttctttgttaaaaattcgcttggaagagagaacttgcagccttccttgtaacctgtacagccataaaaagtcttacgattcgctatctctttgccacatttcgggcatttcccaacggaatccttcgtcttcatttcttgtactttgctatctatctgaagctcaccaatcgacttcgtagcatttacgatcagctgcttagtgaattcccctgtcttcgcaacaaatatctctttagagccttttttcttcccgattttacgcaaatacccttcccattgcgctgtcatttcgggcttcgctaataacgtgccacccacggcttcgcaaagaatttcacctttcggtgtaactgtcaccttattctttttcacttctatatattcttgttttttgagcgtttcaatgatgccagctcttgttgcttcagtaccaagtccctctacttcttttaagatacttttactttcttcatcctctactgaagcaccgcacgttttcattaatgtaatgagttgcccctctgtatagggctttggtggtgttgtgataccttctttcgtttgtatcttcccttgtacaagttcgcctttttgcacaacaggaaggagggattccctgtcttcgctctcttcttcgctaggctgctctgctttgtatagctctttccatcctaacgctttttccgcttttccttttgtcgtaaactccaatccattcatatctgttgtaataatcgtttcctcatattcgtaaggcgcatggaacatacccagtacactctttaacacttcaatgtacaagttgcgctgcttgtccgttaattgatttaccttttgtttcgaaggaacatttttagtcgctataacggcatagtgctcttggactttttgattatcaacgtagcgtttattcgattctaatgtttttggttggaaggatactcctacaatagattgatatccctctaggttttggactaaataagcaaattcattttctgtaatgaaattacagtctgttcgtggataggtcacaagttttgcttcgtatagctcttggacaattttcaacgtatcggcaggtgaatacttgtactttttattcgctaaagcctgtaaggaagaaagagagaacaactttggcgcttcttgtttcttcggttttacttcaacggattttactgcaccttgctgattcattccttcagttagctgatgtttcttcagtagcaatgccacttcatttttagtttggaatcgctctttatatcttcctttatatgttccattcatccctttaaattgcccttctatttcaaagaaaagggatgacttaaagtgtttaatgtcctgctgccgttgattaataagacataaaacaggagtctgaacacgccctacactgtaaacaccttgtacgcctttttgacgtaataaaagcgtatataacctacttgcattcataccaattgcccagtcactaatttgacgggcctgtgcttcagcaaacatgctctcaaactccgtaccttccttcaggttctgaaatccctttttaatttcatccacttctaagctgttgatccaaaggcgtttcatttttttagaagaacagcctgcttcttgaatgattaaacgtgcgattgcttcaccctctctatcaatatccgttgcgattgtaatacagtctgcttctttcattaatttctttataacgttgaactgctttcttttatcagctgacactttatatccatatcgttcgggtaagattggcaattgtgacatatcccatttttcccactccgctttataatcttgtggtgctttcaattctactaaatgcccgtatccccatgtaatattcgctccattcggcattaaggaacaaggagcaatagaaaagtatccatccttcttctctgctttcgggaatgcttccgtgtatgctttcgcttgtgatggtttctccgcaataattagtgtagtcatgtgtattacttcctctcataattaaaatcttgtatacaaaaaaggagcagcattaattatgctactcctgaaaatatcgtgaacatgtaaacatgtgtaaatgtgtatttgtgtacatttacacatttaccataattgggttaataactatatttttttatcgcttcttctatactctttgcatcctgttcgttacaaaaatcatttatatatctcggaattacttcccctaaatcccaaactgctagatcaaactgttcattagtctgcctatttaaaaaacagtgtgaatagcaaattggaacttcccatagctgccaccctgtaatatcaaaatcttcttttttaatataagaaatacaattatgaagacgtactaatgatttatcatcttcattttcatatatttcttgctccagttccttaaagtttaaaagatacttttctataaacccttttatactgcctgtgctatttttcaaaagttcctttgcaatttctagcttctccatttaaatccccacctttaaattttgtatacaaaaaaggagcagcatggactatgctactcctaaaaatgtgaacatgtgtatttgtgtatttgtgcatttgtgtatttgtgtatttgtgtacatttacacattggacctaaaagcagcatagcgctatgttgtccttttttatctctcacgccccatttggcgcatatatgcaagccttcttgctcgttccctctgtttatcttgaatctctttttgatctattaattcagattcctctttaatttcttccttaccttgtaactttgtattttcttttgagagctcctgttttttcactaatccaagttcttcattaaagttcaccagagtagaatttttaaatttccctattttatgagcgaccccttgcttttctttacgaatataatcctttaaatatgaaccaaatccatttttaatcggttcataattatctctgatgtagttatactgttctctatctaaatgtgttcgattctttatgtaagagcgatcaggaagtatcaacgcatgagaataatcaattcctgcattagctgatttacttgaaggtgcatggaatccgttaggatgattcaagtttgatcttaatggtaataagaaatctttatcttcaacccttactttcatatatacataaggtcttttcacctgttttggaactttattttcatccaacatatttttgaaatgactattttcttcgaaatattctctatttaaatgtacaacatctatttttttagtcattataattttccccttcaacaaaaaaaggcaaccgcattggttgcctttaaactgtaatacattaaatttaatcatcgttcttttcatttgtatcattgcggaggtgaacgagtaagaactccgctgaatatgtgcctgttcttttcatttatgtcattgcggaggtgaatcagaaaagaactccgctcaattgctatatttattatagactattcttacttaaatatctataatacttttggtacatttttctttttatcctatttatctttctatccctcgttgttgtaagtaaacagttcgtcttccttgttctcgttgattggctactcgcttacattcatcgttccaatcccatttttgctcttcagacggtgcttgcggatattcaggtttaaatgcaactatgcttccatcattcttttcatatcggaaatgtatcaatcgttccgcaaaagctttacctgccttatcattgtctacacacaatgaaaggctatcaggaacgtcatcaattcgctcttgactcttcatatagtaattgaatacaacttgcggttttaatccttccatgctaaccaaatgagtatctttgaggtcatgtttatgtagcgatgcataactcaacaaatcaattgatgattcaaagaactttaaattgcgtggttcaccatttagtacattaaaaccatagttagccgtagaatttttttgtatacttttccacgccccacgtttgtatttatccgattttacgactccttgctctgatccacccattaccgctcccgtttcacggtctttccataggaataatacattgttgtacttatcttgtttaatcagtccttttttatgcaaagcatctacaacttgcggatcaatctttctttcctcagtcagatattcccttgctctatcaaattgaggcacttctttttttgcaaaatgttcacaatcataaggctcactcacaaatgtaacctcagaagctttttcatagtcctgttctccgtccagtaatcgctgcatcgccccagggaacgaagcatcttcaacctcctgtacaaacttaataatattcccgttaacccctctactgttccaatagaactgatttttcttcctatcaatgattaagctatcgtgttccgctaaacggtaataacgttcactgtcagactttacgggtatatcgttttgcatacaataatccacaatatcaagagatgctgctttttcaatttcttcctccgtatatcttttggtattcttcttttgttgttccatagcaattcctccataaaaaaaagaccatgcttttttttttacatggtctttttcaatttatttatatttgtatttgttctgccttaactaaataacgctttaaaggattctaaaatgcctgaagccccaaattggaaacttgccattccaaatgaatacagctcatacacaactacgatcgtactaatcattaaaatcattttttccgctataccgttatagctgtagtaaaaaacatggaatccgctttggaaatttctattggataatggcagcagccacttaataccttttttagaaaaactgtcttccactagatgtagaaagtatcctgcaaggatgcacatgccattagtaaaggacaatggtgtcatcccgactgcaaataaaataggaatcaacacaagcactaaaccaaatagtgaatgagtgattcctctatgaccaaataccatattcattaagtccgatacaccacgagttctcctgccaatccatgaatgctgttcatctatatcaggcaacaacgccccaaaactaaccgctataatattcccaaccgtaaggttgcccgttgacgccaagacaggcagggcgaccgctaggcttgttgtaagatgtgttttatacttcatttattacaccactctcgtttattaataatcacgaccaagcatgtgtttcatcatataatgttttcttgcctgctcccttgtttgtaatatttgctgttgttcttcctcatggattgtgtctttcccaacatatcgctttccaacgtcaggaatggtttttgattcttgtacctctatagcgccatgctctttcttcaccgatccaactgttttagcggattccatttgaaagacttcttctgtttgggttttgtggtcatttacaatctcttcaactggattgaaatgagcttctccatcttcaatcttctgttcctcaataaaacgaataggagcaagtcgtttttcttcaacatcttcgtagccgattgttgtataatgagcatccttgtcctctatctcttcaggactcacctcttctgccaccacatatccatatccctcaaagtgataagccgcttcatcctgctgcaatggtttccctgtcgattcgcaataaataaccatatcttcatttactggataaagcccttgatactccacatcaccattcataacttcattgtgtgatttagcaattgaatggttgatatgattaacagcttcaaatacggaatggttaaaatcgaattcaatatcactgtctgatacatattcagataggcactccactttcatattttgttgtctatctgttgaaactttcgcaattggcgtatcatagaattctccttgaataagatcagcttcataatacggttcaaggtaatctgcaattcgattgaagctttccatttctttttccgttccacatctatttacaacagatagcatttcccctaaactcaaccgcatatcaggatgaatttcttcgattactcgattatcttcagacagttgaatttcgtaattctcccaatgcttatctaaattaatacctaatttctcattaatctctagagctgttttttgctgaatgcctgttactacttcatggttatccatcattttttctcttctccttattagttgaaatttaaaataaaaaagaacacctataaaggtatcctcttatctctccattcgttgcatgtatgccatacgtgccatccttcttgtttcttgttgttttatagcgactgcatctacatctttttctgttttattagataaaaaatggtcaacctgattctgttgttcttcagaattagattgaccttttatatttccattatcttgttccctattcttttcgctctctctttgcaattcagaaattttcttatcaattgtgttaatgaagctacttgctgtctcatgaacacgcataatggatttgtctttctcttctatatcttgtccatttttcgtccattgagcgatataaggtactgctgattcgcttgtatccattccataatgcttacacacaatataagacgttaattctgcttcaaattctttcgtgggtgtatgttctaaaggatctatcttgttgccatgtaacttcgcatgagctaattcatggattgcaacagataattcattcgtctcagtgttccttgtattcatcacaatttgagcaaaagatgaacccgctacttgaacatatgcgccatgtgtattccctagttctttaatcaatgcgccttgtcccatatctttaattttaatattttctttctcagctaatgcatgaataccaatctttaataactctttattctcttcattcacttcaaagttaaactgacgattcgggaatatttttggcaaatcttcaggtcttgcatttgtttgtgaaatatcaaacgctgttgctttcaagtaataatttttttgcttctccacttttaactcaccatttttcacttgttgcctttgttccgctgttaatttagttagtggaattgctaattttgtttttggatctcttacaaactcttttacataaggatgaaaaaccttcattgctttttcacccttattcacatggaatccagcatctttaaacgctttaaaattcgcacatgcatacgaactttcaaattgcgacctaatcaactgcatgtttttaggagaataattactaaacttcgccatgaattcagccaactcgatcatatcttcagtggattcatagtacttcgtaatatctgtaagaaccttgtccatgacttcttgtgtttcttctttaatttgctcttttgtcttaggtgtatatttcttttttgtgtaagtcattcacaaattacccctcgttcttcatcatattcaacgtatggaaaacttccatgttctactgcatcatttacagattgaacataggctgccgcttcttctttagaaacatttacaataactttctttttaaacacatgcttttcaaggtgaacctcattttttatctgatccacatgtacaatcatatataaactcggttgagacatttgatacactacctttctattattaaagggctaatttgaagtatattttttcgtaagtttgttttcctttgccccaagttatattccaatcctctaacgaacccgaataaacttccttaaattttagaattggattatccattgaacccactatcacaattccaaatcctttatcatatgtagaatcatcctcatgttttttccataactcaaattctgtaattttatattttttagcaaaatcaataaccgtttccagtaaccaattttcatttacttcttcagttatctgcttctcaaaatccaactcaaaacactcaccataatcatcttttctgattagaaaatgattttctcctttctttatgttttcttctataatgcttctattttcttcgttacgactaaatcttgtacttgaaacgatggaataataaactttcttctccactttaaatcctccctttagattaataatccatttcttgttgtcgtgcaattcgttcctg

SEQ ID NO: 1788 - DNA, 23228 bp, synthetic construct
  source 1..23228: mol_type = other DNA
  misc_feature 1..23228: note = Synthetic
agcagagatcttaaaaggagacacgatccgtaaccctagacatactgaagggggagccttaaaaacctttgataaaatcctcgctaacccacctttctctctaaaaaattggggttatgaggaagcacaaaatgatccatactctcgttttacctatggtgctcctccaaaatcttatggtgacttagcttttgtttcccacatggtagcaagtttaaaccataaagggaaaatgggaacagttgtccctcatggtgtgctcttccggggtggagcagaaaagaagatacgttcaggctttctaaaagatgattttgtagaagcggtgattggtttaccagctaacgtcttttatggaaccagtattccagctgcactgctcattttaaacaaaaataaacctgctgaacgtaaaggcaaagtgttgtttatcgatgcgagccaagggtttgtgaaagatggaaacaaaaataaattacgtgatgaagatattgaaaaaattgtgaatgcgtttgatacgtttgaagatgtggagaagtatgcagctgttgttgacttggctatgattcatcaaaatgaagacaatttaaacattagccgttatgtagataccactgaagaggaagaagaagtggatattgcagctgttattgacgagattcgtgagattaagaaaaagcatgatgcgatggagcggaagttgaatggttatttgaaggaattggggtttggagagatttaaagaagggggggaagagattgatgttggtaaaagaaggctatcagattacagaaataggagcaattccggttgattggagaataggttcattaggtgataaaaaatattccatcaaggtaactcaaggacctaacccaaaatatgttggggaacctgataaagggtatagggttctaaaaacaaaggacctttatgattatggtatattatacaatcaagcagataaaatctcgaaagaaacatttgaaagttgtttaacatcagagttagaaaatagagatattttaatagccattgtaggtagaggttcgattggaaagtccaacattttttatcgaaaaaatgctgaaaggtatatttttacacgtgcaattggtctggtaagagtaaatcataataatctaattccagagtttgttcattattattttcaatctccttttggtaaaagagtttttgagaaaggtattaatggctcaacaggtcaggaagtattacaaacaagttatttaaaggaaataaaactaccaattccatctctcccagaacaacaaaaaatcactgatatcctctccactgttgacgagcaactagagcaaactgatcaattaatcgaaaaaacaaaagaactgaaaaaaggcttaatgcaaaagttgcttactaaagggattggtcatacagagtttaaacagacagcagttggagagataccagttgattgggaaatgaaacctatcgcggaatgttgcaaaacggctagcggtggtactccctctagacaaaaaaaagagtattatttaaatggaacaattccatggataaaaacaggcgagttacataaaaagtatgtatatagtgctgaggaaaagattactcacgaagctataaaaaattcgtctgcgaagctattggaagaggacacagtagtaatcgctatgtatggagcaactataggtaaattatctattttaaagataaaagcaactactaaccaagcttgttgtgctatttcaccatatgatggacaagtagatgatgaatttctttactacattctattatttaaaagagatgaacttattaaaatgggagctggtggagcacaacctaatattagtcaacaaatcataaggaattatgtgatacctgttccccaaatccaagaacaacaaaaaatcgccaacattctctcatccgtcgacgaacaaattgaacaatacgaacagaaaaaagaaaaactccaacaacttaaaaaagggctcatgcaaaaactactaaccggcaaaatccgtgtgcaagtataatagaggaggcaaacagatgggaagctacttaggcaacgaagaaacgttagtcgagcttcccgctcttcactttttactatcgcaactagactatgaattcattcatggtgagaagttaacacctgaatatggagagcgggaatcgatcaacgatgtcatcttagaaaaaagattagaagcagccttaaaacgcctcaatccttggctcgatgagggaaatctcactaaagccatccgttatgtttctcggccggagcaattaggttctagcttactggagattaatgagaaactatatgaagcctttgtcaaccttacatatgccttagatcaagatttagatcacagcggaaagaagaagttccatactgtcaaattcttcgattgggaaaacattgaaaacaatgattttctagtcacccgccagtttgtcgttcaaggtccaaatgaaaagatcaaaccggacatggtgatctttgtcaatggcactcccgttgtcgtactggaatgtaagtcaccctttttagagaaatctcagaacgaaaatatcggcaaaagagaagcctatgagcaactcagtcgttatatggatcaacgtggttcccaaggattagaaggagctccacgtctcttttatactaacttttttactggcatcttaaataagtatcatgcatatgtcggaactatctcttctaaatatagccattatctagaatggaaagatccatatcctttccgcaaaaaagaaattgtcgatgtagagaatagtgggcaaaatctctttctacagggattactagaaaaacgtaatctactagatattatgcaaaactttattttatttgaaacagatgcagaatctagcatacgaatcaaaaagatttgtcggtatcagcagtttcgtgcggtaaataaggcgcttcaacgtctgatccatgggcgagatcaggtatcccgtggcggtgtcatctggcacacgcaaggctctggtaaatcactaaccatggtgtttttagcacgtaaaatccgccgtgttccagagttgtctgatgccaccattgtggttgtgacagaccgtgtcgacttagataaacaaatttatggaacgtttttacatacgctctcatccattacgacaccagttcgggctgaatcggtcgatgaaatgaaagagttgttgtccaaagcacagtcacaaattgtgatgacaacgatacataagtttcaagcggatcaagaagaaaaagaattgatcaaagatgagaaacaggcaaaatccttacaattggaaaaagagtttccgatcttaaccttaaagtcgaatgtcatcgtcttagcggatgaagcacatcgcagtcagtacaaaggctatgcaagaaatatgcgtaaaggtttgcctaatgcagcttttatcggatttacaggaacaccgattgaaaaagaggataagtccacccagcgtacatttggtggctatattgataagtactccattcaagaagcagttgaagatggagcaacagtacggattgtatatgaaggtcgtaagcctaagttgcacattaaaggggaaacattagaggaattgtttgatcaagcgtttaaagatcgaacagaggaagaaaaagaaatgattaaaaagaaatacgttaccaaacaaaccattgtcgaagcagacgaacgtattgaagagatcgccaaagatatgcttcaacattataaagaatggatttatccaaatggttttaaagcgcaagtcgtctgtgtctcccgtgaagcttgtgtaaagtactaccatgctttgaccaagcatatgaaagagatcatgggcgaagagttagaagtgaaaattatcttctctggtaaattgaatgatcagcctcatttaaaagcgcattttactacaaaaccagagcaagaaaatatcatcaagcaatttgtgaagccaataagtgaaagtaagttatgttttttaattgtaaaagatatgcttctaactggttttgatgctccaatcgagcaggttatgtatttagatcgtccattgaaagaacacaacctcctacaagccatcgcccgtgtaaaccgtacccatggagataaaaagaaatgcggttatgtggtggattactacggaatctcaaaccacttagacgaagcactgcaggtctttaataaagaggatcttggaacaccaatggagtcgttagatgggctatataagcagatgctctcttatcgggaagcagtcatggtaatgtttcatggtattaaaaaagatcagttagatgatttggtaaaaatattagaacctgaagataagcgtgcagagtttgaacttgcctataagcgatttgcaagtgcagttgaacaattgatgccaggaaaagtatcgacggatcatttaaatgatctcaagtggctatcctatatccgtgccgccgccaaagcacgttttcaaccagaaaaagaattagatatctcggattgtggagaaaaagttcgtaagttagtttcggatcatctaaaatctcatggggttgaacaatggattcaaccgattaccttatttgatcatgattacaacgccaagttacaatctttacagtcagatgaagcgattgcttcaagtatggagcataccatccgtcacgtgatttctgttaagatggatgataaccccgtttattacaccagtttactagaaaagttgcaaaggattctcgatgagaccaaacaaaactgggcagaacgaaagaaacggatggaagagtttatacaaaatgaggttgaaacaggagaaacggcggaagcagaagcactagggctaaacaacaaggagtatgcattttatgaggtggtgaaagctcacttgaatgtacctgaagaacagaaagcaggttcgaaaaccatcaataaagaagaacgtgcagaatatatcagtgaggaaatgatccatctatcgaaagaaatcgcccagaatgttgcagagattgtagaaacaaactatgtgattgactggacgactaattcaacgaaaactgctgatgtagaacgagccattttaatgatgctgaccaaaaagtacttccggcaaatcaacatgcaagttcgtaaacagcttactcaacctctcctacagttagcaaagaagcactacgctacaaaagactagaggagacattatgaagttagatgttcagtttggaacccgaaccattgactttaccgtggagtttcggaagagaaaaaccatggagatcgcagtcgaaccaccaaaacaagtacaagtgatagcacctgaaggtacacctatccccatcattaaacagaaagtgaaaagtcgtggttcatggattgtccaaaagctattttcctttaaagatatggagtaccaaaagcttcaccgtgaatttgtaaatggtgagtcctttatgtacttggggcgtaactattccttacagttgattttggatcaaactttgaaagagcctgtggtatcgctctatcgagggaagctttttgttaaaacacctaccaaagagcagagagtgattagagaggcgatgaagcagtggtaccggaggaagacattaaagaaagtaacagaacgagtgaaatattattcacatcacttcaaagtccaaccaactgccattaaagtaaaggagcaacagaagcgatgggctagttgcactgcaaatcatgaactgctattcaactggcgttgtgtgatggctccatcgcatgtgctggattatattgtagttcatgaaatgtgccatatgattcatatgaaccattcgcaagagttttgggatttagtagctttagttcttcctgactatgaaagaagaaaagagtggttgaagaactttggggtaaggttggacttgtgattttgtgtatttatatatttacatacctataacagaaggggtatgcctaaaaccccttctgttatatttcataggtaagagttctaagaaattagggggggtaataatgaaattagaagaatattttaagctatttatcaaaaatataagtttgaatataaaccgtatagaaaaaattgaaagtgcaatctctacatgggaggaaatctttcaagaagataatgaaattggcgaaagatttagggaattttatacacaagggtcatttgctactaccacagcggttcgcccaaacaatggtgatgaatttgatgtagatgcagttttattagtagaagtagaaaaaggggattctaaagattttttcaattggattgtcgaacgtatgaaaactaaagaaaaatataaaggtaaaattaaaccaaaagatcgatgtgtgagagttaactatgctggagatttccatgttgacattgtacctgctaaatctacttatggagattcaatttttattccttcaaaaaaagagggagagtgggtgaagactaatcctaaaggatttaaaaagtggttcgaccgtatgaacattcagcatgataggaagttgagtcctatagtgagaatactgaaacattggagggataagaatgttggagataaaatagcccctaaatcaatattactgactacactcgttggaaaatatatggttgaaaaaaattcttatgctgaaacattagtagctactttagagaatttaaataacaaattagaggagttaatgaataatcagaaagatgatgctacgcttgaagtatgtaatccatcactagaagatgagaatttagcacgagattgggatattaataaatgtcgagtatttaaagataagctgaagtcactccataaaaaagcattagaggctttagaagagcctaataaagaaaaaagtatagagaaatggcaaggaatctttgaaaagttcccttcacaattaatagaagaaggtgcaaagatggcggaacttattgcatctggttctgtttatgtaaattcacagggtgagttaaatattagccaacaaggtacccaaataaaaaagcatcgctttttcggagagagagaagacgatgaaaaaatttaaaccacaatatttgaacgaggttcagcaaaatcttaaaattaagtataaatatccttcttttaaacataaaaaaggatactgggttggtactctaaaaccaacccagtcatctccagagtatttgatcaaagttgtctatgattgctttacacctaatgtgtttattttgaaacctgaaattaaaaaagatgcacctcatcgatatccaaatggaactctttgtttgtactatccaaaagataatagctatgatggacgtacttttatagctgatacgattataccttggactgcagaatggctctacttttatgaaaaatggctggaagacgggatctggtggggacatgaagcacctcatagccttaaggactgaaataaatacagggaggcgataaagttgattgattgggatgagataaaaacaaacggatggaagactagaagggatagagaatttcgaattctttctattgatggaggtggtatgaaaggagttttccctgcgagatatctatcaaggattgaggaagaagtaccacaaccacttcatcagtattttgatttaattgctggaacatcaacaggtgggattattgcactagcagtaacttatggtttaactgcgaaagatatattggatctgtatcttgaaaaaggaaaagatatatttggacgaaagcgaattacgagaggttatttaaaacatgctaagtatgataacactggcttaatcaatgtgttaaaagaaaagtttaaagatgcacgtttaacaaaagctaattcaatggtatgtatacctgctattgaacatcacaaagcgaaacctaaagtctataagacacctcatcttccagtttattttgaggatggcaagctagaattctggaaaattgcattggcaacctctgcagcacctttttatcttccagcagcaaaagtcagtaatactgagtgtaagattgatggaggtctctgggctaataatccagttttagtagctattgcagaagcggttaaacttggatacccattagagcaaattaaaattctttctattggaaccggaaccaatatttatcaaattgataataaaaatgcagaatttggtggacttacatcatggagattaaatcttgtagaattcactatgcaatcccaatctaaaggcgcttttcatactgcaaattatttgataggtaataagcttcatcgcatcgattatgagactagcctaaaaatggctttagacacaactgaaaaggaatcacttaatcgacttattcatgaagccgatacagtatttcaagagacatttatgaaaggtaataatatttatacagagttctttagttaaagctaaagaggtaggattagctactcgagtgtttcaagatgacttttaaagaagtagtttatactaaactttttggtgtccgaaatattgatttagatccaaaatatatgttaaacacttgttaacctaaaaaacaagagatgagataatgagtgacaacaattgagtgggataagactacaattatttctgatgggatagtgtatataagatatgcatttaaggaaaatagatgataaatgaaagataagcttgtaccattctacatttttaataatccttcttaaaaagcctaatacttctggagattattaaagttgaggaaaaaggggataataccatcaatctgtacagggatatagttgttgtggatttgtagatgaagtaatttttggtgatatgatatggtaaaccacatcaaagggagggaatcaaatggcgaagaagtcgatgatagtgaagtcccaacgtcaaccgaaattcaaagtccgttcctatacacgttgtagacgttgtggtcgaccacattccgtattgcgcaagttcaatctctgtcgtatctgcttccgtgatctagcctataaggggcagattccaggtgtaaaaaaagcaagttggtagcatgagtataagagtaggttgcattggttgtcatgcaggtaagacgttttcacaatgtatggtgcacactggctttatcccatatggttgggaagattgcgacaccaaagttttgtatggagtaaatttttgatctaggtgtgtatatttatgggaataagttaggggattgcaaaaataatttgctaccgtgatggatacaattaagaaggaaatcaaagtttcttaatgaaatacgatatcatatgatccgctaagtacgggtttaacattagctccgctatagttccctaatgaaatacgatatcatatgatctcttgagcattccatagcagcggtatgttgctatagttccctaatgaaatacgatatcatatgatggacagcgtggcaactgtctcctgatagaggctatagttccctaatgaaatacgatatcatatgataaatctccagttggaactgcatctccaagagctatagttccctaatgaaatacgatatcatatgatacctttcccaaacctcttgtgaattctatatttataaggggtttccttctaaaaaacgaatgtgttagggtgcattttctttttctttcgtcgtttttttaaaaaaataagtacgaaatgaatggttgctattttaggatcgaattggtatactggtttatgatcatatcatatcgaactttgttaggttactatagtaagggcttttgacccgtggcgttggggatcgccaaaaactccccatttaaatttgtttaataaaaaaccactatcttatgatgaaagaaaattttcaatataagatagtggtttttttatacatatcggcttataacaatttgaaaaagggttaagttataattaattatgtatttaattgaatattttacttatggatcatagaagggagtattttatatgaaataccgaattggactagatattgggataagttcatgtggttgggcggttatcaacttagatcaggagcgtatcgaagatttgggtgtaagaattttcgataaagcagaaactggagatggagaacctttagccaaaccacgaagagatgcacgaggagcaaggagaagaaatcgtcggaaaaggcatcgtattgagagaattagagagttaattgttcgttctgatcttctgactcgtacagaaatggatcatttgtataatgattgttttgagctagatgtatgggaattgcgtgtagatgcattacaaagaaaactgagtaagaaggaatgggctcgtgttctgattcatttggcgcaacgtagaggatttaagtcaaatcgaaaaagtgaagaaagtaaaaaagaaaatggacccctactctccaatatcaatgaaaaccgccgaatcatggacgaaaatggctatcaaactattgcagaattgatggtgaatcacgagaaatttaaaaatcataaacgcaataaagcaggaagttatttaagtgtcgtgagccgtcaggatgttcatcaagaaatcgttactctttttgaatctcaacgagtacatcagaacccttgggcaacttctgagtttgaagaagcatatcttgaaatctggtcttcgcaaagaccttatgcttctaaggaacaaattgaaaaaatgattggcttttgtacattggaagagggagaaaaacgtgcaccaaaggcatccatttcattccaaaagtttatggctctgcaaaaaatcaatcatcttcgcttcgttggagttgacggaggcaggatgttgactcatgaagagcgcaattacatattacaaattgcctttacgaaaaaaacagtcaagtatcatgacatacgaaaacaactacaattggatgatcagattcgctttcgtgatctctattatgaagcttccaagtctgtacaagaagtagaaaaagcgaagtttctagagttgactgattatcatcgtctctactctacattaaaaaaattggttggcaagaatttaagtgatgaagtaaatgatttggattgggacacatttgcatatgccttaactatttttaaggatgatcaagatattcgagactatttaaaaaatgaatataaagatagtaaagggagacatcaggctaatctagctaatcaagtgtatccagatgaatggatcgatgaattaatcaagcttagcttttcaaaggtaggacatttatcatttgtagctatacgaaaagttctaccttatctagagcaaggatacacctatgataaagcatgtgagctagccggatatcaatttcaagggaatgcctcgtcagtgaagaaacgactcctacctgccattcctcttattggtaatcctgttgttcaacgtgccttatcgcaaacaagaaaggtaattaatgctattattaaacgctatggctcacctgtctccattcatatcgaaacatcaagagaattacctaaaaggtttgatgagcgtaaaaaaattcaaaaggaacatgaagaaaatagaaaaatgaatgaaacagcacgaaagagactgaaagagttaggtattaatgatccaagaggacaagacattgttaaatataaactgtggcagcaacaaaatggatggtgcatgtattcaaataagtacatagaacctaacatattatgtgagattggttgcaccgaggtagaccacatattgccatttagtagaagcttggatgacagttataacaataaggtattggttttagctagagaaaatcaaaataaaggaagtaagactccttttgaatatttgggtggagatgaatcaaagtggaatgaattcgtaaaaagagtagaaaataatagtaagatcaataaagtaaagaagagaaatcttctacgtaagcattttaatgaaagagagcaacaagaatttcgcgagcgcaatttaattgatacccaatacatttcaagatttatgtccaactttattcgacaaaatctactttttgccgatgatcctatcaagaaaaaagtagtgactgtgaacggaaaggtaacggcacatctacgtagtcgttggggattcaataagaatcgagcggaaagcgatttgcatcacgcagttgatgccgtcattgttggggtaacatctgatcatatgattcagcttgtgaaccggtattatcaacaatgtgaagaagataaattttatatcaaaaggaataaaatcgacttccctgaaccttggcataactttagattagagttagaagcaagaatatcccaaagtccccaaatgagcataaagagtttaaatcatgggaattatgatgaggaaatgattaaaaaagtaagacctatttttgtatcgaggatgcctaggagaagtgtaacaggtgaagcacatcaaaagacgatccgtaagttcgtaggctattcggagaatggattgatacttacggctataaagacaccattaacaaagattacattggataaaaacggggaattcccaatgtatggaaaagaaagcgatccagcaacatatcaagccattaaagcaaggttattggaatttaataatgatccgaaaaaggcatttgaaaagcccttacataagcctactaaatcagggaaattagggccggtcattaaatcagtcaaaatcttagataaacaaagagtagtacgtcccataaatcaaaaaagaggagtcgtttataactctaaaatcattcgtacagatgttttcttcaaagatggaaaatattatttaattccgatttataccatcgatacaaccaaagatggattaccaaataaagcaattactgcaggtaaaccttatgcagaatgggtagaaatcgacgatacatttgaatttcgattcagtttatttccaaatgatttagtaagggtagtacccagaatcaatgtgaaagttaaggagatagctacaggagcaaaaacaaagctcaaagagtttattggctattataaaagtgttgatatttcaactgcaggaatctaccttatttcacatgatagagtgtatgaatctgaaaaaattggatcaaaaaccttggtagaattcgaaaaatatcaagttgatatattgggtaactataccaaagtaaaaggagagaaacgacttgggctggcgacacgtcatgatcaccaataaagctaagttgtcagtaagaaacaaccaattggtgattatacaagatgaagaagtaaaaattcctttagaagatattgcaacggttcttctagaagagaatgcatccgttattacagggtttgcattaagtaaatttagtgaatataacattgctctttttacctgtaatcaaaaacatctacctaatggagtattgcacggctttcaaacacattctagacagttaagcgtattgcaacggcaatacgctttatctaaaccttttaaaaaacgaatttggcaacggattattatacaaaagttattaaatcaagcagagtgcttatcaattttgggaaagagtggatatgatgaattgattcaaataagtaaaaaagtggattctggagatactaccaatcgagaagcttatggagcacaaatatacttcaaatatctatttgatgggaaatttcatcggcgacaggaaaatacagtaaatattgctttgaattatggatattccatcataagaggagcagtagctagagccttggttagttatggcttcactccttgccttggaattatgcacagtaatgatttgaataattttaatttggcagatgactttatggaggtgtatcgtccgatggctgatttatgtgtcaaaatgtatgtagatgaagagatggaattcagtaaagaaattcgagcacagttgtataatctgcttaattataatgtcttgtttcatgaagagaaatatagcatttatcgatctattgaagaaatgattaaaagctttgttactgcatgtaggcatgatgattttaatcaattaaagcttcctcagcttttacctttaacacttcataaatatgagtaaatttatgagaattctagttttctttgatttgccagtagctaggaagtcagacagaaagcagtatgcaaagtttagaaagtatcttctgaatgatgggtatgatatgattcagtattcggtctattgccgaatttgtaatggaaatgatgggatgcaaaaatatctagaacgtttaaatcgtaatttaccaccgaagggatccgtacgtgtactaactattacagataaacaatatgcaaggatgaaattactggttggactacccactcccacagagaaaaaattaaattcgacacagctttcgcttttctaaaaaagagaaaaatgataagggagtgatggctaaaaacttgttttttaaaaagaaaatcccctgtaaatataggattcacaagggatttcgaaaaggtatcatatcatatcgaacttcgttagggaactatagcttaccacctaaaacacataaattttttacaatcatatcatatcgaacttcgttagggaactatagcctccagttcgttctggtaatagaacaaatcatcatatcatatcgaacttcgttagggaactatagcgattagagaggcgaatagttaaatcttgaaatcatatcatatcgaacttcgttagggaactatagcctagaatgcgatatgcttctgatggaaagtatcatatcatatcgaacttcgttagggaactatagcttcagactgtgagggtttgttttttttgttatcatatcatatcgaacttcgttagggaactatagcggattacctaaatcatttgctaaaaatacatcatatcatatcgaacttcgttagggaactatagcgtgttaaagtcgtaagtttcgggcgcatcgatcatatcatatcgaacttcgttagggaactatagcaaaatatttgacaatccatttgaccctaaaatcatatcatatcgaacttcattagggaactatagcatcacaaacagttgtatcttattattaatgtatcacttctattcctgttttcttaaaacatctaatgtagcttctagttgggctataataagcactttcttgtcttcgggtatgggcttgccatttaaggtaagctcttttactttaagtacttctatgatctcttccatagcgagatttcgattattttggttgcttagacctgatacctcatttattgcttttcggagatcggtttctgcgcttgtaaggttatctactcgaccggttaaatagtctagagtaacttggaagaagtcagctattttatgaagtgttttaaggtcaggctctcttgagcctaactcataatttgaaatctgtcctcttgtaaagccaagtttattagcaagctcgtattgacttagtttattttctttccttaatttaattaaccgttctttaaacattttttatctccctaaggtcttaaattaattatagaaacttagtgtttctagttcaaggaaacgaaaagttgcaaaaaatattgacagaaacgaaatgttacaataatatatgcgtaaaattgcaacataacgttgcataacctctttagccgctcatcgttttcgatcttacacaaaagcgattcgcattctagaaatgatctagatttttggctcgaattatgcaacatgctgtacttaatagagtgcggaaattcggaatagaataggcataaaaaagcaccagctaggtgcgattacttgacacgctttatctttctcaactctgtttcttgttcgatagagcgcaaagcgagagttttaagagattcttcttgacgctgctgactttccgtaataaccgaaatcctttctgaattttgtacaacttgttcgaggatggttgcttgtttcttttcgatgcgttctgtcgtgggaactaaatggcttacatgctgatttaaggattcaagctcttgtttcgtgtttgcttcaaagtgtgtcatacgttgatttaaggattcaagttcttgtttcgtgtttgtttcaaagttagacatacgctggtctatagattcaagttcttgtttcgtggccatgttcgtttcaatgttggtcacacgttgatttagtgattttagttcactcagaatttgttcaagcaattgatcactcatgtgaatcatcctttcaatcgagtttgcaggtaatggttaagagcacgacgctcttcagatggtaactttttaagagcttccatgagttgtatgagatcaggtggaagttgattgtcgttagtagcaaagaagtctgaaagagtaatgcctaatacagagcaaattttatcgatgttttccaacgaacattttttattcccattttctatagctgaaataaaagattgagatacatctagagctaaagctaactctttggcactaatatttcgctgtattctcaactcttttatacgagatccaatgtgaatcataaaaaatcacccttagttacttataggttaatgataacacaagatgagtaagattaattcacgataaattaaccaatgggtaaatttataattgacttaaattaacctatagatttataatgagtttgtggaggtaaactaagttgttccagttattgcgaaattaaaaaaccgagaggatcgttttgtaaaatacgatcgaaaaattgctaagagaaagaaagtagctcgaaatatattcataacatttgtaatagatagtcaaatattaaaacgagaaggagattagctttattcctttgagtaacacatcaagaggtcgattcagtcaaaaatggctctcttctttattaacagccttaataggtcagatatgagttgataaagtgtccatatctttaaagtaatttagaaggctcgtacacctgtccatattgcatagatttatttgtaagacctatgaaaaggcaggggaaatattatgaaaaaaggacgtcggctaaataaaagagtgaagccaaagcttgggaaagaaacttttggagataaaccgattgaacaggcattttatgaagcgttttctcctttttttcaatctggtagtagtctgcaaaaggaattgttttcatcttcaaaaggaggtgatagcgttgcgcattcggatctacggctttatagagaaaagagtgccaaaagtttggatatatgttgatggaaagcttgctggacatttgactttaaaagcctatgcccaacttctaaatcaaaagctcgcttctctggcgaaagaagcgagctctaaaaaagcttaacagtaaagttattctaccaaacatttagtaaaaagcaaagcgaaacccgttcattttatacaaaaaatgtatctagattaggtagagcagggtctagtcacgctgtggcaattgctaagggtgaaggttgataaggttaggaagtatattggacaagcagggaacccaccattccctgcttctagttagaggaggatgaaagatgggagtttactttaatatcaatccaccaaaatattgctgtcattgtggttggtcagtaaatccgaggaggaaagactttaagagacatcgatcaatgacctgctatcaatgtggatgtggctttgtacatattcaacggaatcagatagagaagtcggtattaagagaatttaacctatttcatccagaagaaattgaatagatcacttagattataagggggaagattgcaatggcaaatccacagccggatcactacaccaagttaaataatgaactttatgaagccataatgcagacagacttttcaaagcggcaacgaaacatattggatctcgtcatccgaatgagctatggatgtggcaagaaggtcgctttgctacgtccctccgattttgagctggttggcgttttaaggacgcatataaaaaaagagttagattatctatcagaggtaaaagtattgctgatcgatggtgaacagatccagatcaacaaaaattatgaccagtggcgtgttagcttagtaaaacgttttagtaaacagaagtatatggagttgttgaaaagaaatttgccctctggaccagttactaaaaccgtaacatcagaaggagatttcgattcccaaaaaagtaacgctagttaccaaaatggtaactctttagtgtatgaaagttaccaaaacagtaacacctcagttactattttggtaaccgatacaagcgatgatcccaatagtaccaatggatttaagcctcctaaagaaaataataaagaaaataataataatgatgatgatagatggagtgatctttcacaaagtgagccatcaaaagaagatagacaagcccagcaaatagaacgctattacttgaagaaaaaacagcgaaaagctccgctgtctgcaaaagactaccaagcgattgatgaattggttactaagcaagtaccattggatcggatcaaaaaagcggtggatcatgcctttgaaatcaaaggggttgatggtgttcattcgtttaattactgtgcaacgattctctggaattggatcaatgaagaaaaaaggagagatcagcatcatgcaaaaaacaatcagcgttatggatcaaatcagcgagagaatccagcgaatgaaagcattacaggcggcaaagtcggatggctcaacatgcccaaatggcttgaggaaaagccagcccatttatcaatgcactaaatgccaagatcaagaaggatatattgcacgagataaaaatggctatgaagtttggtgttggtgcgagtgtcatgtgcaaaggagagtggagaggctatttaaatacagtcggatcactaatgaatttcgtagactatcatttgagtcgttcatccttgatggcagaccccaacccgtaaaaaatgcgttcgcatgtgccaaagcttatctggaatatttctcacgactacgatcagggaggaataatagcattgctttactagggaagtcgggtagtggaaaaacgcatcttctgattgcagtggctaatagtctattaagccaaggtgttggggttctctactttccttggatagaaggcatgaatgatctaaaaagtaactttgaggtaatcagtgataaagtgcagcagttaaagcaagttgaggttttatttatcgatgatctatttaaagggcgaaaaacagtaaccgatttccaacttgaacagctatttgacatgattaattaccgctatttaaatcatcttccgatcatggtctcatccgaaaaagatattgatcaactatgtaccattgatgaagcgatcggatcgcggatttatgagatgtgtaaagactttacagtgattctaaaaggtgataaaagtctgaattaccggattgcagggaagttataaggagtgaaggcaggctagtacctattgatatagcagttagggaaagtatccgcctccatatgacaaaacgtcggcttacctagttttagatatacacattgaagttaaactacctatttttatctgtatacaaacgtaatagcttttccgttgagggaaatgcaagctgactccaaggaatttcatcaaaatagaaaaaataaccttttttgctttcaatgttaacgataacctcttcatgatcagcaatcgcttcgtaggtcaattggataagcccatccttaggataagagaatgtattaataattttataaacttctatagaaagacctgtttcttcttttacttcattttgtatggtttcaaaaagatcatgtccacgttcaacatatcctcctggaagtgcccataagcctttcccaggttcttcgtttctttgcagaagtaatactttgtttttttctttatttagaaccactgccactactgccagttttggatctaagtagaagacaaattgacaatgatgacaaaggagttgaggttgattgggaatatgcaagtcttctagggaaaaacgatgtccgcaacgcgggcaaaattttaaatcctcttttttatatctccactgatattgaaattgacactcccacggctgaagccgatgggattcttggatagttagcgttcgcagtccgtttccgttttgaacaactcccaagttcaggggtgtgtcatcaccccgtcccatgcagttagaaatgtacccacataggcggaacgcctattaccagcgttctagttccttttcactcactctcatgattttccctagtgggagagacttgttcgccactagaaccccataccatgacgtacataggaacaaaacctactataagtaggatgagcaccgctcatgtattcgattatacagaaaattgttgctctaagcaatcccaaaaagggattaccgagcaacgcagtctttcatcctacgattgaaaccgtgggctttcagcccgcaatacctgtaaagctctttgttcattgttaaatctccttaacaagatataagattaaacccacgaaagaacgggttaataaaagtataaccgctggaattcaagaacgctatccagaaatgtgagagtttcgaatagatgttataatacacccaattcggtaaaaacatagccttagaggaggattggctatggatcaatggcaagatcatcaagaattcactatagacttagataaaaaatggtttgttagtatgatatcgagttattcataaaaccgatttactgagaattgccgggtggattggctttatggatatagcttaaatcactgctcgacttgatattcaattaagaataatgtaatctcttagtaagaggtttcgttgctttgcgaacaccatgagcttcggaaaaatcccaaggggtgttcggaaatgcgaaagcccttgatatgtaaaggatagataaattatcagacagctcttattagctaaaatttgcatgaaacagccaaaaatggcgaggtgatcggaaatgagcttacaaagctagacataacaaggtttccagacatccgctataacaataaaaaacacctcattaagaggattgaaacgaaaatctacaagtacaaaacgcaggactaataattaataacaataaaaaacacctcattaagaggattgaaactttgctacttgctctgcatcaacttcctttaaaacaataacaataaaaaacacctcatcaagagaattgaaacattgtagcgcctattgctatctttccgtcttgctcgtactcgctgatatatctgatctaaatagactttgtgacataatttttattgtgaagctacattaaaaaagcttatttttctgtagtgctcgtaaatgagcttgaaagtccttttgtgacaaggaattgaaagctctacacttaaaatagagttgagtctattatgaaattgaaacctagttttattacctaaagtaatggtggacacatccaagataaactaaataaaaacaatcaaaacccatctgtatggttagatgggctttgattgtttttaaataattactataatggaacgaaattcaatgatatccatatttatggtatttgtatgaaagtcaaatacgctatgtatgtacgggtttcaacggatcaggatgagcaagtatcctccgttgaaaatcaaattgtcatatgtcaaaactggttagaacggaatggatataaatgggatgagcatgcgatttataaagatcatgacactagtgggactttgtttttggagctcccagcaaagcctgaactaccggattgcagaagcaaagtaggctagttcctggttgatggaaaaccaaactgatgaatcgtttagagttctattgatttacttagtattctgttcacgtttctaatcgtcatttcatagtaaggacgatttgctaacataagttttgatacttcatgatggggtccataacgatctaaaacatcttgtactcggtcttggaatgtgatgggctgaccagtagaagaagtatgtagatcacaaaatgtaaccagatcaataaatagcagatccagttgatccaacagagtatagttaatttcatatagctctatcaaatcgttacgtgtttttttcaccatttcaaaggcacaagaatgaaaaaggatggaggctacaactggttttaagaatccttttttggaagcaaaaatggctccatcgaggggatgaaaatcgtatttgatgaagtttggagaatagccaatatcatgtaaataacaagcctgtaaaagaagaggtttccagtcataagggacatttagccttggaaggaggttttccatgtactgaacaacccctaatatgtgttgatatcgagcggattcagtaggaatgaattgagaaagccattttctttcgaaaccaattgaattggattgtgaattatcaagtagattcatcgtatagcttatactcctttaaaaaaattttgctatgaaaatactcgggagtaaattaaaataccatatggataatcacatgctattctgtatgtttaaatatcatatatgtattcaaattcatataaggaagcattgcagataaatcggctatactcaaaaaggatttcctcttcttcctctttaaagcttccccagatccaacgatacatttctacaacaggctgatttctggcaatatttaaaatagatgcttcttcggcagtaggcattcggcattttaagcgttctttggtacgtgaaggataaaacgctttcgtttttctaagccatttaaaaaatggaacatagtttttatcccatcttagtaagggaaaatgttgttgatcctgttcgtgcatttccttaagcaaagatgcaagataataactatccataatccggtaaggaatccgatctacaatctgaacacgatatctacgaaagacctccacatttggattaatgtttaatttctttgcaatttctacactagccggaataattacagatggttccagaaaacgtactaaaacttctcttccttttctttgtaagatctccatgtaagaatctgaccgctgaagttcaagcccttcaagcgttggaaggttggaacaacctaaaatttctattggagtattcgagcgtacaaagacccctccacgaggcacaatatcgatcaaattttctgcttgaagtcgaagaag

SEQ ID NO: 1789 - DNA, 23151 bp, synthetic construct
  source 1..23151: mol_type = other DNA
  misc_feature 1..23151: note = Synthetic
ggaaaaagtgttcatgataatggctggggtatgttcactactttcttagaatacaagctaaaagaacaagggaaacaacttgtaaaaatcgataagtggttcccttctactaagaaatgttcttgttgtggcaaggaaaaagaaatgccattatctaaacgtgtatatgaatgttcttgcggttttgtattagatcgtgatcacaattcagcaatcaatatcaaaaatgaaggattacgcatattagcataaagaataataactttcggaacgagagggtaagctcggtcaatttcttatcgttagataggattacccgagaagcccccacttcaagcgacccgcaagggtggtaagtggagggtagttcacatggaaatagtttataaatacaatgaaccggtaaaagcggaagacgttatacaagtatttaggaatagtggcatcactcgcccgattggccaaaaagagcggattcagaagatgttggatcatgccaatcttattctgacggcttgggaccataatagattggttggaatagcccgcgcattaacggatttcagttattgttgctacctctctgacttggctgtcgataaagattatcaaaaaagagggattggcaaggaactcatagagaggataaggaaaattatcggtgaagaggtcgccctcatcctgttatcggcaccaagtgcaatggattattatccaaaagttggttttgataaggttgataatggttttattattcgccgtaagcgttgatggctgtgattttgtttgtaaaaatccacaagatcatttaatacggctttatcaaaaataaaagctgatttattcagcccgacagcccgaagctgcaccttgaaaagctttatgtcatccagtcaactacaaaaaagagggcgctcgatagtgcatccaacggattgacattagagcctttcattcattcaatattatgatctggattaaaagtaatctaagtttataagtgttgattttttaatgaacaaaaagaattgacctaaattacggtcagttcttttttcataatagatttaattacttttcttttttattaggtaactggtaaacaaagaagtatagtatttccactattatcccaagtgcgaattagaatatggctatgtacaagacgcctagattgcttgctgacaacttctcggagaacagtgtgtaaatagcggcaaataaccaacataaagtgaatgtgaaagcatatttaacaactgtagataagaacttatttttaatttcatttaaatttttagacaatagttctgcaacgaaaaaaaatgcggtcacataaccgataaaattcaggatgaaccataaatttcctatgaatcctccattttcaatgttcacttcaggaagggaatttaaaaatttaaaaccaaagaaaaatattgaaaccggtattgataaaatgactagacaaaggattgcgacaagtataatggcaattatggcatcgccatatttttttcttattgctcattttaagctcctatcctacaaatagttacagtattgtaatgattatacatttgatctatgttaaaacaaaagtatattccatctttcagcattgacgagattgttgacgaaaatagtcagcaatcttcatttttgcacagaaactacgaatttcaaaaaatggaaaaagcaacttttaatactattatcgatcgtagattgtcagccttgacaggatagggggcgctgttttgagaccaaacggaatggcgaactgtcagaatgttatggacccaacgattctggcgctttcctttgtgttgatattgtccaaaaggtagcgctttttataaaatgtgatccgcattcttttctcatctagatggtattttttagtgtgaagtacggaatcaaagtgaaggggcttttttggaaatgtttattgttcataatgaaaaatttatctttataatgaataaaccaattaattgacacaatcgacatgttgtatttataatgcttacaacgacgatggagggacaatcatgaagagaatcagcagccgtttttcggtagcggtacacatcttgttgttggtgcatcggtttcctatgcttacttctgaagaaattgcaggcagtgtcaatacaaatccagctttcattcgaaaaatccaatcgaaattaaaaaaagcgggattgattgatgtgcggcccggtgtgggtggcacttatcttttaaaggatgtcgatgacattacgttgctggatgtttatcatgctgttgaggtagtagaacagaatgaactgtttcattttcacgaacatcctaatccgaattgtgaagtcggagcgcatgtggaatcggtttttcgttcccatgtaaggaaagcccaattagccatggaaaaagaactggcacgaaccactttaaaggaattaacggaagaactggggaaaaaaattagcgctgattcatgctaataatagtgatcggcggcgcaggcagcttatatgtagatgaagaaaaaacaactccattatacaaaactcctgatttcccggactttatttatcctactgctgaaaacgcagcgaaaagtttggaaattttgcagcaaacggattctattaaatggacgtttatcagcccggctgctgaatttgactatgaagggaaaagaacaggcagctatcaaaaaggaaaagatcatttgattttcaattccaaaggaaaaagttatgtaagttatgctgattttgccattgcgcttgtagatgaaattgaaaatccgcaacatatcaatgaaagatttacagtagtttcggaatctgaataatcagggtaaacgtttgcagtgtctgcgttgaaatttgaagtttggaaatagacaatcgatcatcattaaagagtctgtctcaacaaaggacaggctcctatttgcatttctctcctcgatgcacatcaatcaagccaagcaccaattcctcaagagaagcatacaaatgcaaaaaataaatggaagaatgggcagaccacaagcaaatgacaatggacagagaatgaaagcgggagaatggccgtaaatggtcgactggtggtgctattgctgttttgttttttaatcccgatcaagaaagtccgctgtgatgataggctcccctattcattgcaagtgcccttgtcattcagaccactcgaattccaatctcgatgatgttgatttgatcaaaaatttgaaataggcgctctttcgaaaaagattcatgacaatttcatacatgcggaccatacgaatgtcgaaaaataatagcaactggctttcgtgaatgggggaacagcaaaaaatttgtcgtttaatctacctgttagaagggtatagaaaaaggggaggtgttgttgttgattgaatttaagaatgtaacaaagaagtatgaggacggttttgtcgccattaaaaaccttaacttgaccgttcatgaccacgaattgtttgtgttgattggtcctagcggcagcgggaaaacgacgacgatgaaaatgatgaatcgtttgattgagcctacaagcggtgagattttcatcaatggcgaaaacattgcaaagaaaaatccggtgaagctgaggagaaatattggctatgtcattcagcaaatcggattaatgccgcatatgaccattcgcgaaaatgtagctctcgttccaaagctaaaaaaatgggacgaaaaacgctacatgaaaaaagtggatgaattaattgaaatggttggtttagatcctaaggaagtgggggaccgttatccggatgaattatcgggcgggcagcaacaaagaattggtgtaatacgggcattggctgccgatcctgaagtgattttaatggatgaaccgttcagcgccctcgatccaatcagtcgtgaacaattgcaagaggagctgaccagacttcagcaagaattaaaaaaaacgattgtctttgtgacccacgacatggatgaagcgatcaaaatcggggatcgcatctgtctcatgaaagatggagaaattgttcaattagatcggccggaggtcattttacgccaccctgccaatgaatttgtccgccaatttattggagaggaacgtttgcaagatgcctctaatatacctgatttagaagaattgatgattccgcccattacagcttatccgacaagaggattagcggaagcgttaaaatatatgcgcaacaaacgggtagaccatttggtgatagtcgatcgatacaatcaatattacggcgtcgtgaacatttgggatatgagaaaagcttataaagatgaacaattgcatcttattgatatcgttcagaaagacttccctactttgaaaacaagcgattctccagaaaaagcactgcaaatggtgaacgaatccaaaacgggatttgtgcctgttttagatgaaaaaaataaagtgaaagggatcataaatcgctcaagcattgtcagttatgttgtcagtcaattggcgatgaataaaggagagtgatttacatttataatctatggaaagaaactgtcaatgtattttcgaataaatggaatgagattggaaaactgttgtttgagcatatctatttgtcgtttgtggcgattgcgattgccattgtcatagcggtaccgcttgggatttatttaacgagacacaagaaattagcagatcccattattggcatagcttcagccgttcaaaccataccaagtctagctttgttagtatttttagttccttttattggaacgggaaagctgcccgccattgtagcattaacgatatatgggcttcttcccattcttcgcaatacgtatttaggaatattaggtgtagatcgcagcaccgttgaagctggtattggtatgggaatgaccaatagacaagtattatggatcgtggaattgccgttagcactgaatgtcattatgggaggaatccgtacagcgtccgtattggttatcggagtggcaacgatggccggtttaattggtgctggtggattaggcgatttcatctttagaggactgcaaacctataattcagcccttattttggcaggtgccattccttcagctattcttgcgattgtttttgaccaaattttgaagcgaattgaaaattgggcgaaaccgggaacaagaagaaaaaaatggcccagaagtgttcggatttctttactttccgctataatccttgcgatagcaggcatttcaggatatggaatttatcaatcaaaacagagagaaaatacgattgtcattacggggaaaagcttcacagaacaagaaattttagtccatatatatggtaaattgattgaagatcgtacgaaactacatgttcagtaccaatcttttcttagcggaacggtgccggtatttgaaggaatgcgaaagggcgattatgatttagctgttgaatacactggaactggtttgatgaacatcctaaaagaaaaaatccatacaacagatccaaatgaagtctatcatcatgtaaaacaacagtatgagaaaaagtatcatttaatctggttaaaaccaattggatttaataatacgtattcacttaccattcgcaatgaggatgcgaaaaaatggaatgtaaaaaccatttcggatcttgcgaaaaaagcaccccaattaactcttgcttccgatcctgaatttttagaacgaaaagatggatatcctggtttacaaaagaaatatggaattcattttaagaaaacgtcgacgatggatccgggaattatgtatagtgcattaaaaaatcataaagtagatgtgattgatgcctatacaacagacggacgcataccagctttccatttatatgtgctaaaagacgataagcatcaatttcctccttataatgcagcaccggttatacgcgaagaagtgctgaaaaaacatccggaattggaaaaagtgattaatttacttgcaggaaagatcacaaatgaaaaaatgcagcagttaaatgcagaagtcgatttgaaaaagaaagattatgatgacgtggctgaacaatttttaaaggaggaggggttaattcaaaagtaatcctcttaatgagaaaaaatgtagagaggaatgaaaatggggccctctcataagtcggttaaaccggcttatgagagggccttttaagttgattcacaactggataaaaaatgctataaaattagagactaaattgtattgggaagcttttcacgccaaatacaaatggactttgaatgggctcaagttctgtatgttttgctagttctagtttagagaaagtggttaataatacagaaagagcaacttttgcttccagtcgagctaaaggagcgcctaaacaaaaatggatgccatatccaaaacctaaatgtggatttgggtggcgttccagcataaaacgatccggttgttcaaacttttgctcatcccgattagctgccgctacccagctaatcacttgagatcccttgcgaatcgtatggcctccaatttcgacatctgccgtcgcagtacgtccaattgcttggattggaggatagaatcgaagagtttcttcaattaagttgggaaccaaagaaagattttttcggactgtttcttgagtatttgtatcttctaccatatatcgaacagcattcacaatgagattcgttgtcgtttcattacccgcgactaataataaaatacagaatccgagcaactcttcttcttttagtctttctccgtccacttctgctgccaataataaagaaattaaatcatcttttgggtttttttgtcgctcctgtatgatttctttaaaatagtcattcagaaacttggctccttcacgtcttcttttcatcatcatattgaaggcctcgtccgaatcatcctcggctccagacacaagaatatcagaatagtttttaaaaagttccctatattttgccggaactcccaataattccgcaatgataatgacgggaagcggagcggcaaaatcatgaatcatttccaatgtttctttttcctttgcttggtccaacagggaggttgtaacgtcctgaattcgttgagagagctcgttgacagctttgggagtaaacgttttattaataagatttctcatttttgtgtgtttaggcggatccattatcaatatactgtttcttttgtcgccgatcccacgattagatgaaaataatgttggattttttaagatgaaatgaacatcttcgtatcgaaatacatcccaacattctcgaatagggtcatatcttaccgtgttgttcttcgcaaagtgttataaatagtaaaaggaaacaactgatcttgtatagattgaatctctttcataggaatcagatttgcgtaacgttttgtttcgtaggtggttttctttgcagtggtcatgatttcatctctcctttagtttttatcgggaaatatttgccagtaatgtttttcctttttaccataacattctaaaaaattactcaacagacatattatgtaaaaaatgtcaatcaatcaaaatgcctaaaaatttgattttgatccatatctcctattggtctttttgcttaccatggtggaggttggttccatttgcataacgtttttggcgcttttttgcgttccaactaaaatctatcaagttgaactactataaatatagttagtacatatgacagccaataaaggaaggaaaaagaggatttacttgaaatgtaatatagaagttgagggattttaaaaacgaaagatatataatgaaacttttattcagcggtatgaaggaatgaatataatctcatcttaatagtcgtagttttacttaaataaagagcttcttggtttctttaattggaaacgtcggagtcgggaacacgggcaagaatgatcatgccaatgatgaagagaataaaaaggctaaacacacctgcattggtgtttcctgtgagctgtgctgtgaaactgactaataatggacctaaaatagaagcaaactttccgaagatgttataaaatccgaaaaattcattggcgttctttttgggaacaagcttcgcaaaatatgagcgacttaacgattgaatgcctccttgagagctcgcaacaagcatcgctaatatccagaagtccaacgttgtttttaagaagtaggcatagatgcaaacgatgatatagacgaaaatgcctgcataaagcatctttttctctgtgaatttttcggccaatctcccgaacagaatggcaaacggagcagcaacgacttgggtgacaaacaaaatcactaacagatcggaagaacggatgcctaaatccgttccatacgctgtggacatcgtaatgacggtaccgacaccgtcaatatagaaaaaatacgcgagtaagaataaaaacagagtgcggtactttttgatttcttttagtgttttcagaagccgtttaaagctctctgcaatgggattcgcttcacgttgaatataaaagcgctgccggacgtttcgaaacatcggtatggtgaataatccccaccagatggcggtcataaggaaggctattttgcttgcagatgcggtggaaagcggaattattttactttgagctaaaataatgatcgcaatgattgcgataaacgggattgtgctgccgatatagccaaagctaaagccgcgagcagatacacgattcatgcgtttatctgtggttacgtcgacaagaaaagcatcataaaacacagtggccccgttcgatccgatggcagacatggtataaatgattaacaagataagccattgatcacttgggataaaagccaataaagccgtaaaggatacacctagggcaaaaaagaacgcaaaaaaccgtttcttcaatccttgataatcggcaatggtccctaaaataggccctaacatggctaaaataaaggtgaaaatggagatggtatagcctaagtaagccgtagaatcagcagcgctgaccccggcattttgggcagccgctttataatataaaggaaagacagctgtcgtaataataagagaataagcagagtttgcccaatcatagaaaacccagctgttctcttcttttgtaaactgtttcattatttttccccctacaatacacgccttatttcacattttacttgaaaattcgtttgaaaagacataatatttaaaatttaacattctttacaaaaaaataaattttttaagttgggattctcctgtgtcgctgacaaaatgtaaaaaaaacttcaatgtaattgttatcaatggaatataattctaacctttgagatgtgactattgccttacatcgtagagatgtcaatgttattccaggaatatacagtaaaaaaacagatttctctaaaacatacttattttaatggaactgtctacttcccaaatgaaaaagagaatgtgccgaaagtagttatgttatggcggtaagaaaaagaaatacggaattcttaaattttttgaatgatgatattaaaatttcgagaaacaggtaaattagaacagattcaaaaaaatatctaggaaaacgaaactagaactaataacccatgaaaatagaaaaatttaaactttattattgaattttccaattaaatgatttactatgaaattaagatcatatcacagcaatgatcttagggttactatgataagggctttctactttaggggtagagatgtcccgcggcgttggggatcgcctattgcccttaaagggcactccccattttaatttctatgcaaacctagaccttagcgaaagtgctgaggtcttttttatttcatcattttaaagggagagggaatttctatgaattataaaatgggtctagacattgggatcgcatccgtcggctgggcagtgattaaccttgacctgaaaagaattgaagatttaggagttcgtattttcgataaagctgagcaccctcaaaatggggaatcattagcgctccctcgccgtattgcccgttctgcaagacggcgccttcgccgtagaaaacatcggctcgagcgcattcgccgcctgctcgttagcgaaaacgttttaacaaaagaagagatgaatttactatttaaacaaaaaaagcaaatagatgtatggcagttacgcgtcgatgcattggaacgaaaactaaataatgatgaacttgcacgcgtgctcctgcacttagcgaaacgaagaggatttaaatccaatcgaaaaagtgagcgcaacagtaaagaaagcagtgaatttcttaaaaatatagaagaaaatcagagcattttggcacaatatcgctcagtaggtgaaatgattgtgaaagacagcaaatttgcttatcataaacgcaacaagttggatagttattcaaatatgattgctagagatgaccttgaacgggaaatcaaactcatttttgaaaaacagcgggaatttaacaatcctgtttgcactgaaagattggaggaaaagtatttaaacatatggtcgtcgcaaagaccttttgcttctaaagaggatattgaaaagaaagtgggattttgtacatttgaaccaaaagaaaagcgtgctccaaaagcaacgtatacattccaatcttttattgtttgggaacatatcaacaaattgcgtttagtttctccagacgaaacaagagctttgacagaaatagagcgcaaccttttgtataaacaggccttttcgaaaaataaaatgacttactatgatatccgtaagttgctgaatctatctgacgatatacattttaaaggacttctttacgatccgaagagttctttaaagcaaattgaaaacattcgttttttagagctggattcttatcataaaattcgtaaatgtattgagaatgtttacgggaaagatggcatacggatgtttaacgaaaccgatattgatacatttggttatgcgctcacaatctttaaagatgacgaagatattgttgcatacttacaaaacgaatatataacaaaaaatgggaaaagagtgagcaatcttgctaataaagtatatgataagtcgctaattgatgaacttcttaatttatctttttcaaaatttgctcacctttccatgaaagcaattcgaaacatactgccttacatggaacaaggggaaatttattcaaaagcatgtgaattagcaggatacaatttcactggacctaagaaaaaagaaaaggctttattattacctgttattccaaacattgcaaaccctgtcgtaatgagagctttgacacaatcacgtaaagttgttaatgcgatcattaaaaaatatggttcacctgtgtcgattcatattgaactggccagagatttgtctcattcgttcgatgagagaaaaaagatacaaaaagatcaaacggaaaatcgaaagaaaaacgaaacagcaattaaacaacttatagaatacgaattaacaaaaaatccaacaggcttagatattgtaaaatttaaactttggagtgaacagcagggaagatgtatgtattcacttaaacccatcgaacttgaacgtttgttggaaccaggctatgttgaagttgatcatattttaccgtacagcagaagtttagatgacagctacgctaataaagtgcttgttttaacaaaagagaatcgcgaaaaaggaaatcacacccctgttgagtatttggggttaggatcagaacgttggaagaaatttgaaaaatttgtacttgccaataaacaattttctaaaaagaagaaacaaaatttgcttcgccttcgatatgaagaaacggaagaaaaagagttcaaagagcgaaatttaaatgatacaagatacatctctaaattttttgccaactttattaaagagcatttaaagtttgctgatggggatggtggacaaaaagtatatacaataaatgggaaaattacagcgcacctgcgcagccgctgggactttaacaaaaatcgtgaagagtcggatttgcaccatgctgttgatgctgttatcgttgcttgcgctactcaagggatgattaaaaaaataacggaattttataaagctagagaacaaaataaggagagcgcaaagaaaaaagagcctatcttcccgcaaccttggccgcattttgctgatgaattaaaagcgagactatcaaaatttccgcaagaaagtatagaagcttttgcacttggaaattatgatagaaagaaactcgaatcgttgcgtccggtttttgtatcacgaatgccaaaaagaagtgtaactggagcagctcaccaggaaacgttacgtagatgtgtgggtattgatgaacagagcggcaagattcagacagctgtcaaaacaaaattatctgatattaagctcgataaagatggccatttccctatgtatcaaaaggaaagcgatccacgcacttacgaggcaattcgtcagcggcttcttgaacacaacaacgatccgaaaaaagcatttcaagaaccattgtataagccaaagaagaacggggagcctggtccggttattcgaactgtgaaaattattgacacgaaaaacaaagtcgttcatctagatgggagcaaaacggtcgcctacaatagcaacatcgttcgtacggatgtatttgaaaaagacggaaaatattactgcgtcccagtttatacaatggatattatgaaaggcactcttcccaacaaggctattgaagcaaataaaccttattccgaatggaaagaaatgaccgaagagtacacatttcagtttagtctttttccaaacgatctagtaagaatcgtacttccaagagaaaaaacgatcaaaacctcgaccaacgaggaaataatcatcaaagacattttcgcttactataaaacaatagattccgcaactggaggattagaattaatcagccacgatagaaatttttctttaagaggcgtcggttcaaaaaccctcaaacgattcgagaaatatcaagtggatgtacttggaaacatccataaggtgaaaggggaaaagagggttgggttggcggcacctactaatcagaagaaagggaaaactgtcgattcgttacaatcagttagtgattgagcaggaagaaaaagtggcgattccgttagaggatatatgctcgattatgattgaagaacctgcggtaactattacatccgtcgcattaagtaaaatggctgaatacaacattgctttaattacatgtgacaaaaaacgcctgccgaacggggtattacaaccgtttcaaaaacattctagacagttaagcgtgttgcatatgcagtacgcttattccaaaccattcaaaaaacgcatatggcaacaaatcgttattcaaaaattggtcaaccaaggaaaatgcctagaattgctaaacaaagagggagcagaagaactgtaccgcatcagtaagaccgtcgattcaggagatacgaataaccgtgaagcatatggagccaaaaagtattttcaacacttatttggcgatcaatttactcgtagaagcgataatacgatcaatacgtcattgaattacggatatgcgatcatgcggggaatcgttgcaagatcgcttgtcaattatggtttctttccctgcttagggatttatcatgataatgatttaaataagtttaatcttgcagacgattttatggaagttctgcgacctcttgtcgatctatatgttgcacaaaaaatcaatattgatgacgaattttctccggaaattagagcagacttatataatttagcaaatgcggatatattaataaataacgaaaaacttacggtagtcaatgctgtggaagaaatagccaaaagctttgtcacggccagtaaaagtcaaaatccttcatttttaaaacttcctgaacttctccctattcaattacacgtgtatgagtaaatacatgagattgctcgtgttttttgatttaccagttattacgaatagggagaagcgtgaatatagacgctttcgtacatttttgttaaatgaaggatacgacatgttacagtattccgtgtacagccgcatttgcaacggacatgaagcagccgacaaacacttggcaagattgaaaagaaacctacctcatcaaggatctatacgggcaatgatgataacagaaaaacaatatgcaaaaatgcaattactattaggagaacctactcaaaaagaaaaagtattggcttcaacacagcttacacttttttaaaaaaagaaatacatttacccaattattgacctttactccttatttttttcgaatgaaaaaagcctgtagtccttgagattacaggctttttcgatcacgtatcatatcacagcaataatcttaggggaactatgacaaaaacgcagcatgttccgtcttacaaaggatcatatcacagcaataatcttaggggaactatgacaaattatggaaaaacagtagataattcggtatcatatcacagcaataatcttaggggaactatgacccgtgctttcgccttgtttaccgtcagtttatcatatcacagcaataatcttaggggaactatgaccgtctggattatcgacaagttcgtcgtacaatcatatcacagcaataatcttaggggaactatgaccgtcgacttcaatatgtttaacgacagcttatcatatcacagcaataatcttaggggaactatgaccgcacttcccgaatgaattcaaacgcttcaatcatatcacagcaataatcttaggggaactatgacgaaattgcagttttttttgtctttaattcgatcatatcacagcaataatcttaggggaactatgacgcaacgatgtaaaaacatttccgcaacaaaatcatatcacagcaataatcttaggggaactatgacgtgatacctgcaaggtatgtaaatgggcacatcatatcacagcaataatcttaggggaactatgacaagaaatcaaacaagcattctactcgctttatcatatcacagcaataatcttaggggaactatgactcttttaatttattcagtaattcgacgtaaatcatatcacagcaataatcttaggggaactatgacagttacaagaaacttcgtgcgaggaagtttatcatatcacagcaataatcttaggggaactatgacacgcaatattcgacagatccagggttatggatcatatcacagcaataatcttaggggaactatgacagtaatggaagatgaatcgctaaaaaacaaatcatatcacagcaataatcttaggggaactatgacatttttcgcgatataagaagacgatcacatatcatatcacagcaataatcttaggggaactatgactttcttttgaaccgttgcaccaaattcgctatcatatcacagcaataatcttaggggaactatgaccttgttgtccggttaatgcctggaacgccgatcatatcacagcaataatcttaggggaactatgacatgccaggaacaatatgcggcgcttggcttatcatatcacagcaataatcttaggggaactatgacaaaagctgagttgcaatccttacagactgaatcatatcacagcaataatcttaggggaactatgacaacgagtgataaagagttttttgatcgattatcatatcacagcaataatcttaggggaactatgaccaaagtgtagtatgaatacactttataaaaaatcatatcacagcaataatcttaggggaactatgacgatgataataaggaattgttcttgagtttgatcatatcacagcaataatcttaggggaactatgacttgtgcagagtatttttttcctgatgcctcatcatatcacagcaataatcttaggggaactatgacagcgaatattgaagcaatgcggacccagtgatcatatcacagcaataatcttaggggaactatgaccaccactgtcacgagtgctttgattaaagatcatatcacagcaataatcttaggggaactatgaccgtgatggaggatgaagcactcaagaataaatcatatcacagcaataatcttaggggaactatgactttttgacagagaaataaacgatttactatatcatatcacagcaataatcttaaccttatgttaacagtccggcttatatggcaggtaaagtctcggtttttacggatgaaagggagaatcgatgcaatgtaatttccggcctgcttccaatccggagattcactcctgtttgaccaagtccttcattgatataaaaaggttttccttcatataggtgtaagccttttatcatgttcatcctggccaatttccccattttcaataggtgataggctttaggatagcagatttgtccgccatggaaatggccagccaataaatagtcaaaatggaattttttcatatgaaggacaatattggggtcatgagttaacaccaggtttattccgtcaggcaagtttgtataagaagagaccagattgctgcgtccggtacagaaatcatcaatcccaataatattgaccgtttttccgtttacgatgatctgtttgtgatcgttttgaagaacgatgacgtcgtattgttcaagagtatggacaagctgctgtaaatcattttccttcaaaatataatcgtgattccccaacacagcgtacattccgtattttgcctttaattgacgaagggattctaaatatggaccaagctttgggatggttcgcttgcggtcgaggaaatctccggttaatgcaatcaggtcgattttttcatcctttaacgtttcatatagctcatctgggggaatggagatattttcaagatgaagatctgaaagctgcaagatatttaatacttgtgaatctccataatcatgtttttcgccgatcacaattttatttaacacaacatctttcgtatttttatatgcccgctgaatcaaccaatagagaaaaaaaactattccgaaaaaaataaatttcaaaattgtcacccccgctctttcattatacagggaaataacttcatttctcatgggtaattgatggaacaatttacatggaggtttttaacaaaaaacaggaaaagaaaaaagcaggaatattatgagactattagaggtgtgatatggaacgacggaaaaaatcttgtttttgccatttttgcaaattccatcaggtcattatcaagctgctaaagcattgattgaaggaatggaagaaaaacagcctcctatccattttgaggtagccgatattctttcttacagctacgggaaaatagaaggtctagtttccggaacatatctgaaatggattaaagccttccctgatctttacggcaggatataccgcaacaatgtgtataacaacctttccgaaaacaaacgcttccgactttacgaacgattatttttaaaacaaatgagaagacttttagtggaaaaacagcctgatctcatagtctgcacccatgctcttccgtcttatctgttaaattctttaaaagaaaaaggagaaatatcgatccctattattaatgtttatacagattattttattcatcatgtttggggaatgcggcatattgactatcactttgcacctacatacgaaacaaaagaatttttgaagcaaaaaggagtaaaagaaaaccggatttttctcacaggcattcccacacatcctaaaattttaaaaccacgagaacaaaaaagctttgaaccaccgttacgtttatccattctcattacaggcgggagtttgggcgtcggaccaatagaagatttaatttccaagattaaaggtgacaaaaagtttcatttttatatattgtgcggtacaaataaacgattgtttcaaaaaatccaaaagctgcgtaaaaacaacattacccccttaaagtatattcaatccagagagcaaatgaacgatttgtacgacaaagcggatgcattatcacgaaacccggcggtgtaacggtgagtgaatgccttttgaaccatcagtgaaggacgaaaataaaccttcactgatggaagtttcccttcaaagcatctacatcaatgtcttcagtgctttcgcaaaccgctgaattccttctgtaatggaatctgtattgacacgaccgtaagtgaaccttatatatctacgatgagagcctagtgtatttccagggtgaaaaccattccgtttttcacggcttgttgaaataatactttttcatctatttgttcattttgtattttgcaccataaatgaatgcctctctttggaatgagaaaatagatgttgtcgtttaattctttctgcaatgactcaatggttaaatctctttttttcttcaattctatcttcaagttctcaatatgttcattgaaatgctcagatcgtaatagattagcagcaatccattgtggtaaattcggcggtccaaaatccatttgttgtttgacatccgttaatcggttgatgacattttgtgggcctaaaatccatccaattcgaagtcctgatgcgacgattttggataaagaactaacataaagaacgagaccttcttgatccatggatttcaatgtaggtatgggaggttgttgatagccgagaagacaatatggatcatcttcgacaatggcaattccataattcgtgcatatttccatcactttccgtcttctttcaatgtctaaggaaacaccggtcggattgtgataagtaggatttaaaaataacattttgagacgatgctttttgtgtatagcaatgatctgttcaggatcgattccattcttatgaactggaataaaatgggtgttgagccctttagaatgaaaaataggtaatgaataagcataggaaggatcttcgattgccaccgaatctccgggatggagcagtccgcggataataagatgaatggcttgctgagctcctgatgtaattagaatggaagaaggggtggattcaatttgacggtatggtttcagatgatcggaaatggcttcgcgcagttggagatttccctgaacattttcatagcctaaaaaatcgtttttgaacagggtgtcagaaatgctctgtatcaattttgcaggccataaatcggcgcttaattctccgatcgcaaaattgatcagtcgatcatcggaacctatatagcggtaaatttgctggtttaaaggattattcggttgatcaaaaccttcttttacatattgatcccaatttggcactcgaccgtgcccgtttttccatacttttttattcacaactgttccgtatcctacaatacgcttgacaagaccggtcgaacgcagctcttcaaaagcagcattcacggtgcttctgttcacattgagttgatgtgctaattctcgttcagaaggcaatcggctgtccggtggaaactctccgttgataattctggattctaaataattggcaatttgcttatacaatggcagtttgtttaatttattcggtctccatgccattgcaaaacctcctgttacaagccattctgtttttgtgtaatattatttaacattataaaccgagaaaaaagcaactttccccttgaaaaaattcgttgattcatagaaaaaactaggtgataccaagggtttatgagtagataaaaaatggtcggcaaaaaaagtcattcattggctggttacaaattcctgcccgacatttactataagtaatataacataacaatatatgttatacaatttaacgtcattatatttcagaaaaatcatattaggaggaattttatgaatccaactgaacgaaagcccaatccgataccatatgattctcaactggaaactttactggttgatcttcataacaaaggagttcgcacgggaggccttgtaaaaggaggaaggaaagggggagcaggttccgacggatgatcaagcttttctactgggagggcaagcggtgatgctcccaacgttcaatggcccggctgaacagtccccctattccttaacaaaaggtcctcacggtttttcgttacagcatgatggaaaaacgatatcttccgtttttcttgaagccattcaacgtccgaaattttatgatttaaagacgaaagatggcattccctacaacaaaattgctgtcctgcatggagccgatgtgttggcaagcaccgtcattcaaagttgtatacgctgggctccggaaaagcgctgcaagttttgtgcgattggaaattctttggcagagggaaatacgattgggatcaaaacaccagagcagctcgctgaagtggttcaagcagctgaagagctggatggaatcaaacacattactttaacgacgggtacacccaatgaaacggatcgtggagccttatatttggccaaatgtgtggaagggattcgcaaagtcagtcaacttcctattcaagttcaatgcgaaccccctgaagatgattccatgtatcaagtattaaaggatgcaggtgcgaactcgattggactccatgtggaatcttttgatgaagaggtacgaaaaaaagtgctgccatccaagtcaaagatatcgcttgacacctatttccgggcatttgaaaaagccgtgtccgtatttggaaaaaatcaggtcagcacttatgtcatcatgggccttggcgaggatttggaaaaaaccattgaaggatgcagaagagcagcacgtataggcgtctatccttttgtcgttcctcttcgcccgcttcgaggtacaatgctggaaaacgccagtcccccgtccagtgaatggatgttagaggtttaccgccgtgttgcggaagtactgaacgaagaaaaattgtcgtcagccaacagctcggccggatgcgcaaaatgtggcgcttgtaccgctctgcatttgtttgaacataaaaaataggggggagaaggttgagaaattgggagattagagtggcgcaaaacaaggaggaaattttggcggctttggcgttaagacggctcgttttcgtaaacgaacagcgcttgtttgagaaggatgattcagatgagcatgatcaaagagccattcacataaacgcttggtctcggaaaaatcctcttcttcttggcactgtacgctgttatcccgaactggaaaatcccaaagtatggtggggaggaaggcttgctgttcatcctgattatcgcataaagggaattggggtttatttgattcgagcggcggtcgaaatagtgaaaaatcaaaaggctgatcgatttttggcttctgttcaatttcaaaatgtcacattattcgaaaagttggggtggaaatctgtaggagaaccgtttcattaccatgggcatccacatcaaataatggaggttgatctaaatgtgtatgatgcatcatcatccccaaatgccgataaacggcaatcggtcggaatcaagtgattcgttcaccgaagggaatcacgattctttaagggaagaaaaacctcttaagatggggtttggaagaaaagtctttaatgttcatagccatgttggagttttggatccttggcctttttacgaatcagaagagcctatctcatcggctgaaccgggtccggcaaattcggaggaattggagcattttatggcctctaggggaattgaaaagacgcttgttctccctaattacggcattcctgttcaagaacagcctttttcattgaacgaactggtcgttcgattatgccgtgaggggggaggaagagtggcaggtgctctgtgggtatccggattgccgcaaaaccgggaattaacggaaaaagccttaaagatgctggatgagcccggcatatgtccgctaaagatgacctatttgctgggaggcactccggatccgagaaaatgggacgaagaaacgttaaagcttcatgagaaaatctttcgggaagcgatggaaagggatattccgatccattttcatacaagtccgcatggaacatcggatattaggaacttttttgaattaatcaaacgttatggaaaagatcttaaaattcatctcgtacatatggggggaggcagcagtggtcatattcgcctgatctctcaatggaaagatttgatagagggcggatacaaaatctatgttgattcaagctgggccattggttttggcgtccgcaaactgttgaaagaaatcgatcgaacgggaataggcgtagatcgtttcttgtttggctgcgatgagccttggagcgattatgaaagtgaattttggaaaatccaaggcgcccccatttcggatgaaatcaaggaacgagttttttaggcaaatgccgaagaacattactttagcaagttggcataagagccaatggatctttcaccatatgttctttagaccaatatttatttcaatggaggtaatgaaaatggccaatttaactgaaaatgaattgaaatctttaaatgaaattcctcatccgtctttgccgacgggaagcaaattgtacggggaaacaaaagtatttcccgattataaagcaaatcctggcgaaaagtttttggctttagtacatggtattgcgcatgaatcttcgctatcttatatcgctgttttgcaagcgattcgcgcacaaaggaaaggttttgaaacagccatctatttttacggaacaggagccattaacgccgtagcgaccaggggatttccgacggttggaaaagaagccttcggcggtatgttcaatattaatgaaggattgaaaaagtttatcgatgaaggcggaaaagtatatgtctgtcgattcggattgggtcttcatgggataagagaggaagatttgatagaaggagctattccgtgtcatcctcttgatttgcaagattgcttaattgagtatcatcgaagcggtgcttttattttaagtactttccaaatttaagatgcagtgcccctctgctgctgtgggcaggtggagggagccatttttatttcgtaaggaggaagaaagatgacgatttatttagataaacaggttaatcaaaaagagtttacgataacggcggagttggtgcctcctcgccattggaatcct

SEQ ID NO: 1790 - DNA, 22598 bp, synthetic construct
  misc_feature 1..22598: note = Synthetic
  source 1..22598: mol_type = other DNA
catcgcggatctcgatgggaaacaggcggatgatgacgacagaagctgcgacgatcaggaacgaaccgacgagaaggccgccgaagcgcccatgcggattccagcgcattctcgcccatccaacgatcagcgaaccgatggcgaacccgagaaatgagccataggcgtaatagccgacgtaaaacgttggaaacaaaaaggaaaccaaaaagacaaccaaagcaccgcacacatcgaacccatacgatcgaaccaccgacgccccctcctcaccattttcgttatgacatcccccacccatccttgacagatgatctttctggtcctttcattcatgatattcacagtacgctgaaaaaagatttcgcttttcacctaattttctccttccccctctacaatacaaactgtaagccagtccactaccgaaaaaaggaggtgacaatgtgaagaaaacacggacctttcttctcattgcgctcgttgcgcttgccggattcagtgtatttcatgtcctcgcgccgcatgaagtgatggcgcacgggcgtccagacgttccgtttgacggcatgcgcggcggctttggccatcaccgtccggagtttggcatggggccgcgcggaggctggatgatgatggacatgctgatgtggctcatcccccttttgcttgtgggcgccggagcggtgtggctcgcggcaaaacgctcgaagcgctggattggttgggcgcttgtcgccttaggagttgccgccatcttgccaaaatgggtgttgattttgctggcgctggccgcggtgtatgctttagggcgccgtcaagcgcgaaaatcggcagccgccgagccatgggttccagcaccgtcgtccatttccgccgattggcttgatgaatgggaaaaaacgatccaaaaggaggcacaaacaaatgggcatttttcgccggatcaaaacgatcattctcgctgaagtaaacgaacaaatcgaccgctgggaagacccggtcgccatgacgaaacaatacttgcgccagctcgaggagcagctcgaacaaggccgccgagcgctcgcccaacaatgggtcgccgagcggcgttatgagacgctcatcgcccaagccgaggcgactgttgaaaagcggagccgccaagcgaaactggcgctggagcgcaatgaagaatcggttgcgaaactcgccttatgcgacaagctgctgtatgagaaaaagctggaggcgtacaaacaacaatacgaagccatcaaagcaaaaacggcggaagtcgccaaccgtctaaaccaactgcgtgagcggtacgatgagctcgcggccaaacagctggagctcgctgcccgcgtcaacgcggctcaagcgttgaaacaaatcgacacggcgctcgcctcgttttccgccgatgaagcgctgcgtggctttgcccgcatggaagaacgcgtcatcgccttagaagccgaagcggccgccgctcggttcggaacgaacgctgtgttgtcccctgtgccattggacgaagaggtcgaacgtgaattcgcgaagtggaaagaagcccaagcgaaaaacgcctaatctccccctccccccttttgacatagatggcccccttgtccgcctggcaagggggattggtttattcagacacgatttatgacacacagagctcgcttccccgccgttcaacatcaacacaggctgacgcacggcctgacaaccgtttctcccatgcataagcaaaatggtttcctttgtttttccatcgtgctaaaatcattaggagaacgaaataatacaggagatgaccttctgtgaactggaaacgaagcgtccgcatcctttggctgtgcaatttcatggtgtccgccgggatgacgatggtcattccgtttttatcattgcttttgtgggagatgggagtcaccgaacaccacacgttaagcatctggactggccttgtcttttctgcgacgttcttatcggcggccatcatggccccggtgtggggcgtgttcgccgacaagtacggccagcgcgccaacctcatccgagcggggatcggcatggggctcatcaccggctgcatggcgttcgcccattcgccgacggcgttgcttgttcttcgttttcttgtcggctttttctccgggttcatcaccgtctcgttttcgtacttggcgcgcgtcgtaccgaaaagccatagcggcgaggcgctcgggacgctgcagacgggaagcatcgccggaaacatcatcgggccgctcatcggcggcgccttatcggattggttcggcttccgcccggtgtttctcgtgaccgggctttgcattttggcgacattgctgcctgtcatcttttggctcgaaaaagacccggtcgcgcggcagacgaaagagaaccaagcgagcttcaaggaagtgttcgaacaccggacgctcgtcttgtttgtcgctacctttctcgtgcaaatcgccgttcttggcgtcaactcgatgatgacgatttttgtccaatcgctcgtcggccattctagcaatctcgcatttttatccggcctcgcctcgtcgatcactggcatcgcgacaatgatcgggacgccgtatttaggcaagctcggcgaccgaatcgggcaggagaaaatgctgccgatgctgctcgtcctctccggcctgctcgccttgccgcaagtgtggacagatcatatatacgagctgtacgtctggcgctttttgcaaggacttgtcgtcggcggcgtatggcccgctattcaggcgctcatcaacgtgcaaagcccgcgccgcattcaaggccgggtcttcggtgttacggccagcagccgcttcctcggcaacctcgccggaccgaccgccgccggcgcgatcgctgggctatgttccaccacttatattttcgctttatcgggcttgctcctcgtcgccaccggcatcttggtcggatacgcccaccgcagcgcccccaacacggcgcggggagagatgaaagaaaaactcgttgcctggatgcaccgcctccatagccggcactaaccacaaaaggcgccgacagaaaaaacgagacggctcgaaaaatcattcctttcgagccgtttccctctcactgttccatccgccgaagcaacgaatacggaatcgcttccccaacacgcccgttccgtccggtcgtcgtctccgccgtcgtcagtgaattccaaatcgcttcttccgtcgcctccatcgccgcctgaaacaactcattcataagcggcgcgtcgtcacggacaagcggcggaatggattggtggacagcatcagaaaaatgcgccatcgtatacgcattggaaaacgcaatgacaatatcaccgctcccgtgatgaacgcggcttcccgtccgcgccaacccaacggccgcccgctttgccagccgcttcagctgccgcgcatcaagcggcgcatccgtcgcgacgatcatcataatcgacccaggcggcatgtcccgttcattaaacgatggcggcacatacggcacaaactgcagctcctcgcgccgcccaaagttgctcaccaccagcgccccgaccgtatacatcccgcccgcgatccgcgacgaactgccgacgccccctttccagccaaaacacatcatccctgttcccgcgccgaccactccctcttccatctccacccgcgcattggcaatcgcctgtttcgcatgctctttcgtcaccgccagcgcccgggccgtgttcaaatagctgtcattgcattcaccgacgacaatgttgatcgacccggtcgtatcgccaatctccggcgttatcgcaagcatatactcgagcgtcccttgccaaacctccccaacgctgaacgtattggtcaacatcaccggcgattcgatcaccccgagctcctcaacttgcacaagccccgccgttttcccaaacccgttcagcacaaagcaagccgctggcactttctccaaaaacaagttgccctcatgcggcaacaccgctgtcaccccggtgcggatcaccgtccgttcatcgatgtcctcgcgaatcgtcacatgcccgacccgcaccccgggcacatccgtgatttgattccgttttccggtcggaagcgacccgattgaaaatccaagagcacgaagtttatgacgcataaatctcccccatcgcttttctccgccttcccttccggcaggctgcatgaacgtgaaacatagcattcaccgaaaccacgctagtaaggaagcagatggattgctcttgtgtcaagtatatcgtattttgctgagggaatgcagctgctgttaggttatgtggctatactggtactagagcagttcgtacgatccagagtttaaaactcacatttcgcaccctaacagggtagaaagaaaggatttttgatttcgtttttcagaatcacgtttcgaccaacacgacgagcgaggacaatcctttttttaccatatatggtcgttccgtataatgttacacgtaaatgctttcgtccattcccaccccttgcagaatccttcgctgctcgtaggtgagcggtttccctaaggcgcgttggatttgcccatccggcaggatgacgttcacatattgaaacagctgaaaaatcgcctgtccggttggccgggtcagcttgcggcctccagccccttttaacgggtgttccggtgtgatgaacggacgcacccggcgctgaaaaacacggtaaatcgccaaggccaacagaaacaaatcccccaatacggcgacccgttctggttttttgacgtaaatctcacccgtgaaaaacggatctttcaaaaacgcgaagttcatttccaccgagatttgccctttatacagcttcaagatctcttgggcatccataggttgacccttccattccttcggaacggtcgtgacaaggacaaaccgggacgctttccgcctcgcctgttctcacgcctcgtgatcgaattctatgtcaaggcgcaggagatgcagcgtctccatctcgggttccgccccttttttcggccgtccgcgccgttttttcggacgcacgatctcttcgaccgcggcctcgacccgatgaaaccgagagcgaagggaggccttgagggatgtcaaggcttgttccgcgtcttcccggcacgagaataggtgacgctcccaacggatttgttcctcgcgaagaagctccgcttctttgacccgttctttttcgagcgtttttcttttgcgctggtcgagcgcgctcgattcgacgacgatcaagcgtacgggatggccttcataggtcgaggccgtttcccatacccgatgcgtggcgccgtttctctccgccaaggcaaaaggttcgctccacgggatgtgaggcgaatcggcctcggcccatgctcgtttcacgatccgaagcgacgaagggcccctggtgaccaaaaaggcgttggcggctttcgtctgcgccaaggcgtctttcgtcatcgcggcggaatcggctgcgtcaatccattcatcgtcgatcttggcttgtttgaactgttcgtggatccgcgacagcacctcaggattccacgccttatccgatcgattgccgtcgtgcacatctccgtaaaacgggatgccgtcctcgttgccgacgagtccgaagccgatctgtttttgccaatgttgatggcggttgcagccatgcgtgatctgcagggcctctggattccctgcacaaaaacgatcagactttggataaaacgttaccatggacatggtctaaaaggactcgaagaacggcgcgggacatccgagtctccattcaagggaagaccccgaaaaaaagagtgtagtttagaggaagagaatcggagattgaaagcagagaatgattatttaaaaaagttacgagaacggacaaggaggtgaaaccgaaagagcgattctggatcattcaggagttatccaatacctatccgattgccttcctatttattttcgtgctccagcattgcgcgaacaaaagcctcatacttgaactcttgggaaccgacgcagatggtttggttctccttctgcaaaatgacggatttcccctcaagagaatccgggagctgaaagcgatcgaagcgcacctttccgctcccttttttattgccagtgacaatcaattcagccgcttccattttcgcgatccattttgacaattgagaatcttccatatgctgtttccgaagagctagttgcaaatcgttccatacacttgtcaagagataatgtagtgattccacttctctcacgagataactttgcaaggtggctgcatcgttatttccaaaatacccgtattcatacaatgtgtcttgagaatacggaatggggtcttcgatccgaatgacccgtctctcgaggtcgaacgtcaaaaaaactgcatacggcctttcttccgatttgatcttcgttttaagcaatttcaccttcgacgcaagcgggtcataatccgcaggcactaacgacccgagatacgccgtcagctgcggcagattcacgaacggacacctcctgattaacggctgatggggcggatacagccgaatccgcatgaatttttaccaccaagacctgcatcaacagcagcttgcaacagacgagaatccccctcaaggataaatttcccgttgtacgcttcaataatggtgtttttgtaaagcacgatctgtttacggaaatctccgattgaatcaatagagacaggcgcaaacgtgagatccgttccgtatatcagcttggctttcctcaccaggttgtcagaaatgattcgttgaaaatctttttcccccggatgaaagtatttcgtcacgagtgttgattatccaaaattatacatacgccttccataaatttgggcatactcaaacaaagcagcggccatcccggatttccaatcgagaggaagctgcccagagaaaaaacggcgaacgaacgaaatgaaggaaagagagacgttcgtctgttttttggtttgatcatacagccatcgcagcaacacatacgcgatgaacgccgcaaacagttggttgtataccgcattttccgtcgtgccaaacaaggtcgggacattcagatattgcttcacccaacggaaaaagacctcaacagtccaacgttgttggtacatgtcggcaatggtttccgcagacgcatggaagaggttcgtcacgacccgaatgtcgcggccattcgcatctcgaaagatcaccacccggtgacgcttggtggagcggcattgtttcgtccccaactggcacgtgaagtcggcttgaaccgatgaggatgtgctggaaaggcgtttcaagctttttttctgatgaagttcgatgttgtccttcatccgaatgacaaagagctgatgctgctccacaaatcgatcgaggcgttcgattttgaaatacgcccggtcttccaccagcacttgttgagcgttcgtcaactgttctcccaccgggccatcatgacgcagtccgatggtttccaccacgtctgccggcaacgaggattccggcgaatacgcgacgtgcagcttcactccggcgcgttcgccgtgatacggcgcccatggcaggcggtttttcccgaccgtgacggtcgtcgaatccaccacccgaagcggtttgggaaaccgaagcgaacggcgggtttggcggttgcacttggaaatgatcaacgccaacaagcgtttcatgatgtcatagggaacttctttcgctttcttggatacagttgaataatggaatcgcggcaatccatacagaggccccacatcggctccgtggcgaaagcttttccattgatgcatggcggccagcaggaagaagtgaatcaactcgcgcaacgtaaaggttcgagacgaatcacgatacccaaccgcttcggcaatcagttgaatctcttcatccgaaacaagtttttgcatcaaattcgggagtgtggtatgcttgttcatagagagcacctcctgggtttgtttgtgtcgctactcacattctacaggaaaggtgctcttttttctataccctttggattttattggataatcaacacgcctggtatttcgtatatcttcgcccatccgaccgcaataacgtggaataagcgaccactggcgaaagcgtctccacttcaatgacagatttctcaactttaaaaatctcggtttggatggatgtgacacgcaaaaactggcttccgatgcgtattccttccatgagcaaaacttgggtgatttcccgtataaactgctcaatcggtgaggacagcatgagtttggccgtgttttgaaagactaacattttggatgcagagacataatcatgagggcctattaaacgcgagaacgagaagagggcaaaccgtctacgatctacgatatacccttgattgtgaagaaactcagcgaattccggactaaggtggcgataaatcaccgcttgcaggaaatggttgtaattgactggaatctcccaaggagtgtcactttgcaacgtaattgtgatgtgcatgtttcctcctccgacatttgcaggtttatgtatacgattatatatgtgcacttcaaactattcataccttatttcattttcaaggatgtgatggaaagatatgacgcaaaatctcctttttcgctgccactatcctaaaaacggttttaatccctcataggttacgataaaaacgtgaaggcctgccagcgttttccccattcctgtcgggtttcaatccctcatagatacgataaatgccccaaaaccgcgcataatatcaagctttttcttttcgggctatcttcagaatatcatattttaaaaattccgtcaatttttgtccgtaatggctgtagggatttggcgtaaaaaacaattgtcatcgatcccccggatttttgcgcgattgagggtcgacgacaacgtacgggttagactcgggtggcctgtccatacttccccagcttattccttcatctttttcaatccgctcaactggcaacccagtcagttcgtgaaagatcttcacatcatgccccttggccaacattctcttcgcgatgtctatttttccttcgtgcacgatatcctatatataggttgtaataaagaatttccgatctccatgtcccgtctttatcacctgacaagctggcacggtgacaagaagagcgaacaatgccatgtaaaacaaaattgcaacttatatagacccccatgccgaaaaaatttcggcgccatcggaaggatgaaaatacccttctgtcgaatattttaattttatacattttggaatttaagtattttcaggataaatgcaacgaaaaagtttaacatatccttgacggaaaagtggcttgtccatttttcgactgtcgaaggcaagccacaggcttgcccccgtcacgtcttggcgtgacggaagaccgaacaaccacccgcttcacagacctatacatgggtctggaagcgcgttgttcggtcgcccgacagtcgagcaaatgctcggtaaaagcgacaaatgttaaagcttcaaattgcatctataataaaatggctctgactcatagcactgcactttagaacaatcttgacgattcgtcatccgaataggaattatcttcccattgccactgtttcaatccctcataggtacgataaaaacttgttctgcattcttcaccttgctttaagcattgcccaaaagtatagaaatatgaaaaaaaggccttgaattttccaaatatatttgttattatagcaataagatcataccacagcaatgatctcagggttactatgataagggctttctgcctagggcagactgacccgcggcgttggggatcgcctgtcgcccgcttttggcgggcattccccatccttgcgcaaaatcagaccttggcggaaaacgctaaggtcttttttactacatagcaatattcattgggaggggatacaagtgagacataaaatcggccttgatatcggcattacctctgtcggttgggcagtcattaatttggacattcctcgcattgaagatttaggagtccgcatttttgacagagcggaaaacccgcaaacgggagaatcactagctctcccgcggcgcctcgcccgctcggctcgacgtcgcttgcgccgccgcaagcatcggctggaacgcattcgccgtcttctcatccgcgaaggaattttaacgaaagaagaactggacaagctgtttgaggagaaacatgaaatagatgtctggcagttgcgcgtagaggcattggatcgaaaattaaacaatgatgagttggcccgcgtccttcttcacttggccaaacggcgcggttttaaatccaatcgcaaaagcgagcgcaacaacaaagaaaatagcaccatgctcaaacacatcgaagaaaaccgagcccttctctcaggctaccgaaccgttgccgaaatgatcgtaaaagatccaaaatttgcatttcacaaacgcaataaaggagaaaattacacgaacaccatcgcccgtgacgatctcgaacgggaaatcaaactaattttcaccaaacagcgcgaatacgggaacatcgtttgcacagagacattcgaaaacgaatatatcatgatttgggcatcacagcgcccttttgcttctaaaaatgacatcgagaaaaaagtcggtttttgcacatttgaaccaaaagaaaagcgggcgccgaaagcaacgtacacattccaatcgttcgttgcttgggagcacatcaataaattacggctcgtctacccgacaggcacacgggggctcacggatgaggaacgccgtcttttgtataaacaagcgttccataaaaacaaaatcacctatcatgatatacggacgttgctccatttgcccgatgacacctattttaaaggcattgtctatgaccggggcgcaccgttaaagcaaagcgaaacgatccgcttccttgaactcgacgcctatcatcaaattcggaaagccgtcgataaagtttatgggaaggggaagtcaagttcattcctccccatcgattttgatacattcggttacgccctgacgttgtttaaagatgatgccgacattcgcagttacttgcgaaacgaatatgaacaaaacggaaaacggatgccaaatttagcgaacaaggtatatgacaacgagccaattgaggaactattgaacttgtcattcacaaaattcggccatctgtcgctaaaggcgcttcgcaacattcttccttatatggaacaaggcgaggtctactcagttgcttgtgagcgggcagggtacacatttacggggccaaagaaaaaacaaaaaacattattgctcccgaacattccgccgatcgccaatccggtcgtcatgcgcgcattgacacaggcgaggaaagtggtgaacgccattatcaaaaagtacggttcgccggtatccattcatatcgaattagcccgcgatttatcacaaacgtttgacgagcggcggaaaaccaaaagagaacaagatgaaaaccggaagaaaaacgagacggccattcgccagctgatggaatatggcttgacgataaatccaaccggccatgacattgtcaagttcaaactttggagcgaacaaaatgggagatgcgcctactcgcttcaaccgattgaaattgaacggctgcttgaaccaggttatgtagaagtggatcacgtcatcccgtatagccgaagcttggacgacagttatacaaataaagtgttggtattgacaaaagaaaaccgcgaaaaaggcaaccgcatccctgccgagtatttaggagtaggcacagaacgctggcaacagttcaagacgtttgtattaacgaacaagcagttttccaaaaagaaacgggatcggctgctccggctccattacgatgaaaacgaagaagcggaatggaaaaaccgaaacttaaatgacacccggtacatttcacgctttttcgccaactttattcgtgagcatctcaaattcgccgaaagtgatgataagcaaaaagtatatacggtcaacggccgcgttaccgcccatttgcgaagccgctgggattttaacaaaaaccgtgaagaatcggatttgcatcatgccgtcgatgccgcgatcgtcgcctgcacatcgccaagcgatattgcccgagtcaccgccttttatcaacggcgcgagcaatgtaaagaatcggccaagaaagcagaaccgcactttccgcaaccttggccgcacttcgccgatgaactgcgggcacgtttatcaaaaaatccgaaagagagtataaaagctctcaatcttggaaattatgatgatcagaaactcgaatcgttgcagccggtttttgtatcccgaatgccgaagcggagcgttacaggggcggctcatcaagaaacgttacggcgatacatcggcatcgatgagcggagcgggaaaatccaaaccgttgtcaaaacgaaactgtccgaaattaaactggatgagacagggcatttcccgatgtacggcaaagaaagcgatccgccagcgtctgcttgagcataacaacgatccgaaaaaggcgttccaggaacctctgtacaagccgaaaaagaacggggaacccgggcccatcattcggacagtgaaaatcatcgacacgaaaaaccaagtcatcccgctaaatgacggcaaaaccgtcgcctacaacagcaacatcgtccgggtcgatgtattcgagaaagacggcaaatactattgcgttcccgtctacacaatggacatcatgaaaggtgttttgccaaacaaatccattgagccaaacaaaccgtactctgagtggaaggaaatgacggaagactatacgttccgattcagcttatatccgaatgatctcatccgcattgagcttcctcgggaaaaaacaatcaaaaccgccgggggcgaggaaatcaaaatcaaggatctttttgcctactataaaaccattcattcgggaacagcaggactggaattagtcagccatgactgtagcttctccctctcaggcgtcggttcaagaaccctcaaacgattcgataaataccaagtagatgtactcggcaacatctacaaagtgagaggggaaaagagagttgggttggcgtcatctgctcattcgaaaaccggggaaactgtccgtccgttacaatcaactcgtgattgaacaagaagaaaaagtttctatcccattgtatgagtaagtttatgcgattgctcgtcttttttgaccttcccgtcgtgaccaatcaggagaagcgcgaataccggcgatttcgcacattcctgctaaacgaagggtacgatatgttgcagttttctgtctacagccgcgtctgccatggacacgaagcaacggacaaacacctagcaaggttaaaacgcaacttaccccctcgaggatcgattcgggcaatggtcgtaacggaaaagcagtacgcaaaaatgcagctgcttcttggggagccgacagcacaagaaaagaaaatcacatccacccagctgacgcttttttaaaaaaacgggaatggttccccttttttgcataagcacatttgcattttttgaaagcaaaaaagcctgcgatccttgagatggcaggcttttttggatacgtattataccacagcgataatctcaggggaactatgacgcttcttccattatccccatcctgctaaggaaaggacttgttcgccccgtccttctctatatccccctccaacctcccgataatcgcctcttgataccccgcctttttgcgccgcttcatctcttctttcaccggaagcaaatcctcagccgagatcgatgcgagtttggcgagtcgctcaggtggaagttcgaccgctgggttggccgccacgtaatcgtccaaggaaaagcgccagagtgcgacggccgagccgtaccgttcaagcaatcgttcggccatggccaatccttccgggtcaaaatcgccggagtaaagcaggcgcgcgccagagacagcgagcaaatccagcagtttcatcgtcgccaagttcatttgcccgtttgtgctcacaagcggggcgcgggtgtcaagcaacgtggagaaaacaccagcgttttccacaatgtacaccgtcccgccgcgggcaggataggcgcgcgcaagcggcagcacttcccgcagcggcacgttcagcgccgcgtttgtttccgcggcggcggaaaagacgggatgggaaccgttttccgtttccgctaggatgttggcgcacgtgacaaagttcaatatatcctcacggagcagcccgactgactgcaacaattcattgacgctctcgaccgacgccacatcccactcgcccggtacagtcgcttgcaaggcggctaacaacagtttgccggaaagcgtgggcaaatcgaacgcatgcggatcgcctgccacttgctgggcaaagagcgggaggcgcatgtacgaagagagcggcaggcggcgcagagcggcaccgacaaggcggacggcggcctcaaggccgttgcggtcggtttcgtacgccgcttggacgaagcgctggctgcgaaccgcctcaacccaatgatgctccttcacaaggcgcgcgaaaaaccgctccctttcttcttccgccgcttgccgctgttctctttttgacacgagcctctcgccgaaatattgttcgagcagttccacaagcccaatgcctgcgaaccgcgtttgttcgagctgtttttcaaaatcagagagggagacgcgcgagacgtctttgccgaaaaaggcggcgatcgtctcccgctcttcatcggaaaacgccgccaacgaaaccgtgccgccaacgcggccgagcgactcgtacttgcgcttcatctcgaccaataggcggtggaacgctggctcagagcggaaaaaggcggatgcttccttggctgtgctcacgtctcgatcatctcccattcttcgtcatcggtgacgagctgtttgacgcgcccattccaacgataatgaatgacggtgacaaacgacgcattgcgcgggcggacgagctcacaaatggataaagcgggcacggtgtcgtagtcgccccagagcgcctgcgaattcatgatgtagttaaagccgagctgttcgacaaggccgaataggttgcggatgttgttttcatcgacgccagcgaacgcctcgtcgagcgagatgatgtacggcgcgtcatcgcccgcttcctggtaaagtgaatacgccgcggcaaagagcgggatgtacatcgccatcgccttttccccgccgctgaattggtaaaagcgatggttcgtcagctcgcgtttcggctcgttcgctttttcgtaataaagggtgaacgcaaaccattttcgatagtcaagcacttcttttatgatttgatgaagcgtgttgccttgaccgcgctcctcaagcagttcgcgggcacgggcgattttcgagcggaagtggttcgtcacccgctgcaaatcttcctctttcaacaaccgcggatcgatccgcaacaggtggaccaactccttcgtgtcgagctccgcttccgtttctgccgttttcggtttccattgaatggacaacacgagtcctgatgacgtatcaagcccgcccatcagcttgttcatatcgctcacccaccgctcggcgcgctggatgcggctgcgcaaaatgcggccgaccgattttaaaatgacgtcctcatacagctcgcggtcttgttctttcatatattcgtgctgcaagacgatgtcgcgttccacttccgccaacatcgcaaacggcgtggcgcgctggcctttgtagtcgaggaaaatgacgtggcgctcctgtttttcccgccagtccgccgctttcatcgccatttcgtcgtctggtgcggatgtgatccattcgtgatctccgtcatccggcagccgctcgagcgtcgcccggtattcggtcaagttggacgactcttgaaaaaagacggtgttcagtcgggcgagaagcgaggagagcgtctctttcagcaccgccccgtaccgctgtttcgcttctttcgcctgttccggaagcgaacgcgagcggtctagttccaccaacccgagcgccgcttcgcgggcgaacgactcttcccacatggcggcaagcctgcgggcgaatgcttcccgtttctctcctttttccaattctgcgcggatgaacgccaactgctgttccgtccgcgcccgttcgttgacaagccgcggaatttcgccgcgcaacgcagcgagccgttcccgaatgcgggcgatttccgcgcgaatgtcgtccgctcccatttgcgcaagcgtccgttccatttccgaaattcgcaaagccagccgttcctcttcatcgagcagccgatttcgctcacctttggcctcatcgatctcttcgatcagcgtcgccagccgctcttgttgctgggtgatcattgcttcgatatggcgcgcctcgcgataatggatttccagctcgtgccagtggcggacgtacgatttcatggccagccgtgcttgttcgcagccgtctaaggaaaactcgacgttcaaccccgttgactgttcgcgcagcgtctgtttcaattgttgccactctcgggccaagcgggcggctttttcttcttgccgcttccagtctcgttctttgctttcggcctggaggcgggcttcctcgcgttcctcaaacgccgtgtgcacatcgcggtcggatggaaacgcggcaaaccagtccgcaagcgcggcaatggcggcttcgactgattcatgttccgttcgcaaacggtcgcgctggcgccgcaacgcagcgatttcttcttccagcgccgcgattttctccatccgccaccgttctctcgccgtgcggccgataaacatcgcctgctctctcactggcgcgtgcccacgcaacaggccgatcgcatagcgacccgcctcatcgagcgccatgcctccttcttgttccgcatcggtgatgacgatgcttcggagaacgtcatcaatccgctcagcagacacaggcgcgtccgcatcgggacgcaaatagtcggcgagtgtatgcgccatatggacagggttcggaatgagcacgcggtcgcaaaccacatcgacatcgcggtccgcgatgagcgcatcgagcagcccggcgtgcgagagcgctgattcgatccgttcgcgcacgttctctggcacatggtcgacaaattcaacggcggcatagaacgggacaaaggccaccccttgccgcttgagttcggcgcgggcggcggcggtttgctcgtcgcgctccggctcggggtctcgttcgtctcgccaatggcgaagttcggcttcacggtcgaccagttcgcggtccagcagacggatctcatgttccatccgccacttctcgtcgttcttcttgccgatggcggcgtaatacgcttcagcgaacgggcgcttgatgtcatcgatcgaataccgctcatagatggcctcacttgccgcagaaacgcctgaatatccgcttccgaaacctcgatttcttcccgctcgagccaggcgagcacctgctgttcaaagcgctctttttcttgctcgagcagttcatcccactttcgctgctggtggcgccattcgtccacttcccgctgcaattcgcccgcttctttgctcgcctcctcatagcgccctttcaaatcgtcatgacggcgccaaagatgggccagctcctcgagccgctcgatatggagatccgcttcccgcttccaagcggcgaacagaaattcctgctgctttcagcgatggcggagaaaatcgtcttcgttcaccgcatggctggagaacgcgccttcttcggcatcagcgcgcagctgttcgagttcatcctcaagagcgcgttcgatttcatcggcccgtgctgccgcttcatcgaggcggcgtcggtgctgctcggcggcaagctgttcggcttgtttcgccgctttctcgtattccaccgctttttccgcaatcatatattcattgtactggcggtactggtcgcacaaacgcttcaacgaccgttcgtcgcgctcgagctgctcgagttgctgtttcgcttgatccatgttttcgatcgtctcggacaaatggcgaagttcatcatcggtcaacggaggcagcgagctttccaaaatttcatagatgactgtcggcttaaagtcttttgacagcttcgggctgcgcagttgaatgagcaactcgatcaattcttgaaacgccccaagcgattcaaagcgaaacacatgtttattgacgagctccatatagtctttttgcgtctcgacgaccgttccgcccgcgccaagcgttgcggccagctcacgtttcgtcaacgggattttctccccggttttttcttttttatatagggtgatatcatgcccaatgcggcggttgtcgaaaatgacaaacccccagaagtcgaggcttttttgccgcttcgcgcgcaagccgatgccggttgtgacgtactggtcggattcttttcgcttatattcccaaaacaaataccccgtccgttcatcgcggtccacgacatctttttctccaagcaagtagtcttccatccgccgcgctcgcgagccgaacgggtcgagccgatcgggcgtctttttgccgtccaaaagcacggggatcaagctttgcatcgtcaccgacttgcccgccccgttgcttccacgaagcagcagcttcccgtcagcaaaatgaaagtactgctcatcgtaataccaaaaattaatcaatccggcgcgatggagcacccacggattggccatcatcttccccctctttcacgtcaaaatcatccggataccgcccgcaaagccgcccgaggagcggatagaggacgatcgttcctgtgtcgtgttccacatcagccatgcgccattctttcaacgccgaaagcacctcgcggacaagctcagcggacgatatgtcgcggtacgttttcccccacccagccccatagcggcttcggcagtcgacaagccaagcggaaaactgatctggcgtcaactggatgcggccgtactcatcaggtgaaaacaactccaaccgctcgcgcaccaaagcggcaaaatgaagaatgatctccgacgcccctttctggtcgggaaatacgttgtacggcgcctgccgctccggcaatgtcagcatcgcggcgtttttatacagctcgtaatgaaacggcgtatgcgcttcgatatcgtcgcgcaatcgatggcggaagttgcgcaagtagtaaaaatcttgctcgtctccctccgtccgatacaccgccggggataaaaacagctttcgatacaggcgatggcgccgatagtcttgcggcgccgctttccattcctcagcgagcaattcgtggatcgattcatattgcagcaaatctttcggatatgtgcgcataaaataacgggccagcaccggcacttcgtacatcgcctcttcctccacatgatgggcgaacgcctcaatctccccgtccattcggcggatgagcccgatttgttcggccgttttcaacacacgaatgagcgcgcgccgatgcgcgtagttcgtccaatcgaccggcaaatctcccggatacatggcgcggatttcctcgcatacgtcagaaagcaaaaacttttcttccaccgccttgccttccaaatacgccatcaagcagcaaaacaatgcataatcaagcggctcttgaaacgtttcgattcccatccacggctcgggatcagctgggattttctccagtttggcgaaatagcggtggacgatgagccgatagccgaacttttcctcaacgtatcgcttgagcacatgttcacgcccgccgatgagctagtacagctccggctctttgtcacgaacgatccaaaactgttcaaacagcgcggcgagcgcttctttcgctttgtcgtcaaacgatgtctccacgctcattcccctcccgaaatttggatgattttcttgaaataatcgaacgtcctattttttctcgccatcggtgcgcgttttttgtaaaatagaggcgaaaaggaggtgaaacgaatggaggcgttgctaagagaaattttgcatgaagtgaaagcgacgcgcgcggcggtcgagtcgctcgagcagcgagttggcgccttggaggggcaagtggccaaccttaatgaacgaacgggcgctctcgaagcgcacatggcccagctcaatgagcgaacgagcgcccttgagcaccaagtcactcagctgaacgagcggacaagcaaccttgaacaccaagccgcccaattgaacgagcgcatgggctctgtcgaacatcaagtcacccaattgaatgagcgcatggactctgttgaacgtcaagtcgctcagttgaacgagcgcatgggctctgtcgaacatcaagccgcccaattgaatgagcgcatgggcactgtcgaacatcaagtcacccaattgaatgagcgcatggactctgttgaacgtcaagtcgctcagttgaacgaacagacaaacacccttgaacaacgaatcgacctgctttatgagcgcacgaacgaaacgaaggcgattgcggaagcgctccgccacgggcaagaagtgctggccgcaaaatacgaggcgatggcccacgatcttcaccatatgaaaggcgacctcacccatatcacatccatcttggaagaaaaagtgctgcctgccctcgccgaacatgaagcgggattgcatgttttaaacgcccgcgtcttcaaaacggaaagcgcccttcatcgccttgttcatgcgtaacgcgttccccacagagaaatgttcaacacctattcccttttcactaggcagccgtaggctgccgttttttatgcgaagcccacggaaccattggccttatcataaacgttgaatgacacaaccacgcctctcgtcgttaatggcgctcatggagaaagaaaaaacatctgttcgaacatctcgaattcggagtattcgggaggattcgaaagcattccggagcatttttcagcatcggaaaggagagagcgttcatcgccgtgagagaaagcgacaggcaacgatatcgaccgataccaaatttgccagccgtgcccaaattacggtatcctttgtttgcgacgctttttcatcccctccgcgtccttttgccgccttttctttttttcatccccccttatgacactaatggaaaaaggaggaaaatggtgttgcgaaaatggttcatgtctttgctcgctgtcgggcttgttttcggattggcagcctgcagcggagaaagtgatgcgaaagggaaaatcgtgattgccggaaagaagtttaccgagcaagtcattttgacgcatttgctggcggagtatgtgaaagccaacacggatttggatgttgaggtgaaagacagtttaggcggcgcgtttatgctccagcaagccatcgaaaacggggatgtcgacatgtatgtcgagtacaccgggactgggtatttgaacattttaaaacagccgtacgatcccgcaaagacgcccgaacaaatttacaacgaaacgaagaaactatataaggaaaaatacaacatcgcttggctcaaaccactcggatttaacaacacgtatgcgttggcgatgagaagagacctcgccgaaaagctcggggtgaaaacgtactccgatttggcgaaacattcgtcttcccttacgtttgggtcagacgccgagttttttgagcgaagcgacggctatgacgggcttgtcgatacgtacgggttccaattcaagaaaaaaatgacgatcgacccggacttgcaatacgaagcggcgaaaaacggcgaaattgacgtcatcaccgcctacacgaccgacgcccggattagaaaatacgatttggtcgtattgaaagatgacaaacagtacttcccgccgtaccacgctgtgccgattatccgccaagaagtgttggacgccaacccggggcttgaggagaaactgaacaaattggccaatattttaaccgacgaaaaaatgatggaattaaacggtaaagtgaacttggaaggaaaacagccgcgcgaggtggcgattgacttcttgaagaaggaaggactgattgactagaaagcgaggaatgcctatgattcgctttgaaaacgtgacgaaacagtatgaagacgggtttgtggccttaaaaaatatcaatcttgacatccgcaagggggagcttgttgccttgattgggccgagcgggtgcggaaaaacgacgacaatgcggatgatcaaccggttgatcgagccgacatcgggcaaagtgtatatcgacgggcaagacatttccgagcttgacccggtcgaactgcggcgcaacatcggctatgtcatccagcaaatcggcttgtttccacacatgacgatcgcggaaaacatcgcgctcataccgaagctgaaaaaatgggaaaaacacgcctatgaaaaacgggttgacgaactgctcgagctcgtcggcctcg

SEQ ID NO: 1791 - DNA, 21995 bp, synthetic construct
  source 1..21995: mol_type = other DNA
  misc_feature 1..21995: note = Synthetic
attaaagaaaaaaggtgtcgaacatgttgattgggtacaggaaggagaagatgcctacgattatgccctcgcttcattttatgatgtcattattttagattggatgttgccaaatggcgatggggtgagcgtatgtcaacgtttaagaaaaaatggttatcacggagcgattttaatgttaaccgcgaaagatgcggttcaagatcgcgttgaagggttagaagcaggagcggacgattatttagtaaaaccgtttgaaatcgacgagctcatggcgcggctaaaagcattgtcccggcgcacgttcgcaccgattcaagaagaaattgttcgctggggagaatttgaagtgaatcgcacaagtcatacattgacgaaaaacggagagcaaatgatattaactccacgtgaatttcaactacttgatttattattgcaaaatagaggtcgtgttttaacgcgcgacattattcttgatcgcatttggggatacgatgcggacgtatcgatgaaaacgattgacgcaaccgttaagctattgcgtaaaaaaattggcgatgaacaacagcagctcattaaaacggtgcgcggggtgggatataccattgaaaaatagtatacgatctttttttcatcattccgatatgtttcgccgcacacaatggcgattaactgccacatatagcggtattctcatcgcttttttagccatctttatcgcggttgtttctttccttattcataccgtcatgacaaatgaccaagagcgacgcattcgcacgctcgccgaacaagaaggtcaaacgattgaaaacatgctagaagagcaatcgtttatcgggtggtctagcgatcaaaacgtcatatttttaagtgaagatcaactatttttttacgtcgttgatacacgtggacgattgatgatgggggatgaaataaataaaggattgcggccgctgctcctttcgacgcttcaaccgtggacgccagaaaaaaatgaattaagatatgtagacattcatatccctcaccatcagcacgaattgaaacgattccgtgcaaatgaattaaaaatattaacggctgcccgcccagtaattgttgaccgacaacttatcggcattttatacgttgggatggatgcgacaagcatgtttcgcttgctcaaatggtcgacatttattttgcttagtctaggcgtcttatttatcgctgtcgctattgcctttagttatttcatgtcaaaacgggcgctcgttccgattcaagacgcatacaatcggcaacgtcaatttgtggcggacgcttcccatgaactaaggaccccacttagcgtcatttattcatctgtcgaagcgttgaaaatggatgcgtcattaacgtccgatccattcagccaaaaaacgattgaacgtctaggagacgaaacgaaacgaatgacaaagctcattaataaccttctcacccttgcacgcacagacgatgcgaaaattcaaattgaaaaaaaaccgtttgatttgcggacatgtgcagaacgtacgttacagtcgttacaagagcttgcaaataaaaagaacattatgcttcagtttcatgcgtctgaacaaattgaatttgttggggacgaggacaaatgtacgcaattgttgtacattttgcttgataacgccatcaaatatacaccagaaggcggaacagtttccctatcgttggctcaacacgtaataaaacaacgaaaagtagtaacgatgtctgtgtctgatacaggtattggaattgctcctgagcatcttccccacatttttgaccgattttatcgcgcagataaagcgcggacacgacaaattggcggacacggacttgggctttccatcgcaaaatggattgtcgaagcacacaaaggaaacattcacgtagagagcgaagttggcaaaggaacaacattcactattacttttccgaatgaacgtgcataaatgttgcacgttttttttatttttcacctaattttctcttttcgcttgtacaattcaaactgtaaataacgaaggaggtgatagatgtgaaaaaacgaacgattttcttcttgatcggtggactagttatcgtcgccgtattcgcgcacatcgctacttatttcatgcacatcggttggagcggacgaatgccggcagaacacatgatgggaatgggtaaacatcaccgagcattcggtcaccatggtccacaaatgatgcgaccacacggcatgccaatgttcggatggatcccttttctcattcaactcgcacttctcattatcgggtggatcgtttggaaaacgacgcacggcggtgggaagtggattggcggtgcgctgatggcaatcgggttgatcgcacttttaccgaaagcgttacttgctgttttggcgatcgttgccgcttacattttatttagaggaaagacaaagtcagcaactgaatttgaaccattcgttccacctattcaaaaccatagctttttagatgaatgggaaaaaacaatccaaaaggaggaaaagtgatatgggcatttttaaacgcgtaaaacatgtcgttcttgctgacatacatgacatcattgacaaatgtgaagatccgattcgcatgacaaaacaatacattcgtgaactagaagagcatcttgaacaagcacaacaagcacttgcccatcaattcatgttagaacaaaaatatgagcgtctcatcgcagatgcaaaagaaatgattgaaaaacggtcccgtcaagcaaaactagccgttgaaaaaaatgaagagccaatcgcaaaaatggcccttcaagaaaaaatcgcctatgaaaaaaaactagaactatatacgcaacaatacaacacattaaaagaaaaaacaactgctttaacagaaaaagtgaaacaactgtacgaaacgtacgagcaattaaaattgaaacaaatgcaattaatgacgcgcttttatgtcgctgaaacgatgaaacaaatggatgaggcgatcacgtctttccgttacgatcatatcgtaaaaggcttcgcacgtatggaagaaaaagtaatgttacttgaagcagaagcaaaagctcgctcagtcattcaaacaatgccccctcaatcatttgatatagaagtcgaacaacaactgaaacaactaaaaggtgagtaatacaaaaggtgtccctatccggacaccttttgcatatgttatgtcgtccattcatcatgaatgataccgacaagtttccactgaccgttttcttgttcaaaaacgaggcgcaaacttctccagtccatcccgctatattgtggatcaaaacctgtgaaatgatattcgataagtgatccgttcggatatgcttgttgaatgttgttgatcatatttcctgtgccaacaacaacattgtttccgatcatatgcggattcgcaaaatcaacatcatagacgaagcgatcgaaatagtcttggaaagtcaactgaatcggatcacctgaaccgtcatatgctccccactgatatacttgcgtcgaattccaaagagaaggaagctgagaagctgaaaactgcaaatcgttttgaacatcaacatgcccgtatggactgaaacgtacgccagctgtagaatgaacataagatgcaagagcgttcatatctttattttttaacgccgctaccacgtctaaagcaacagataaaagtgaagacgaatggacttgttttgcctcgctttttaattgctcattttctttttgaagctgttcatttttttcttgtaattgatcaatcgtcgtttgttgttttgcaattgtttgctctaactgtttgacattcgatccgtcttgctgggctgtacaaccaacaagtaaaatgataaacactacaatccattgtttcacgatctcacatccttttcttttagtatatcacctacaaacaaaaatagatgccttcatatcggcatctaactcactttttcttgttctctctcttgcaaaaaagcgatgaaacagtcgaccatttgtgcatcccattgcgttcctcgaccttctaacaaaatcgaagttgctttttctatatgcattccttttcgatatggacgatcagacgtcatcgcatcaaacgcatctgcgaccgctataatgcgtccaaaagtgggatatcctccccttttagaccatctggatacccttttccatcgattcgctcatgatgcgaccgaatgcctggaagcaaatcttgtacttcttcaatcggctgtacttggcgaataatattttcaccgagtatcggatgttttttaatccacgtaaattcttcatctgttaactttccgtcttttaataaaatatggtcaggaattccgatttttccgatgtcatgcaaaatagcggatcgatataaacgagcgagctgttcaactgtcatccccagtcgcttaccaatctctacagcatatacggcaacgcgttgcgaatgacctgctgtatattcatcgcgagcatcgagtgccgtcgtcatcactgtgataaaactgttcaataattgcttatttttctcatcccgttcaacaatcgcatcaaccatatggttaaagccgtttgtgagctcggaaaattcatcaatataaacgttatcgcacattaggtcatactcttttctttgcacgcggctcatatactgaagcaaatcttcaatgcttcgctctacatcttccgataatacacgggccgcaaataaagaaaacaaaatggaaatgactaatacaacgatcgtccacgtccaataacctgaaaatgtgtttttcccctccgcaaacaacttcacttctgtcgctaacacaaataataaaactgggaaaataccgataaatagtacacttaatcctatttttactttcatcggcacatatacgacatttgtcgctcgaatcgcttcatgaaatccgtgcattctccctatttgcatcatatcgcgaataagcggacgcatcgtgcgcaacgttaaaaaaaactcaatcatcgcatgaagcatggcgatgagcaaagcgccaaataatgcataaacaacatacatatacggaatgcgcagcacatcgataaaaataagtgaaactgtcatcgcaacagctggaatcgaaagccctaaaaaatgtggaagcgcgatacgtcttaccgtcaacaacggaaagcgcttcgcttggacaagcgcccaataaaattgttcttccgttactttcgtttcagaaaaaataagacgaatcgggtaaatatctttttgaaaggcacgatattcgataaataacataatacaaaaggaaaaaaaaaaattgaataagaaacaacatgagtaaatctacttgccgaatgttcagcgccatcaccattaacgtgctaccgacgccgacaaccgctaaaatcgaaccaattgtgtaattcataaacaatttctttagcgtttcttcaaacatgcgcatacccgtccctcctccctattctttttcattataacaagaatggtgaaaaatagggaggtgtacatgtatatacaaaaacaactggcgtataaccagttgttttaatgcgccgcatgccccgatgttaacacccaaatcgatcctgcgacaatgacaatcgcaacaaacgccgcataagccatattaataacgttcgtttttccgtcttctccttctgttacgtgcatgaacataaatagttgaagaccagcttgaagaacagcaagcgaaccaataatccacataacgatcgtatacgatacattcattttcaatgccacaaataccgcaacaaacgttaaaacgagcgaaaataaaaatccaacaacgtggctaacgggatatttgcttttatgctccatttaccccaccatcccttttaaatacacaaatgtgaaaatgaaaatccagacaacgtcaaggaaatgccaatataaactaatgataaacatttttcttgcggtaactggcgtcaaaccgcgttgaagaagttgaataatgagcataatcgcccaaatgattccaaacgtcacatgcgcgccgtgcgtaccaagcaagacgaaaaagcttgataaaaacgcgctcgtttgcatcgtcgccccttcatgcacgtaatgaataaactcacgaatttccataaacaaaaagcctgcccctaacaaaagggtaatgataaaccaaacgagcaattgcttcatattacgttgtcgcatgaaaaacactgccaaaccgcatgtaaaactacttgtcaacaacaacaacgtttcaataagcacgtcattgagcttaaaaatgtcgctcggcgttgggccaccggcatagcggtgacctaacaccccataaacagcaaacaacgtcgcaaacagcacaatttctgccccaagaaaaacccaaaaacctaaaatatttaatcggttttgttccgtctgatattctagtggaagcgaatgattgatgttagccgacatggttttccgtccccccttctacgtttctccacgtccgctctgtttccttaatttcatcgacacttacataatagccgtcattataatcaaacgaacgaataataagcccaacgacaattccaattgccgcaacagctgccgcgatatgtgcttcaaagacgaggaagaaacctgtaatcccaaacacaaccgccatataaaacggcaatcccgaattacttggcatatgaatttttttgatgtcgctttctttcaatgtaagcgtttctccacgttttttcatatgccaaaacgcatctaattgtttcacttctggaacgaccgcaaaattataaaactgaactggagatgccgtcatccattcaagcgtacgtgcatcccatggatcgtggaacacattgcgcttcgcataacggaagctccaataaatgttataacaaaataccgcaaagccgatcgccaaaatgatcgagccgatcgcagatacgagaaacagcggcgcaaagccggattctgctgaatacgtataagcgcgacgaactgctccttttaaaccaaggaaaaacatcggcataaacgtcacgttaaatccaattgtaaatagccaaaaatgatatttgccaagtttttcatttaacataaaaccaaacatctttggccaccaataatacaatcctgcaaataccgcaaacacaacacctggaattaatacgtaatggaagtgagcgactaaaaacaacgtgttatggtattgaaagtccgcagccgccatcgctaacataacccctgtcacgccaccgatgacgaagtttggcacgaaagcgagcgcccataacatggcagttgtaaattgaatgcgcccttttcgcatcgtaaacagccagttaaaaattttcacccctgtcggaacagcgatgagcatcgttgtaatcgagaaaaacgagtttaccgcagggcctgcatccatcgtgtaaaaatggtgcacccatacgatcatacttaaaaacgcaataccaacgatcgaaacgaccatcgatgtatatccgaacaacgtcttccgtgaaaacgtcgcaatcacttctgaaaaaataccgaacgccggcaaaataacgatatacacttctggatgcccccaaagccagaacaagtttgcccaaagcatatcgcttccgcctgaagaaagcgtaaagaaatgcgttccgtacaaacggtcaaacgtcattaaagctaaggcaactgtaaaaatcgggaacgctgcgacgataatgattgatgtaatgaatgttgtccatgtaaacatcggcattttcatcaatgtcatgccaggcgcacgcatttttaaaatcgtcacgataaagttaatgccggtcattaacgtcccaagacctgcaatttgcagcgcaatcgcatagtagttatttccaattcctgggctaaattcttttccagcaagagggaaatacgacgtccatcctgcatctggtgagcccccaacaacgaacgaaatgttaaataacatcgccccactaaaaaataaccaaaagctaagtgcgttcaactgcggaaacgccacatcgcgcgccccaatttgtaaaggaacgacgacgttcattaaaccgatcaaaaacggcatcgccataaataagatcataatgacgccatgtgttgtgaaaatttcgttgtaatgttgtgcgtctaaaaaattcatttctggtcgagccgtttgcgccttcattaacaatccgtccatgccaccgcggaaaaacataagtacaccagataaaatgtacataatcccgatctttttatggtcgacggttgttagccattcgcgccataaccaaccccattttttaaagtacgttaatccaacgacaatcgcaacgacagtcaatacaatcgcaatttgtgaaccgacaagaagcggatctcctccaacaaatatttcattccacttaatgcccatgatgttcacctccgctatcactctctaaagctttttgttcatcatcgttacaagttgatgagcttttatagttatcttcacgaataaaaatttttccttgatatccatgacctctatacaactcaggatttgtgtacgtcttcgaatgcggatcagcatgattcacccattgtaaatgtgtccctataaatgttagacgtcctaaatgtgtcggcaacaacagttcctcatattgttctttcgttaaattcggcgccttttgttttacttcttgcacccatttgtcaaactctttcgacgtttgcgctaacacttcaaactgcatatgcgcatacccacgtccattaaagtttgtatttcgtccttcatacgaccctggacgatcggcgacgacgtacaattctgtctccattttgttcatcgtatatttttgtccagctaatgccggtacccaaaacgactgcatcgtagacgcggaagtcattttaaataatacaaggcgacctgctggaatgttaacgtagtttaccgtttcaatattttgttcagggtagctaaaaatccatttccaatccgctgacgtgacatgaatgacaagcggcttttgatcttcatacccttttggcggtttttctaaatcatataacgttctcattgtcggaatcgttagtgcgatgacgatcaaaatcggaataacggtccatacaatttcaagcaccgtgcttccatgctcttcaggcggttcttccccttgccgctcagggcgatcccgatatttccatacgatgtaagcaaacaatgcaaatacaacgacaacaacgagaagcatccaccaaatcgaccagttaattagttctgtaatacttcgtgcagctggtccttgcggctgaaacacaaccatctcacagccaccaagaagcggaagcaatcccgctataactaaggcaaacaagcgcttcatctgtcttcacctcaacaaaattgtgattcattgaacaaagaaacaaatacaaaacgaacgaatttaattagctttgtagtattaacactattgaaatgattttaacatgtattgtaaaaataattgtgacgaaaaaaggaaggaagaaaactgcatcgcagggaaaataagcagcaaatcgattgacaaaaagaaaaacacttttctcaacctctaaaaacgagagagaaaagcgctatcttttacataatacatggaaatagaaaaagaaatcggttgttcatctgaattcttgtcacattttcgttaaatttttttcgaaatttgttcaaaaataaaaaataactaatttatagaattttatgttgaaattttcaataaaatcctttattatgtatataggatcgtaccacagcaacgatctcagggttactatgataagggcttctacttttcagggagtagatgacccgtggcgttggggatcgcctatagccctttaagggcactccccatttcattacaaactcagacctcggcagaacgctgaggtcttttttattacacaaggagggaaaacacatgagatataaaataggattagacataggtattacttcagtcggatgggctattattaacctcgatgaaaacagaattgaagatcttggggtacgtatttttgataaagctgagcaaacggatggcaaacctctttccctaccacgacgaatcgcacgctctacacgaagaagattacgccgaagaaaacatcgattagaacgtattcgccgtcttttagtccgtgaaggtgttttaacgaaaaacgaaatcgacaacttattcaaaaaccgccatttagttgatgtatggcagttgcgtgttgatgcgttggaacgaaaattaaataacgacgagcttgctcgtgtgctcttgcaccttgctaaacgtcgtggatttaagtctaatcgaaaaagtgatcgtaacacaaacgagaatagtgttattttaaaaaaagttgaagagaatcagtccattttaagccactatcgaactgtagctgatatgattgtccatgatgaaaaatttaaattccataaacgtaataaatcggaagactattcaaacatgatcgctcgcgataacttagagcaagagattcaatacatttttagtaaacaacgcgaatttcataatcctgtttgcactgaacaattcgagaaaaaatatttgcatatttggtcatcgcaaagaccttttgcctcaaaagatgatattgaaaaaaaagtcggtttttgtacgtttgaatcaaaagaaaaacgtgctccaaaagccacttatacatttcaatcatttgttgcatgggaacatatcaacaagctaagactagtttcccaagaaggaataaggatgttaacagatgaagaaagacatttagtttacaaacaagctttttcggaaaataaagtaacatattgtgacatccgtaaattactcgatttgcaagatgacgtaaaatttaaaggtctcatgtacgatgctgatcaaccattaaaaaagacagaaaatattcgtttcctcgagctagatgcttatcataaaattcgcaaatgtcttgaacaagtttatggaaaagaagcattaacaatgttttcagacgatgactttgacacgttcggctatgctcttacaattttcaaaagcgacgaagatatttattcgtacttacagaacgagtatatacgtgctgatggaaaaagaacttgtaatttaactaacaaagtctatgatgcggctctaattgagcaattgcttcatttatcgttttccaagtttggtcatttatcgctgaaagcaatccgaaacatactaccttacatgagagatggagaaatatattccaaagcatgcgaacttgcaggatataactttactggcccaaaaagaaaggaaaaaacagttttattacctaacattcctaacatcgcaaatccagttgttatgagagctttaacccaaacacgtaaagtcgttaacgcaattatcaaaaaatatggatcacctgtatccatccacatcgaattagctagagagttatcgcattcgagcgacgaaagacaaaaaatacaaacagctcaagaaaagaatcgtaagaaaaacgaaacagctattaagcaattagtagagtatggtttaacgagaaatccaaccggcttggatattgtgaaatttaagctatggagtgaacaaaatggtcaatgtatgtactccttagaaagaattgagttagatcgcctacttgaaaatggatatgttgaaattgaccatattttaccttatagccgtagtttagatgatagctatgctaacaaagcgctcgtgttaacaaaagaaaaccgtcaaaaagggaaccgcacaccagctgagtatttaggattcggaacagctcgctggcaaaagttcgagaactttgttttgacgaacaagcaattttcaaaagcgaaaaaaaagaaatttgcttcgcttacattatcaagaagcagaagaacaagaattcaaagagcgaaatttaaatgacacaagatatatttcacgttttttcgctaatttcgtaaaagaacacttgaagtttgccgatgaagacaaaaaacaaaaagtatatactgtcaacggaaaaattaccgcccatcttcgtagccgatgggatttcaacaaaaatcgtgaacaatccgacttacatcatgcagcggacgcagtcatcgttgcttgcgcttccccttcaatgatcgaaaaaattactaacttttataaagatcgcgagcaacataaagaactcgctaagaaaaaggaaccgttcttcccacaaccttggccgttttttctgatgagttgaaggcaagattgtcaaaatttccaaaagaaagtataaaagctttaaaccttggaaattatgatagtaacaaactcgaatcgttaaaatcggtttttgtttcacggatgccaaaaagaagcgtcacaggacctgcccacgaagaaactttgagacgttacgtaggtgtcaacgaaaaaaaaggaaaaattcaaacagcagtgaaaaaaaaactcacagatattaaactagatgccgatggtcactttccgatgtacggaaaggaaagcgatccgcggacgtatgaagcaatccgccaacgtcttcttgaacatggaaacgatccaaagaaagcatttcaacaaccgttatataaaccaaagaaaaatggagaacctggtccaatcattcgtactgtgaaaattgttgatatcaaaaacctagttgttcatttagacgaagggaaaacagtcgcttacaatagcaatatcgttcgcaccgatgtttttgaaaaagatgggaagttttattgtgttccagtttacaccatggacatcttgaaaggggttttaccgaataaggcgattgaagcaaacaagccatattctgaatggaaggaaatgaccgcggaatactctttccaatttagcctttatcctaatgatcttgtgcgaatcgaattaccgaaagagaagaccattaaaaattcgttaggaaaagaaataaagattaaagatattttcgcatacttcaaaacaattgactctgcaaacggtgggttagatttgattagccatgatcaaagtttttccttacgcggtgtcggttcaaaaaccctcaaacgattcgagaaataccaagtagatgtattaggaaacatctacaaagtgaaaggagaaaagagggttgggttggcgtcacgtcatgatcagaaagccgagcaagttgtccattcgttacaatcaattagtcattgagcaagaagatacagtttccattcctttagaagacctatgttccataatcatcgaggaacatgtcgtaacaattactgctgcaacattgagcaaaatggccgaatataatattgctttatttacatgtgatcaaaaacgacttccaaacggactattaagcacatttcaaaagcattctcgccaactaagcgtgctgcaaatgcagtacgcttacacgaaaccgtttaagaaaagaatatggcaacaaattgttacacagaagttaacaaatcaaggaaaatgtttagagtttttaagtaaagatggtgctgacgatctgtatcgtataagtaaaacggttgattctggggacacaactaatcgtgaagcatatggagcaaaaaaatactttcgttacttgttcggagatggttttaatcgacgaaatgataacacaattaatattgcgttaaactacggatatgccattatgagaggaattgtcgctagatcattagtcaactacggattttttccatgtataggaatttatcatgacaatgaattaaataagtttaatttggcagatgattttatggaagttcttcgcccacttgttgatttacacgtagcacaacatattcaagaagatgacgaattttcatcttccattcgagccgacttatataatttagtaaatgcggatatactaatggataaagagaaactaacagtcatcaacgctgttgaagagatggtgaagagcttcgtaacagctagtcgaaacgaaaaaccttcgtttttaaaattgccggaacttcttcctattcaaatacacacctatgagtaagtttatgagattacttgtgttttttgacttacctgtcgtcactaatcgggagaaacggcactacagacaatttcgtacatttttattgaacgaaggatatgatatgttacagttttccgtatatagtcggatttgcaatggacatgaatctgctgataaacatcttaataggctgaaaagaaacttgccaccgaaaggatcaatacgggcaatgatcgtaacagaaaaacaatatgcaaaaatgcaatttctcttaggagaacctactacaaaagaaaaaacaattacaacaacgcaactgtcacttttttaaaaaaaacagatggaggataactcgtccccctccttctctcgtttttttaaaacgatcaaaaagcctgtaatcgttcatattacaggctttttgatacacgtatcataacacagcaataacctcaggggaactatgactttaattcgttattaggcatatcaccaccaatcataacacagcaataacctcaggggaactatgacaatacgcggatcagtaagacgttaaatgatatcataacacagcaataacctcaggggaactatgactatcagcgggttcttaaaacatgaatttggatcataacacagcaataacctcaggggaactatgaccttcatcgaatcaccttccaaccctttctgatcataacacagcaataacctcaggggaactatgaccgccgaaatagttgttctgctagacagaaaatcataacacagcaataacctcaggggaactatgacttcggaaatagttgttctgctagacagaaaatcataacacagcaataacctcaggggaactatgaccactaatgttctttctatcatagtagcaaaatcataacacagcaataacctcaggggaactatgacttcagaaatagttgttctgctagacagaaaatcataacacagcaataacctcaggggaactatgacgccgttctcgctatacatttttgctgatgaatcataacacagcaataacctcaggggaactatgacgttgtttctctacagttttctttttcttcaatcataacacagcaataacctcaggggaactatgactctaaaattaatttctagttggactggtctatcataacacagcaataacctcaggggaactatgactccgctccgtttcggtgcaaaagtgtagcaatcataacacagcaataacctcaggggaactatgacaaaaacttccatttaccgaattgacccacgatcataacacagcaataacctcaggggaactatgacagctactgcttttttcatgatctcctttttatcataacacagcaataacctcaggggaactatgacgaggatttatagtgagtctaaaacttcggatcataacacagcaataacctcaggggaactatgacgaggatttatagtgagtctaaaactttcggatcataacacagcaataacctcaggggaactatgactttctttttatcaaataagtgtgtcattttatcataacacagcaataacctcaggggaactatgacctcaggtgtcttattcaaggatagattgataatttacatttggccataaaaaaccccttacaggtagactcttaagaacaccataacaaatgtccacttttttgtacctgtaggggataatactaatccgtactttggatcagccttttttcatctcaacagcttccgcacccatttcagcgcatttggaaagtttggataacgcaaaggaatatcgaatttcgttgtttgttttaatacactcttgtagtgagtgaacgcatcaaagcttgcttttccatggtatgcaccaattccgctttgtccaacgccaccaaatggtagatgtggactggcgatgtgcatgatcgtgtcgttaatacatcctccaccgaaacgaacttgttgtaatacttgttgttgcacatcgcgatcttctgaaaacaaataaagcgcaagcggcttttcgtaatcgttgatcatttgaatcgcttcatctattgtttcaaatgtaacaattggcaatatcggtccaaaaatttcttcttgcataatgtcatcatcccaggtcacatcatctagcaacgtcggctcaatccaacgttgctcgatgtcgtatgttccaccgtgtacaactttaccgtttgttaagaagcgaacgagccgttctgtatgtcgcaccgtcactatgcgactgtacgtatttttatcaccgtacaattgctcaatatatcgcttcattcgctcaataagtaacgatttaaaagacacatgcacgagcacataatccggtgcaatacacgtttgtcccgcatttaaaaacttcccccatacgattcgcttagcagctaagtcgatatgggcagactgatcgacgatcgcaggacttttcccgccgagttctaatgtgacaggtgttaaatgtttcgctgctgctgccataacgattttccgaccggcacacttccggtgaaaaaaatatgatcaaagcgcaaatccaatagctgctggctaacgtctactcctccctctacaacagcaacatactcctctgggaacacttctgaaatgatcgttttcaataatgccgacatcgccggtgtatattccgacggcttcactaccgcacaatttcctgccgcaatcgcgccgataagtggactgatcgcaagctgaaatggataattccatggcgcaataattaaactgacaccgtatggctctggatatatgtaactttttgagccaaagtgggtcaacggtgtcggtacacgttgcggcttcatccaatcgcttagacgtttcgttacaaaacgaatctcttcgtaaacgatgccgatttccgttgtatacgcttcaagcggtgatttatgcaactctttttttaacgtgtccgcgatggtctgttcatatttttgtatcgtttcttttagtcgtgttaattgttttaaacgaaaatcaagagaaagcgtttctcctgtatgaaagtagcgcttttgtttttcgagcaattcgttcattccgtttccccctcatcacacccgatcttgaacctttctgacaatattcgtaacgaatttacgtggcataaagcgaacactaaatgcaaggagtttattcgccacccccggaataatgacggttttattgttcattactcctttgtacccagcctccgctacttgtttaacatccatcacaccgcttttaaacaatttcgattgttgtaagttcgctcgatcggcaaatcctgtcgccgttggtcctggacatagcgcactcacagtgacattcgtgtgtcgcaactcgttgcttaatgcttctgaaaaagataacacatacgctttcgtcgcataatatacagccattaatggacctggctggaaagcagccgttgatgcaacgtttaaaattttcccttcgtttctttttaccatatctacgacgactagtttcgtcaaatgagtgagcgtctttatatttagaccaatcatatttaattctttttgtaactcagtccccacaaattccccatacaacccaaatcccgcgttattgactagaatatgcacatcaagttgctcgttttttaatgtgtcatacaaatcacggacttcgttttgattcgataagtctttattatatatccatactgctattccgtatgttttttctagctgatgcttcagttcatctaatttctgcttgtttcgggctactgcaataatgttatacccttccttcgcaaatcgtgtggcaaactcatagccaatcccacttgatgcccctgtgattaatacgttctttttcatttcttgtatctccttttaaacgtttaaaaacttaaacatataaaatgaaaaatttggcctttagcatatctaaaggcactccttctcaacagcatgaattaaatctttcaataattcaacagctttttcgatagataatacatagtatcgcaatgtccctttttgttctaccgacactaatcgttggtcacgcaaaatttttaaatggtgcgaaatcgctggacgcgataaacttgaccgttccgtaatttcattgactgttagcttatcgtgttccgcaagcagcaatacaatatcttggcgatgaggatcgcttaacgcttgaaataatggtatacacgatcgaaacacctcgatcgctttctgtcccattcccctcttcctttcttttgtttaaaagtttaaatatttgatgttcttatcttattctctttctctccaattgtcaatacattattcgaaaaatagatcttttaccttctcttcacctcccccctcaactgttcaacaagcgcctcttggtatcctgcttttttccgccgcaacatttcttgttttaccgcttgcaagtcataaagcgtaaccgattgcaatttcgctaagcgctcgtcggatagcggaacggtcggttttgtcgccaaataatcagaacagtcgtaatgccaaagccgcaccgattgcccgtaccgctcgacaaggcgctgcgccatttttaatccttctgggtcaaaatcgcccgaataacagagaatgactccttcttggacaagtaaatcaagcagccacatcgtcgctaaattgagctgaccgtttgtgctaatgagcggcacgttcgcatctaatagcgtcgaaaacacgcccgcattttcgacgacaaagacggtgttgccaatggacggatacgcccgtgtcaacggcattacttcccgaagcggcacatttagcgccgtattcgtttcgcatgcagcagcgaaaacaggatggcgacccttctctatttctgccatcacgccaacacacgtcacaaagtttaacacatcttcccgcaacagccgatacgactgcaatagttcgttcacgtcttctaccgacgaaaggtcgtactcggtgtccgcataaaattgcagcgccgaaagcaatagcttccctgagagggtatgcaaatcaaacgcatgggggtcgtttgttactttttgcgcaaacacaggaaggcgcgtgtaagtggacggaagctgttcaagcgcgcggcaaacggcagaaagtgctacctctaacgtttgaggagtttgttgatatgctaattgcacaaaccgctgcttctctaccgctatcagccaatcgcgctgtgctcgatacgtatgcatcaaccgtgtaaaatatgcttctttttcccgctccgcttctatctgctgttcttttttcgtcacaagcggttcgccaaaataatgctctaatagttcaatcagcgaaataccggcaaaccttgtattagtaagctgttgttcaaacgctgcgagcgacacacggctcatttctttgccaaaaaacgacgcaatcgcatctttttcttccattgaaaaagatgcaacggaaatcgtgccgccaatgcggccaagcgattcgtatttctttttcatttcgcaaaaaaggcggtgaaacgaacgttcaccgcgaaaaaattgcaccgcctcatctaatcggttcaatgagctcaccctttcttgcatcctcagcgacaagctgctttacttttccgttccaataatagcgaatgacggtcacgaacgaggcgtttttcggacgaacgagttcacaaatcgatagcgccggaactgtatcgtaatcgccccaaagcgcctgcgagttcatcacataattaaacccaagttgttcgacaagcccgaacatgttgcgaatattattttcgtctacccccgcgaacgcttcatcgagcgaaataatgtacggtgcatcttctgccgcttcttgatagcgcgaatacgtcgcggcaaataacggaatatacatcgccatcgctttctccccgccgctaaattgatagaaacgttggttcgtcaactcccgtttcggttcgttcgtcttttggtaataaagggtgaacgaaaaccatttccgataatccaacacttctttaataatttggtgcagcgtattgccttgaccacgctcttctaacaactcgcgggcgcggttaattttcgagcggaaatgtttcgtcactcgctgcaaatcttcctcttttaatagccgcgagttcatccgcaacaattcgacaagctctttcgtatccatctcttcttccgtttccgcagtgcgcggcttccattgaataaacaacacaagaccggaagatgtgtcgagctgttgcattagttcgttcatatcttttacccaacgctccgcccgttgaatgcggctgcgcaaaatccgcccgattgtttttaaaataatttcttcatacaattcgcggtcttgctctttcatatattcgcgctgcaagaaaatgtcatgctcgatttcatgtagtacataaaatggtgatacgcgctgccctttataatcaagcaaaaggacgatgcggtcttgcttttctctccaccctgcgacttttaattccatttcttcgtctaattcgatatcgataaatggattcgtttcctctaccgagactggctcttggctgagccggtattccgttaaattcgctgattcttgaaaaaagatgctatttaatcggttcacaagcgacgttctcgtttcttttaacagcgccccatatcgctgaatcgcctctttcgcctgttcgaacgtatcatgggcatgcaggtcaacaagttcaagggcgacctctcgctcaaacgaccgcttccacgcctccgctaaccgcttagcgaacgcttctttcaccaccaactgttcgcatttttcgccaatagcttttagctcatgctctagcgcgatacgctcgttcagtttcgctggcatttctcgctgtaaaaatgctaaccggtcacgaacgcgttgaatctctgcttgaatttcttctgcgcccattagttgcagcgtgcgttcgacttcttgccgttttagttcgagtttttgctgctcttttgcaagcacatgtcgttcaccttttgtttcatcgatttcttgttgtaccgtttctagctgttctgtacgatggcgaatcatgtcgagcaaatgaagaaactcccgatgaatcatttgcagttcgtgaagcccgcgcatatacgatttcataaagagaagcgcctgttcatagccgtctttggaaaactctaaatcgagtccctcggtgtactcgcgcaacgtttgttttgcttgttgccagtcgcgggctagttgggcaagcttctcgtttttccgctcccattcttgttgcttgcttatcgtcattcgtttcgttttttcccgttcttcaaaagctgcgcgcatgtcgcggtcggttggaaaggcgcgaaaccagctgtttatttgcgcaatcgtctgctcgagctgtttgagcctatcggtttgctcgtgcaactgagcacgaagctcaattaattccgcttcaagggcagcgattttttctagccgccaacgcttgcgggcagcccgtccgataaacagcgctttttcccttgccggagcatgccctttgactattccaagcgtataatgcccctcttcgttgagcataaacgccccgtccatttctctatcggcaagcacgatgctttggagtacttctttaatgcgcgcttttgaaaccccacactcttcatctacgtccggctgtaaatagtctgctaatgtatgcgccatttcgattgggcgtgggacaatcactcggtcacaacttacttcgacatcggtttccgtaatcaacgcatcgagcagcccagcgtgatatagcgcggattcaatccgctcccgaagcggttctggtacgtggtcttgaaattccactcctgcataaaacgggacgaaagcaatccctttttcgtctaactccg

SEQ ID NO: 1792 - DNA, 21641 bp, synthetic construct
  source 1..21641: mol_type = other DNA
  misc_feature 1..21641: note = Synthetic
taattataatcatgataataattaatatgttatatgattaatagtataataaattaggtaatataatatattaattatttctgaataatttacttttactctattaatgttaaattttattctcgcatttctataattttaatttttaaaaaatacgttatttactgtttttagtccttatataatagggttttatcttaatttcagtcataatatgagtttatagttatggtgagtatttagaactaaatataatgtttaaataaaatatattatttttcgtcaaaatagtgtataatgtggctaaatgtggattttaaataaaagttttccaacctactcttaattacatatactacgtttctatctattggagacaaaatcaaataattatatgcttttttaaagtccatataaagaaaatatcgactaaaaacaggaggcatagttaatggccaataagaaagtaatcatgtcagtaacactgggtgctgccattgctgcagcaacaatcggtgtagacgaagcggaggcagcatcatataaggtgcaaagtggtgattcgttatggaaaattgctcagaaatataatacaaatgttcagtcgttaattgatatgaataagcttcgatctgacatcatatatccaaaccaagttttaaaaacagatgcatcctcttcaggaagtaaaaccaacaatgccaaagatagtaaaagtcaaaacaatcaacctactaatagcagttcaagtaaatatactgtaaaaagtggggatacattaagtggtattgcatctaaacatagtatttctctgaatgatttaatgaagtggaataatttaaatactaccttgatttatccaggaaatgtcttcattgttagcaagccaagttctaatcatacgacttccgataataataacaaaaatacttcatcctccaattcaagttctattaacaagaataatagcgcttcaacgagtgtatatactatcaagtctggtgatacgctatctcatataggaacaagatatggtgtgacggttactaacttgaagaaatggaacaacttaagctcagatcgaatttatattggacaaaaactaaatgtcggagtaaaaaataccacggatacttcttctgtaaataagccaactacggaaaaagaaaaaccagctggtgtggactataatgtctccacacttatagaagtagcaaccgctttgcaaggttcagcctatgtatggggtggtacgacaacaagtggttttgattgcagtggttacatatattatgtctacaaacaagccggtaaagaaatgggtcgttattctagtacaggctactatgatcgttcttattatgtaaataatccaaaagtcggtgatttggtcttctttgaaggaacctataaatctggcatttctcatctgggaatttacgtaggagataatcaatttatccatgctggttccaaaggagtcgaaattgttagcttaaataattcttattggaaaaaacatttctctagttttaaaagattctattagatattaaaattacaaaagaccactttgatactatatcgaagtggtcattcttttttatatgcaaacttttttcaataaaggagtatttgggtggaatctcatcacggaataattgaatacaataaagtgagactaagcttcttgaggaccatacagatgattagcaccgtgataaaaatgttattgacagaaaactaaaacaggagtagatttaattgtgttaaaaaataaaagtaaacaccttttattcgcttaattcttttagaagcggggggggaaccattgttgatagacttgtctatctcagggggggttaatcttacttatggtaagacgggatactctctattcctaatccgacagctaacctcgtcagcgttatttgttttattaatgagagaagggtcgtgggcataaccgaagaccattatttgtattggtctttttttggtctttagacattcaaaaattgatgttgacaatgatgcagaagaagcaattaaatacagctgattttgtttattaggattaataagaaggactctacttttgaaaatcggaggagacatacaaaatgatgaaagttttaaaattaaataatcttagtccggcacaacttattgtattattttatgttttggctgtactcctatctgttgctctactaagcttacctataacccttaagccaggtattgaatggagttttgttgatctgattttcactgctgtaagtgctattagtgtgactggattggcagttgtatcaactgtggacacctttagtacacccggaattttcatactcttatttattctccagtttggtggaattggtattatgacgttaggtacattcttttggctcttaattgggaagaaaattgggttgcgggaaagacaactcataagtaaagaccagaatcgatcccatttatctggtctagtgcatttgatgaaacaaatattggcgattattatactgatagagtttgtgggggggcaatgatattaggtacttattttttgaactattttcctacatggcaggaggcatatctgcaaggtctgtttgcctctgttagcgctactactaatgcaggttttgatatcaccggaagttctttaatcccttttgcccaggattattttgttcaatttatcaacattatattgttgacattaggtgcaataggttttcccgtacttattgaagtaaaagattatttaacatctaaaaaattaaacaagagacatttcactttatacactcaattgacgacggtgacgtttttcgcattgatgctgtttggaactattgtcattttattatttgaggcaaatcatttcttcgctgataaaagctggcatgaatcatttttttatgcgttttttcagtcatccacgacaagaaatggtggtttggcaacgatggatgttagcgaatttactgtaccgacattgttggctatttgttttctaatgtttatcggtgcttctccaagttcggttggaggcggtattagaaccaccacatttgctgtaatagtattattgattttttcattctctaagggacagaaaaatattaaagtattcagacgtgaaattcatgaggaggatattattaaatccgtagtggtatgttttttagccattttaatttgttttatatcattagtaatacttacccaaacagagccgttttctttaatggagctgttatttgaagtttgctccgcctttggtacaacaggcttatcgatggggatcacaccagagttaagtatgattggtaaaatagttatcatttccctcatgtttatcggcagaatcgggattttgtcttttatttttattttccataaagaaacacaagaactgagctatcattatccaaaagaaagaataattgttggctaaattactaataaaagtgaatcaagcaaaacagaaaacagcttggttccttttttaagtgagaatgctataaggagaattttaatgacaggaaaaacacatattatgggtgggtttgcttctacagttgccattgcccactcttacacttatgaacccatattattttttatatcaggttcaaaagaactagagccacttttttcttcagtgaaaatagaggaagtgaagcagtttattgaaaaatatgagcaatctgttgtttgatatttacatgaaatctggagggaaagaaataagaattcatgcttaagaacatataaaggttgtaaagaaatccattttgccgaatagacaaaaatggattttctaatgtttatattgatttaattgcgtcctcaacaaatgcattgccttctaccgctttaaatgctttaccaatcgtggcattattctcaagagcagctattattactctagcgacatcttcgcgaggaatttcgcctctgtctactttctcgcctagctgcacttggtttttacctggattatttgttaggccaccaggatgcacaatggtatagtctagatcgctagctcttaaccattcgtctgcataatgttttgccacgatatacggtgcaaaagcatctggagcagactgaattgcttcacgacttgtatcaaaggagctaaccattacataacgttttacatttgcttgtttcgctgcttctatagttttaacagcaccatctaaatcaaccataagggttttgtctttaccagtttttggcccggatcccgcagtgaatacaatcgcatctacgccttcagccgcttttgctattttctcaatttcatcctctaaatccgctacggcaacttctgcacctaaatctttgaaataagatgcttgctcttctttgcgaatcattgctcttgcttccatgttttcttttttctgaatgaagtttacgagatgttttccaacttggccattagcgccaactactaatattttcacatgcttcaccctttctaatgtatttcactatttattgtaaatcgtaaaagcataaaagttaaatgatccaacttataaattattgtgaagtgtaaattattttggaaaaaaatagattttttccatataagttgaaactaataggtcagttaaaccgtcttattaatagagaataaaaactttgaaaaataccaagttggatatttttcacatcatgatttattttattttaatgatgtatttaattttatgctattggggtatatcaataaagagaggctatccgttaaggaaatggaaggagcagttataagtgaagagaatatctattttttttataatctgtttaggtctattaagtgcttgcgctaatgaggaagaaacagttaacatagatgataaggattttgctaatacgttatatgtccaaaaggtagaaaacaatttcacctctaaggaattgactaaaccgattgaagatcaggagatgattcaaagagtattaaccatggtggacggattacaggcagagaaaatgaccactgatgaattcattcagcaactagaaaaccatgacagttactaccgctttggcttttatggagaaagcggagtggaagaacaaagaaatcaatatgcttttcaaataatgacagatggtacaattatctttaattttgaccaaatcaataatcccagctatccgcttatttccgttgaaacacatcaaaatatcctaaaagaattgaaaaaggttttagagattcatttttagaagaaatctcacgatagaaagtagtaaactgtaaccacttatgcatgataaaatttcattaatttagtagcgactaccctaatatcccgttctgaagctaagtcaaatccattagcagttaaattcggtaactgtttttctaacagacctttacataattgtgaaaactcatctattgtctttcctttatagacagtatggttgtgttttaaccatttcttataaataggtatatcccgaactactattggaattttagctgctaaagcttctaataatacaattccctctgtttcctcatgggtcaaaaaaagaaagacatcacttccttcatatgcatcccttaattcttgtcttgagacatatcccgggaaataaagatttgccccccctttattctggatggcacgttttatttttgctggtacgatgtgtaaattggtataaccaaaccaatagaagcggtattcaggcatttgttctgctaactttataaaatctagaatgccctttcgttccatataatggccgacagagataattactttctcctcttctccaatatgataccttttacgaaatcgctggcgcccttccccccctgttggcttaaaaaattctgtgtcaataccattcgaaagatgatagacaggtctttttatcctataatgatctagaatatgtttcgaatagtctgttggagtcagtacaatatcaccgtgattatagcagaacgtaatccacttttaaaagtggggctaataaatttgaaccaataaaagaattacggaaatcttccattgtcgaatgagcataatagatcactcttttgttctttctcttcgctagccaggccatcatcagtgaatttggaaaaatagtgttgaggtgaacaatatcataatcttcttttttattaacggtgtatggaatatttagtagttctaatgcctttttttgatgcttgattgcttggccgattccacttttttttactaactcaatggaaccttcatatattagtactttcataatcatcctccgttactataaccataatatgatttggcgaaaaatccattcaagcccaaagctatagatcgtaataggtaaaggtttaccaactaaaataatcgatataaattttaaatacttcatcttcgtagtgccagcaaggaagcataaataatcatcaggagcaatcggtgaaaaaatagctagtgtgaaaagaaaatcaaaacgacgatgattgacccattcttgatatttaagacgaactcttttgctcactaaaaagctaataaatgaagtgccataatttcttgctatactataggtagctattgatccaatgcagataccgatgtagttataaattaagccatatattggtccaaatatgagaattccgccaagacaaccaatggcaccaggtacgacaggaagaattacttgtataatttgaaaaataataaaaagtataggtgcccaaatgccgaatttttcaaaaaaggtttccaacgccctttcagaataaaagatatcttgttgtaatccatatatgatgaagaggacggagatgagtaaagttaatatagtaaaaaaatgccacaatagcttgattatcttttttttgttcatttaaaatacgtattccgttttcaaatagtattctgctatcgtatgggcatatataccttccattttgatagcaaatgttttggaagagtagtcgcgaattgctccctccttggcatttaatgaaaatttttgatagagtaatggattagttaagagtgaatgtacagctttttgaaaatcggtatagtcgttatacttccagccatttttcccgtttgatataacgttctccaaacatggatcgtttttacatattgcaggaagtccgcatgccagtgcctctatataggttaaaccttgtgtttcactgttggatgcactgacaaacagatcagcaatctgataataagagacaatattttcaggcttgattaatccagtgaaaactactttcttctcaattgatagataggaggaatattgctgtaaatcattgcgatgtggtccatctccaactattaataatgtcaattttggcgtgtttaatttggaaaaatagtctaaaacctcttctatattcttttcctttgcaagtctgccgacaaatagaagaatctggtgatcctcggggatatctaattttttaagtaaagattgtttttgatcagggtgaaaatctgctagaaacggctttaaataaatacccgtaggaacaacgtgtacattttgattaacgccgtagctatttaatagtgattgcaccttttttgtgggtgcaatgatgcaggaagcatgttttaatacttttttgctaaataacgccaccatcgcttttccccccatttatgagtaggagaaaaatagtgtgtgtaatcttcgtataccgtatggtacgtatgaacaattggaatatttatcgttttagcaatctgttttgcaattcgaaaagtactaaattcacattggctatggatgatatccggttgccacttaatcatttcctctaaatatgaatgatgggtagataatgaaattcttgctccaggatatattttccccatacttaaggaactcatgtaatatatgtcactttcttggaaagatttattagtagtcgacaaggttagaacgcgcacatcatgtccgagaatctgtaattcttttcgtaaattcacaatagatgtaaccactccattaataacaggaatataacattccgttgtgattaaaattttcaatggtttacccccccatgtttgtgtcatggaaacaatatgcatccctgtatcaaaatagtataaagaattatcattaaggaaatataaaattgtattaaatatttgttaatttttaatttttgctaagaatggtgtatttctgatctgtgacagttttcattatgtataatgaataattggaggtgggctcttgtatgaaaagaaatcttagatggatactagcggtaattatattcttgagtgctatggtttattttacatctttaaccaattcaaaacaagtgcagaatgtaaataatttgaatcatgaggaatctgcttccctgctatctccggaacgaatagtaaatattgcacaccgtggagcatctggacatgcgccagagcatacaatccgttcctatgagtatgcaaagaaaatgggcacggattatttagagatcgatctacatatgactgcagatggcgagctcgtagccattcatgaccagaagcttcaacgtacaactggttatgatgggttagttagtgatatgtcattacgagatttaaaaaggttagacgcaggctcttggtttaatcaggagaatcccaaattagcgaaccccgatttcgaaaaaatgaagatacctagcttagctgagattttggatcaatttgggacagaggtcaattattatattgaaattaaagcaccatctgtgtatccaggtatgatcgatgaactgcttgaaacattatcgtttcatcatttgttagaagaaaataggagggaaggctctgttatcattcagtcctttagtgcggcaagtttaaaaaaggtacatcaattggatgcttccatacctttaattcaattattgcatcagaaacaacagaaattgtctgaagttgattttgaagaaatagcgcaatatgcaattggtgttggagcgccttatcaagcattgaatccagacttaatccataaaataaaaggtactgaccttctagtgcatgcatatacagttaatcagtcagaagaaatggaacagttattagactgggggggtgtgacaggaatctttactgattatccagatgtgttagcggatattttggaggatagatagaagggatgaatgggtttcttttagcgtatggagattcattggaactaatacttttcacttgttttttttacaaataaaaccaatatggtgtataatagaatcgtgagttagggaactcacagatcatatcgtactaaggtttataggaagttactatggtaaggcttttttaagccgaggcgttgggggggatcgccttatcggatcatccggcttctcccccgttaaaatgactaaagtaatttagtcatttttttcatatataaagaagtaaaaattatccttagttgggagggagtacattgaaatataatattggattagacataggtgtaacgtctgttggttgggcaattatcaatatagataaaaacagactcgaagattggggagttagattgtttgaggtggcagaaaatcctaaagacgggtcatcattagcagcccccgagacgagaagcacgctcttctagaaaaagattgagaagacggaaacatcgcgtagaaagagtgaaaaattttatcttatatagtaacttactacaaccgcaagaaatagaagaattgtatccgttaacacaagatgatggagatgtttggttattacgcaagctaggaacagaacaacttctgtctgatcgtgaagattgctagaattttgattcattgcgcaaagcatcgtggttatcaatcaaaccgtaaaagcgaagaacaggaagaagagtcaggaaaggttctatcagctatcaaagaaaaccatgaattgatgaccgaaaaaaatatcggactatatcgcatatgctcgttgatgaggaacgtccatatcgtaataaagatggtgactattcaggtgtgttattgcgttcagatattaaaaaggaaatagtggctatttttgataagcaaagagaattaggtaatcctttcgccagagatgaacatcgagatcaatacgtgaaaatatgggagtcccaacgtccatttgcttcaaaagaagatatattcgcgaagatcggtaattgttcgttggagaaaaacgaaaaaagagcaccgaaggcaacgtattcatttagtaagtttcgggcattagataaacttaatcggttacatattattaatgattctgttaataaacaaaagctttcttttgaggaaagagagttagtaatgaagaaaatttttagtaagcaaaaagcaacttatcatgatattagaaaaacactaaaactatccgatgatgagaagttcagtgaagtttattatgatgagcaagaaacattagcgaaaaatgagaagatagactttatttcgatgaaagagcaatatgagatccgacaagtgattaaaaaagaagttggtaaacagcaattagatgaattatctccaattgattttgatacttttggctatgcattaacggtttttaaaaatgacgaagacattcgtgactatttaaaaaatgaatttattacgagtaaaaagagaccgatgaagaatctagctaataatcgttatgacgatgaacttattgaagcattattaaaattgtctttttctaaatttagtcatttgtcgctaaaggcacttgataaaatattacctttcatggaacaagggaaatattatacagaggctataacaaatgcaggctataatctgcaagaaaagagagatttacctaaacaaagactattaccggttattcctgaagatgaaatacgtaatcctgttgtaatgagagcgctaacgcagacaagaaaagtactaaatagcatgataaaaaaatatggttctcctcatcatctttatattgaattagcgcgtgaaatgggtagaaatcataaagatcgcagggatattgaaaaggcatttaatcataaccgagcaataaatgaagaggcaaagaaagaaattagtaatttaatgccagggaaatcagatattacaggtcatgatattctaaagatgaaattatggcaagaacaaagagaacgttgtatgtattcgcggcaaccaattacaacagatcggttattagaaccaggttatgttcaagtagatcatatcattccttatagtagaagttttaatgatagtaatcataacaaagtgttagtgctatctgatcaaaatcaaggcaagaaaaacaagacaccatatgaatggtttggttatgatgaggatagatggaacgatttttgcacatatgtggataatctgcctattaccagaaagaaaaaacaacatttaaaaaacaaatcatttacaagaacggaagaggaatttcgtgatcgtcacttaaacgatacaaggtatatcacccgatttttgaaaaattatatagaagaaacattacattttgacagtaaatcgaagcaaaatgtttatccggtcaatggagcttacacagcagtattacggaaacgatgggggttttaataaggaccgagatgaaaatagtttacatcatgctttggatgcggcgatcgttgcgactagtagaccgtcccagcaaaaagtaagtgaatattttaaacaacatgaagagatgtgtaaacaagcactaaaaaaaatgaatattaggtttccgacaccatggaaagggtttgttcgtgaattaagaacccgcttgattcaagatcctgaaaaaatgaaagagttagtgaccattaacaatttgtatgaagatgattctaattttcgtgagcaggtaaagccgatttttccatcgtggatgcctaaacgttctgtgaaaggacaaattcatgagtctactttgagaagtaataagggcgaaacagaagaagggtatacacttgctgtcacgaaaacaaaactagaaaaaatcccatttgataagcaaactggacattttccaatgtatcgtaaagaagatgatatgaaaacatacaacgctattcgtgagcgttatttagagtatgaaggaaatgtgcaaaaggcatttgcagaaccactgtacaaaccgtcgaaaaatataagtaaagcacctatcattcgatccgttaagattgaagagaagaaaagtctttatgtatctgtgaaagaaagcgataagacaatagcctataatgcaagcattgctcgcacagatgtttatcaagacgtgaatacgaagaagtattatttgttgcctgtttatgtagcagatataaagcagggggggaataggcctaatcggtttattacagctttaaaaccatataaaagttggattcagaaagatgatcaacatcaatatcgatttagcttgtttcctaatgatttggtttatctacagctaaaaaagagtaaaaaaacaaaaattgcgaagaacaaaactgtggactggcaaaaaggctatttttactttaaaggagttgatagtgctacaggagccatatcaatcataaaaaatgatcatagttttaatgacagaacagggggggtacagtctttacttgtttttgataaatataatattacaccaataggcgatttgcaaaaggtgcagaaggaactagcttatggcttatagacatattgtcatacgcaatcctgctaagttatctgtgaaaaataaacagttagtgatcaaacaaaatgatagtatacaagtaccattagaggatatttgcactctaacaattgaagatccagctattaccctaaacggtgttttattaagcgaatgtgcaaagaatcatgtggagttaattgtttgtgaccaaaaaagaattccaaatgctattttacaaccatttcatcagcattccagacaaagggtcgtactggatatgcaatatagcttgtccaagccttttaaaaaaagaatctggcaaaaggtggtgcaatctaaaatagaaaaccaggcaagatgcctagagctagcctatttgtcagttcaagcagatactctttatacaatggcgaaacaagtggagtcaggtgataggacaaataaagaagcttatgctgccaagtattatttcataaaattgtttgggggggaacattttacaagaagaagagatgatcccccagaatattgctttgaattatggatatagtttaatcagatcattagtagcaagggcacttgtgcgttatggttttacaccttcgcttggaatctttcatgatagtcaaacgaacgcttttaatctagcagatgactttatggaaccgttacgcccttttgtagatattacggttgctcattatgtgagggaagattctgaatggaataataatatgaaagagaaattgtttaatgtactaagctatagttcttattggaaaggtgaaaaacaaagtattacaaatggagtggattggatggtcaaaagttatgtagctgcatgccgtaatggtgatactaattttctggtattaccagagttaaaatccttggaaatgcatgcgtatgagtaagtttatgagaattctagtatttttcgacttgccggtagtttccaagcgtgaaagaaaagcatatacgaagtttcggagatttttattaaatgatggttatgtaatgcttcaatattctgtttattaccgaatctgtaatggcgaagaggcagttcaaaaacatatgaaacgactgcaccaaaatatacctcctgtaaatggagcaataagaacattgaaagttacagaaaaacaatttgagaagatgggtatacttcttgggaaagcatctcctaacgaaaatatagattcaaaaataacagattttttctaaaaaaagcttgcagatgcaggcttttttattgaaactttaaattttttattaagaaaagtaaaagtatttcagtttttgaaataattaaaatggtttttagaaaaggaaaatgccgtaacccccccttgatataaaaggggttacgagggaaatatcatatcataccaagatttacagggggggaactatggctttgtcagtagagtttctgcaatacatagtaaaatcatatcataccaggagttaaaactataataacaggataattatctttaatagagcaagattatacactacatctaaaaaatgagtataaaattttaaataatgtatatacatatagtatacactactctgtggaggtgatataatggagacaaataataagaagaaaggagatgcagaaatgacgacaaaagttcaaaaatgggggggaaatagtttagccattcgaataccaaaacaagttgcaagtgaatttgacttggataagggttcagatcttgaaatagaaattttagataatgcgatcaaattaactccgacaaaaaggaaaccaacactagaagaaatgatgtctaaaataacacctgaaaaccaacatgaacctattgattgggggggaaaccggagggtaaagaactatggtgaaatatatacctaaaaaaggggggatattgtattcatgaattttaatcccccccaattcggacatgaacaagctggccatagaccggctatagttatatcgtcgcaaatatttaataaaggtacatttttgtttgcttgccctattacaaagcaagaaaaaggatatccatttgaagtaaagctaccaaggaagctttctgttcaaggagttattttagcagatcaacttagaagtttagattggcgacctcgtaaccttaccttcaaatgtgaagccccagttgaaattatagaagaatgttctcatattataaatgaaattttaaaataatgtaattgaatcacatcctattattttacttttttattataaaatgttaaatacatatcataaggctatatagggggggaactatggcttcataacatatatatatgcagattacaagcacttcccaaaacaaggattatccattaaaataatacatatatactattactctgtgcggagggatcatgatgacaaaaagtaatttttactttctagaagacagatggccgcccttggtaaattccgtttgtttgcggaaacaatgacaaaatacatattagcgtttgaagaagtggacgagccatatggcatgagccaagtggatcgactccgtttactatatcaggaacaggttttatcacgttctatcaatgagttatttcaaatgatcagaatgtctggaaacaaagcaacacatgaagcattatatggaacagttgaagaagctaagataattcatcgaaccgcctatcaattagccacatggtatatggaagtgtatggagattggaattttgaagtgcccccccctatcaagacccagaagattctcaattgatttcttcagaagaagttaatgagcttacccaacaatatgaagaaaagttagaggcaatcgaacaagaacttgcaaaaattcgcaagcagcaaacgacagtggaagcggattctaaacaaaaaagaacacaaactgcctatacactagctgccaaattagagcagaccgaaaaacaaacgaggaaatatattgatcaacaactcgcgcttgcaaattggaaagtggacactgaaacgattcgttatgcaaaaggggctcgtccgaaacatggggaaaataaagcgatagccgagtggccgttaaaaggtcgttatgcggattatgcattatttattggcatgaaattaatcggaataattgaggcgaaaaaggaaagcaaagatgtttattctacggtatcccaagcaaaggactatgcaaagctagtcgttcaaaaaggtgaggaagaaatttttgagccatggggagattgttttgtgccgtttctctttgccacgaatggtagaccctatcataagcaactggtactggtaaaacgagaatggcaattggtttaatttaccggttgattaaatccggcagattcaaccgagtgcttttcttggttgaccgtaaagcattgggagaacaagcggaagccgcctttaaagatagcaaaattgaaaaagaagaaactttttaccaaatatataacctgcaaacattagaggataaggtaccggagaaggaaacaaaggtacaaatcgcaaccgtccaagggatgttaaagcgtttattttctactgatgagaaatctaaattaacgattgatcaatatgattgtattatcgtcgatgaagcgcaccgaggatataccctggatcgtgaaatgagtgagtttgaaatgaaattccgcgatcatcaggattatgtcagtaaatatcgccaagtattagagttttttgatgcggtaaaaataggattgacggcaacacctgcattacatacaagagaaatatttgggggggatcccgtctacaattattcctactctttgaaaaaattgatcaagcacaacggttgattaaagaagtgaaggattcactggaagcaagaagagctagtgtccattcaaaagcatttaatggagagttgactgcaaattggaggatgcgaaacacttatggtgaaaatgtcgatacatggatctcaacttttagagagaataaaaagaaacgaaaatttaaaaatcaattagatgaaagtatcttaaacaacttatttgtcttacctaaggagtggcggtggatacggcttaacgaattaattaatgcttcaacatacggaacatcagctaaggcaaatgatgatcattctggcgtacctgttctaagaatgggaaatatagtagatgggtctattaaattcacaaatctgaagtatttacctcaaggacatggagatatagaaaaattagatttggaaaaaaatgatttactctttaatcgtacaaatagttatgaattagtgggtaaaacggcaagaattgataacgaatttgagaatgatgtaacctttgcatcgtatcttattcgagtaagattagtagaaaaggatatatttgctccctatgttactgaatatattaatagccacataggcagaagaattttgttatcgatggtaacgcaacaggtgggtcaagctaatattaactctcaaaaattagcttcgttaccaatacctgttccccctaaaaaagagttaatagttatttctaattatctaagttctttaaaagagaaagaaaatcgattaaaagaaattatgaatttagaaaaaggtacagcccaattaaaacaatctatactcaacaaagccttccgcggtgagcttggtacaaatgatccttctgaggaaagtgcgttacaattattgaaggaagtgttacaagcaaaggttatttaatctcactcttaaagacaaaggagctcgaaatcatgagagaattaattgagaaaattagttttattgaaaaaggcaaatttccaaaaaaggaattagaagaaatcatagcaaataaggaagaagcgattcctgagttattacaagttattgatcaatttatagatgatcccagtattacttcggataatcaaaactatttcgggcatctttatgcattctatctactttctcaatttagggaacaagcattgtttcctaaatttatgcaaacattacattggtcagaagatgaattaaattggactttaggcgatttccttacagaaggtagtggtagagtactagcttccgtttataatggtgatctagatgcgctaaaggaattgttagaaaatgaaaatgcctatgagtttgcaagaggtcaggcaatatctgcaataacgatactagtactgcaagagcagttggatcgagaagaaatttcagcctattaccgtcaactattaaaaagtaagaggatgacatcctatttatatgcagatctaattgcttctgcatgtgatttgcatttggaagaattagttccagatattcaatgggcctatgaagaagggttagtagattctggcgtaattgatttaagtgatgtaaaagctgaaatggcagaagctgaaacggcaaaattagagtatagcaaaagcgatatacataataaatacattgataataccattgaagaattacaagggtggtatatctttaacaaacacaaaactacaaaggcgaagttacccaaaatacctaaaaagagtttgaaaattccctcaggaaataaaccaattgttaaaaatcaaaaaattggtcgcaatgatccatgtacttgtggtagtgggaaaaaatataaaaaatgctgcggggtatcttaaactagggtctgattaatgttccagagatctaccttctatagtaacataatcatgctataattatgtttaaaaatataaaggaataaataacgaaagaaaacaagaagtgattattatgcgaatactatagggggggaaaagagaatatcaaaatcttatttaatgtaaaacaagtcggtcattcattctttgaccgacttgttttatattcacttaagcttttattccatttttcctggataatcacaatactcaataatcgttccttctgtatcagcaggatttaaataaattaagcgtctgccatgtttattaactcgtcgggtattttccatcacacggatacctttttcttctaaatcagtcctcaattaaaccttcttcttgtaagtagtgttgtgccacttctttggcgctgacaccttcttctgcgacctgataattcatctctctcatttgatcatcactaatctttccacctaattggttaagcacttcttctagctctggataccgatcaagggtctcctgacgcaatagtggtgcaccttggtatggtgggaagagattcttgttatcttctaatacttttaaattatatcttcttaattcactatcggttgaataggcatcgactaaattgatatcaccttcttcaattgctgtataccgtagctgaggttccatggttgtgacatttgggaagtttaagttatataaatcctgtatccctaaataaccatcttcacggtctgaaaattctagtgtgaagcctgcctttatctgtttctcaacggcttgtaaatccgaaatggtctcgagattatgttgatcagcaaaactttgaggtacggctaaagcataggtgttattaaattgcattggctctaggaatcttagatcaaattcttccaataacccttgcttcgcttggttatagacttcctgttcatcgttactagtagctgtctcatttagaaattgtgatattgcagtcccggtaaattctggtagatatcaatactgcctgtctttaatgcgttaaataaaaaggaggtttttccaaggctcggttctaattccacttccagatctgtttcctcttctattaacaattgatacatattaattaaaatttcaggttctgtgcctaattttcctccaattactaatgtatcttcctcgttatttaatacattaggtataatgataaacagcagtgaaatggtgataatcacaattaatgtcactaatgattgcttaaaggataatttttccatttttcgcaacaataaatcaaataacagagctaataatgcagcaggaatggcacctagaataataagtgatgtattatttcggtcaatacctaacagaataatatccccccctaagcctccagctccaattaaggcagccaaagtagcggttccgacaatcagtaccatcgatgttctgatacctgccatgatgactggcatcgcaatcggtaattctaccttcgacaatcgtttagaggtattcattcccattgcagttgcggcctcaactaatgaaggagctacttctttaatacctgtatacgtattacgcagtattggtaataatgcgtataaaatgagtgcaataatagcaggaacctttcctattccaaatagtggaataaaaagacctaataaagccaaagacggaattgtttgtaatacagcggtgacacctataatcggctctgcaattttttcttttcttgttaagtatataccgagcgggattgagatgagcacggcaaagaacaaagcaatgaatgaaatttggatgtgttcaaacaatgcttgccataattgatcttgtcttgcctgagctacattccagaaattagacatgcttttcacttccttttttaagtgacgttgcgaagtaatcgaccatgattttacggtcgacttttccgataacgttattttgtgatgtaacatatacctcatctctgttagataacgcatctaatacttcttgtaaagaagtggctacattcaccgtgtacgcatcttctggtggagtgtcagacagttggtgcaccgcatgcttcaataagaagtcatctccgatatgatgagaagagccaacaaagttgcggacaaaatcattagcagggtttgtcaggaactcctgcggtttacccagctgcactacttttccttccttcatcagacagattcgatctgctaatttaagagcttcctgaatatcgtgggttacaaatacgattgttttgttgatttttttttgtaaatcaataatgtcatcctgtaatttttctctgcttatcggatctaaggcactaaagttcgtccattagaataatatcaggatctgctgcaagtgcccgaatcacaccaatgcgttgctgctggccacctgacagctcactcggggttcgatgtcgatatgtatctgggtcaagtccggtcatttccagcagttctgtgactcgatttttaattttgtttttatcccaactttttaattcaggaacaatagcgatattttcttcaatggtcatgtgtgggaagagggcaatttgttgaagaacatatccaatattccatcgcagttcattgattttgtaatcacttattcgtttgttatcgacatagatggttcctgctgttaacggatgagtcgattcatcatttttaatgaggttgtcttaccacagccactagggccaattaagacaaagaattctcctttgttgacggagaaatctacttcactgacagcggttgttccatctggaaattgcttggtaacattttcaaaagttatcatgattatagctccttatacacataagttagaaatctctattagttcttttaccctttataacaaaaaacaatcctattatctaaacatttgccttatgtgttaactttgcaggtagcttaacagtgcatgagtagacacaggaattactgtgatataatgaaagaaaattttagtctaggaggaataagcatggacgactcttttgtagaacaatacctagaagctaaagactagaagtgcacgagccatttagaaaactagctcaaactatcgaacaaaatttacctgaaggatttaaattagtgatgcaatatggcatgccttcttttgtagttcctttgtcaacctttcctaagggatatcattgcgagaaaaatactccccttcctttttaagcatagatgctcaaaaaaatcacatatcagtctatcacatgggaatctatgcga

SEQ ID NO: 1793 - DNA, 21123 bp, synthetic construct
  source 1..21123: mol_type = other DNA
  misc_feature 1..21123: note = Synthetic
gtttcgagctgcgttcgacacgatgaagcacccactgctggagtttgcgaagcagcgtctcttcctcccatgggcttttcgtgaaaaaatggctcagtgtcgtgcgatggttcggatgaaaactcccgtgatgtagatcggtcagtgttcccgaaaagccctttgtaatcatcgcatccacgatatgaacgagatgcttcatcacaggtttcgagaaataaagggccaaccctaacatcgtgaaaaacttgtgaattccttgatgatgtgctaatctattcatgagacatgaacctccttgtgaatggtttgttggcacatctattctaaccaaggaatcgggttcatgtcttcttttttgtttggttgtaaatttatgttagtaaatttgctcatctacagtaagtaactttgcatcaggcgcaacccctactattccggatccatttttagatcccgctattatacctgctacatgagttccgtggccatttgtatcttcgaaaatggtaatgtctccaccatactcttctgtaaagttataaccacctataatatttcttttaatatctggatgatttattgcacatcctgtatcaatcacagcaactactactcccttacccgtgtaaccttttttccatttgtactctgctccaatttccataacactggaggaacgattttcttctgactgttctaattgaacaatcggaatgagtttcacttcatttgttttcacagttatacccccaaaaaatttttctttcttttcttaataaagaaacttgttaaaaatgatttacaaccttgactgaaattttttttgatatacagtcgaaataaaatgattcatttagaaaattttcgaaaaaagtaaattataattttagtaatttgtcacaaattgaaaggggttcacaattaagaaggccaccaattgatttgttagagtccattgcaaagatatatggagttgaaatatcttatctttttcgaatgatgaatcatgtacaaaaggaagggattttaacaatataatgggggagaggaaggactaactccataggatatcaaaaagattgttgatgctgtcctctcattaaataaagagtaaaatatacatctaaaaacctttttcaatgattgtttataaataatttcagtatcgttttaagcggtttaacaaaaatgttaactcgaaaataaacgagattaattttcatactgcgtagtgaaataaacttttttattgatgactatgttaaacttcggttttagtgtttgtgcaaaaagggagggtgttccaaaagtgataggatgccctcttttttgcttttataagaatttagcttctataaaaatgtaaggagaagggaagcgttcgttccaatccttcatatctttttttattaattgtaagcgaatacaaatcggaatgcttattcgaatgaaaattgagcggtgttacaataaaagtatagttaaacaattcttgttttcttttttagtggttttcaaactgaactcgcaatatttttcgattaacaatctttaaaagtcaggtttctacccacataacaagtacagaaaaggagtgtttttgaacatgctacaaagaattttaaaatctggcagtaacacactattagcagcgttataccttgttctatatacatgcaccttaaaaccatgacttctgtatgaacaccttttttcatggctatactgctcctaaatatttctatacaaaaggagcggaattggcatgaaacgtttgaaaatcacaaatgatcacggttggacgcctcgaacccttcggaaacaagaacggaaaatcaaagatgcttcccttcgcgttcgggtgaccgctgttcgtctcgtcatggaaggtcatctcggtaaagatgtggccaaaatggtcaatctgtgccgtcaatcggttgccatctacgttgcacgttttaatcaaggtgggctcgatcatctactcgatcgtcggttgccgcctggtcgcgtgccatttcttacggaagaacaacaacaagaaattagacaactcgtgttaactactacacctgtggatgctggctggggcatcgcttcgtcatggaacacgcgcattttacaatcttatattcaacaaacctatggcgtttcgatgtcacgggaagggattcgcaagttgttgcatcgtttgcgtttgtcatggacacgcccgacgtatagtcaaaggagacgctaagcgtcaagctgcttttcaaagagaacttgaatttataaaaaaactaattaccgagaatgttaccatgttttatgtggatgagacacatgttcgtgcttatcaagcgctacgtacgacatgggcagaagtagggaatcaaaaacaagtgccaagctacggacaccatgaccacgtgtccatctttggtgcagttgatgttcaacaaggcgatgtggtgtttcatcgtgcatcgtccgccaatgccgaaacgttccttgactttttgcgccgattgaaagagaaatatgcggatcgattcctcgtgcttgtgttagacaattcgcgtattcatcatgccaagatggtacaagcctttcttgatggcgaggaaggcgatgcttttcatttcatctttttgccaccgtattccccacagttgaacccgattgaacggctgtggaagtggttgaaagatgaagtgattgccaacgtttttcacaaggatcaaaacgatattgcccaatccattactcgttttgaacagtacgttctacaacacccggatgaggtgttgcgtcgcatcgggtgtactgcgtaaatcagaggttaaaattttaaattggatgtatatatatacgcaacaatacagcacattaaaagaaaaaacaaccgttttaacggaaaaagtgaaacaattgtacgaaacgtacgagcaattaaaattgaaacaaatgcaattaatgacgcgcttttatgtcgctgaaacgatgaaacaaatggatgaggcgatcacatctttccgttacgatcatatcgtaaaaggcttcgcacgtatggaagaaaaagtaatgttacttgaagcagaagcaaaagctcgctcagccattcaaacgttgccccctcaatcatttgatatagaagtcgaacaacaactgaaacaattaaaaggtgagtaatacaaaaggtgtccctatccggacaccttttgtatatgttatgtcgtccattcgtcatgaatgatgccgacaagtttccattgaccgttttcttgttcaaaaacaagacgtaaaatgaattgacttgttttgcttcgctttttaattgctcagcatctaactcactctttcttgttttctttcttgcaaaaatgatgaaaatgcgggaagtacacatgtatatacatgtttacaggtataaaaaacaaccggcatatgaccggttgtttttaatgccccgcatgaccagatgttaacacccaaatggatcctgcgacaatgacgatcgcaacaaacgctgaatatgccatattaataacgttcgtttttctgtcttcgccttccgttacgtgcataaacataaatagttgcagtccggcttgaatgaccgcgagtgagccaatgatccacatcacaattgtatatgatacgttcattttcaacgcaacaaatacggcgacaaacgttaaaactaacgaaagcaaaaatccaacaacgtgactaacgggatatttacttttatgttccatttacgccaccatcccttttaaatagacgaacgtaaaaataaagatccaaacgacatcaaggaaatgccaatataagctaataataaacatttttctcgccgtaactggcgtcaatccgcgttggagcaactggatgataagcatgattgcccaaatgatcccgaatgtaacgtgcgctccgtgtgtgccaagcaaaacgaaaaagcttgataagaacgcgctcgtttgcatcgttgctccttcgtgcacgtaacgaataaactcacgaatttccataaataaaaatcctgcccctaataaaagggtaatgacgaaccaagtaagcagttttttcatatcgcgttgtcgcatgaaaaagactgccaaaccgcatgtaaaactactcgttaacaacaacaacgtttgaatcagcacatcgtttagcttaaaaatatcgctcggcgtcgggccaccggcatagcggttacctaacacaccatatacagcaaacaacgtcgcaaataatacaatttctgcgccaaggaaaatccaaaatcctaaaatgttgagacggttttgttccgtctgatattcgagcggaagcgaatgattgacgttagccgacatggttttccgtccccccttctacatttctccacgtgcgctctgtttgtttaatttcatcgacgcttacataataaccgtcattgtaatcgaacgaacggataataagcccaataacaatcccaattgccgcaacagctgccgcgatatgcgcctcaaagacgaggaagaaacctgtaattccaaacacaacccccatataaaacggcaatccggagttgctcggcatatgaattttctttatgtcgctttcttttaatgtgagcgtttcaccgcgctttttcatatgccaaaacgcgtctaactgtttcacctctgggacgaccgcaaagttataaaactgcactggtgatgctgtcatccactcgagcgtacgcgcatcccacggatcgtgggaaacatttcgtttcgcataacggaagctccaataaatgttataacaaaataccgcaaaaccgatcgctaaaataatcgagccgatcgcagatatgaggaaaagcggcgcaaagccggattctgctgaatacgtatacgcgcgacgaaccgctccttttaagccaaggaaaaacatcggcataaacgtcacgttaaatccgatcgtaaatagccagaaatgatatttgccaagcttttcatttagcataaagccaaacatttttggccaccaataatacaaccctgcaaataccgcaaacacgacacccggaattaatacgtaatgaaagtgggcgactaaaaataacgtgttatggtattgatagtccgccgctgccatcgccaacatgacacctgttactccgccgatgacaaagtttggcacgaaggcaagcgcccataacatcgctgttgtaaattgaatgcgtccttttcgcatcgtaaatagccagttgaaaattttcactccggttggaacagcaattaacatcgttgtaatcgagaagaacgagtttaccgcaggacctgcatccatcgtgtaaaaatggtgtacccatacgagcatacttaaaaacgcaataccaacgatcgaaatgaccatcgacgtatatccgtacaacgtttttcgtgaaaatgtcgcaatgacttcagagaaaataccaaaagcaggcaaaataacaatatatacttctggatgaccccaaagccagaataagtttgcccaaagcatatcacttccgcctgaagaaagtgtaaagaaatgtgttccatacaagcggtcaaacgtcattaatgctaaagcgactgtgaaaattggaaaagccgctacgataatgattgacgtaatcaacgtcgtccacgtaaacatcggcattttcattaacgtcatgcccggtgcacgcatttttaaaatcgtgacgataaaattaataccagtcattaacgtcccaagacctgcaatttgtaacgcaatcgcatagtagttattcccgatgcctgggctaaattcttttcctgcaagtgggaagtatgatgtccaccctgcatctggtgaccctccaacaacgaacgaaatgttaaataacatcgccccgctaaaaaacaaccaaaagctaagtgcgttcaattgtggaaaggcaacatcgcgcgcaccgatttgcaacggaacgacgacgttcattaaaccgatcaaaaacggcatcgccataaacaaaatcataatgacgccatgggttgtaaaaatttcattgtaatgttgggcatctaaaaagttcatttccggccgagccgtttgcgccttcattaacaacccgtccatgccaccacggaaaaacatcaatacacctgataaaatgtacataatcccgatctttttatggtcgacggtcgttaaccattcacgccataaccaaccccattttttaaagtacgttaagccaacgacaatcgcaacgacagtcagtacaatcgcaatttgtgaaccaacaagaagcgggtctcccccaacaaatatttcattccacttaatgcccatgatgttcacctccgctatggctttcagaagcttgttgctcatcatctgtcacatttgatgtatgtcgatcattttcgtcaaaaatttttccttggtatccatgcccacgatataattctggatttgtgtacgtctttgaatgcggatcagcatggtttacccattgtaaatgtgtatcaacaaacgtcaatcgtcctaaatgggttggcaataacagctcttcatatttttctttcgttaatttcggtgccgtttgttttacttcttgtacccatttgtcaaactcttttggcgtttgcgctaaaacttcaaattgcatatgcgcatacccacgtccattaaagtttgtatttcttccttcgtacgaaccaggacgttccgcaacaacgtacaattctgtctccattttgttcatcgtatatttttgtcccgctaacgcaggcacccaaaatgactgcatagtcgatgcggaagtcattttaaatagcacgagacgattgacaggaatattgacgtagttcactgtttcaatattttgctctgggtagctaaaaatccatttccaatccgctgatgtcacgtgaataacaagcggatcttgatcttcgtaccccttcggaggcttttctaaatcatataatgttctcacagttgggatcgttaacgcaacaacgattaaaatcggaattaccgtccatacaatttcaagcaccgtacttccgtgttcttcaggcggctcctccccttgacgctcaggtcgatctcgatatttccacacaatataagcaaacaaagcaaagacaacgacaacaacaagaagcatccaccaaatcgaccagttaatcaactccgtaatgcttcgtgccgctggtccttgcggttgaaacacaaccatctcacagcctgcaagaagcggaagcaatccgactaccagtaaggaaaacaagcgcttcatcatttttcacctcaacaaaattgtgattcattgaacaagtaagtaaatacataacgaacgaatttaaataactttgtggtattagcactatcaaaatgattttaacatgtattgtagaaataattgtgacgaaaaaagtaaggaagaaactgcattgaggggaaaacaaaaagaaaaatcattgacaaaaagaaaaatacttttctcgacatcaaaaatcgtgcgagaaaagcgctatcttttatataatacatggaaataaaaaaagaaataggttgtccatttgaaattttgtcacattttcgttaaatttttttcgaaatttgttcaaaaataaaaaataactaatttatagaattttatgttgactttttcaataaaatcctctattatttatacaagatcgtaccacagcaacgatctcagggttactatgataagggcttctactttcagggagtagatgacccgtggcgttggggatcgcctatagccctttaagggcactccccattctatcacaaactcagacctcggcagaacgctgaggtcttttttattaaacaaggagggaaaacgtatgagatataaaataggattagacatcggtgttacttcagtgggttgggctattattaacctcgatgaaaccagaattgaagatctaggggtacgtatttttgataaagccgagcaaccgaagggcgaccctctttccctaccacgacgaatcgcacgatctacacgaagaagattacgccgcagaaaacatcgattagaacgtattcgccgtcttttagtacgtgaaggtgttttaacgaaaaacgaaatggacaacctattcaaaaaacatcatttagttgatgtatggcagttgcgtgttgatgcgctggaacggaaattaaataacgacgagcttgctcgtgtgctcttgcaccttgctaaacgtcgtggatttaagtctaatcggaaaagcgatcttaacacaaacgagaatagtattattttaaaaaaagttgaagagaatcagtctattttaagccgatatcgaactgtagctgatatgattgtccatgatgaaaaatttaaattccataaacgtaataaatcagaagactattcaaacatgatcgctcgcgatagcttagagcaagagattcaatatattttcagtaaacaacgtgaattccataatcctgtttgcactgagcaattcgagaaaaaatatttgcatatttggtcatcacaaagaccctttgcctcaaaagatgatattgaaaagaaagtcggtttttgtacgtttgaatcaaaagaaaaacgtgctccaaaagccacttatacgtttcaatcatttgttgcatgggaacatatcaacaagctaagattagtttcccaagaaggaataaggacgctaacagatgaagaaagacatttagtttacaaacaagctttttcgaaaaataaggtaacatattatgacatccgtaaattactcgatttgcaagatgacgtaaaatttaaaggtctcatgtacgatgctaatcaaccattaaaaaagacagaaaatattcgtttcctcgagctggatgcttatcataaaattcgcaaatgtcttgagcaagtttatgggaaagaagcattaacaatgttttcagacgatgattttgacacgttcggctatgctcttacaattttcaaaagcgacgaagatatttattcatacttacagaatgggtatatacgtgctgacggaaagagaacttgtaatttaactaataaagtctatgatgcgactctaattgagcaattgcttcatctatcgttttcgaagtttggtcatttgtcgctaaaagcaatccgaaacatactaccttatatgaaagatggagaaatatattccagagcgtgtgagcttgcaggatataactttactggtccaaaaagaaaggaaaaaacagttttattacctaatattcccaacatcgcaaatccagttgttatgagagctttaacacaaacacgtaaaatcgttaacgcaattatcaaaaaatatggatcacctgtatctatccacattgaattagctagagagttatcacattcgagcgacgaaaggcaaaaaatacaaaaagctcaagaaaagaatcggaagaaaaatgaaatagctattaagcaattagtagagtatggtctaacgaaaaatccaaccggcttggatattgtgaaatttaagctatggagtgaacaaaatggtcaatgtatgtactccttagaaagcattgagttagatcgcctgcttgaaaatggttatgttgaaattgaccatattttaccttatagccgtagtttagatgatagctatgccaacaaagcgctcgtgttaacaagagaaaaccgtcaaaaaggtaaccgcacaccagctgagtatttaggattcggaacagctcgttggcaaaagttcgagaactttgttttgacgaacaagcagttttcaaaagcaaaaaaaagaaatttgcttcgcttacattatcaagaagcggaagaacaagaattcaaagagcgaaatttaaatgacacaagatatatttcacgctttttcgctaatttcgtaaaagaacacttgaagtttgccgatgaagacaaaaaacaaaaagtatataccgtcaatggaaaaattaccgcccatcttcgtagtcgatgggatttcaacaaaaatcgtgaacaatctaacttacatcatgcagcggacgcagtcatcgttgcttgcgcttccccctcaatgatcgaaaaaattactaacttttataaagatcgcgagcaacataaagaactcgctaagaaaaaggaaccgttcttcccacaaccttggccgtttttttctgatgagttaaaagcaaggttgtcaaaatttccaatggaaagtataaaagctttaaatcttggaaattatgatagtaacaaactcgaatcgttaaaaccggtttttgtttcgcgcatgccaagaaggagcgtgacaggacctgctcacgaagaaactttgagacgttacgtaggtgtcaacgaaaaaagcggaaaaattcaaacagtagtgaagacaaaacttacagatattaaactagatgccgatggtcactttccgatgtacggaaaagaaagcgatccacggacgtatgaggcaatccgccaacgtcttcttgaacatgaaaacgatccaaagaaagcatttcaacaaccgttatataaaccaaagaaaaatggagaacctggtccaattattcgtactgtgaaaattgttgatatcagaaatctagttgttcatttagacgaaggaaaaacagtcgcctacaatagcaatatcgttcgcaccgatgtttttgaaaaagacgggaagttttattatgttccagtttacaccatggacattttgaaaggagttctaccgaataaggcgatcgaggcaaacaagccatattctgagtggaaagaaatgaccgcggaatactccttccaatttagcctttatcctaatgatcttgtgcgaatcgaattaccgaaagagaaaaccattaaagattcgttaggaaaagaaataaagattaaggatgttttcgcatacttcaaaacaattgattctgcaaccggtgggttagatttaattagccatgatcaaagctttccccccttacgcggtgtcggttcaaaaaccctcaaacgattcgagaaataccaagtagatgtattaggaaacatctacaaagtgaaaggagaaaagagggttgggttggcgtcacgtcatgatcagaaagccgagcaagttgtccattcgttacaatcaattagtcattgagcaagaagatacagtttccattcctttagaagacttatgttccataatcatcgaggaacatgccgtaacaattactgctgcaacattgagcaaaatggccgaatgtaatattgctttatttacatgtgatcaaaaacgacttccaaacggactattaaacacatttcaaaagcattctcggcaactaagcgtgctgcaaatgcagtacacttacactaaaccgtttaagaaaagaatatggcaacaaattgttacacagaagttaacgaatcaaggaaaatgtttagagtttttaagtaaagatggtgctgacgatctgtatcgtataagtaaaacggttgattctggggacacaaataatcgtgaagcatatggagcaaaaaaatactttcgttacttgttcggggagggttttaatcgacgaaacgataacacaattaatattgcgttaaactacggatatgccattatgagaggaattgtcgctagatcattagtcaattacggtttttttccatgtataggaatttatcatgacaatgaattaaataagtttaatttggcagatgattttatggaagttcttcgcccacttgttgatttacacgtagcacaacatattcaagaagatgacgaattttcatcttccattcgagccgacttatataatttagtaaatgcggatatactaatggataaggagaaactaacagtcaccaacgctgttgaagagatggtgaagagcttcgtaacagctagtcgaaacgaaaaaccttcgtttttaaaattgccggaacttcttcctattcaaatacacacctatgagtaagtttatgagattacttgtgttttttgacttacctgtcgtcactaatcgggagaaacggcactacagacaatttcgtacatttttattgaacgaaggatatgatatgttacagttttccgtatatagtcggatttgcaatgggcatgaatctgctgataaacatcttaataggctgaaaagaaacttgccaccgaaaggatcagtgcgggcgatgatcgtaacggaaaaacaatatgcaaaaatgcaatttctcttaggagaacctactaccaaggaaaaaacaattacaacaacgcaactgtcacttttttaaaaaaacggatgaaggataactcttctccccttctcacgttttttttaaaacgatcaaaaagcctgtaatcgttcatattacaggctttttgatgcacgtatcataccacagcaataacctcaggggaactatgacttgcttcatgcgctctatgcggatcaagttatcataccacagcaataacctcaggggaactatgacacaaaaaatgttcgaggtgataataatatgatcataccacagcaataacctcaggggaactatgaccgataaagcgattgaagaactgtataaattatcataccacagcaataacctcaggggaactatgacccagttttatcttttaaattattctcaagcatcataccacagcaataacctcaggggaactatgacctaatgtcttaataaattcatttatacgttatcataccacagcaataacctcaggggaactatgacgcgatccgtgtatgctacaagattcttaaatcataccacagcaataacctcaggggaactatgaccgtgtatttcggttgtgttattggagttttatcataccacagcaataacctcaggggaactatgactgaagaaaacagctaatgctggtgcaactaatcataccacagcaataacctcaggggaactatgactgaaaaatccagcttgctgcatgttcggctatcataccacagcaataacctcaggggaactatgactgaagaaaaagggagaaagccagttaaagaatcataccacagcaataacctcaggggaactatgactccaagtccaaccaagctaaagaaatttctatcataccacagcaataacctcaggggaactatgactctgtcaatgcttcatgataaaataatactatcataccacagcaataacctcaggggaactatgactttcgttccgttgaagaatacgacggatacatcataccacagcaataacctcaggggaactatgaccttaggtgtcttattcaaggataaattgataatttacatttggtcataaaaaccccttccaggtagactcttaagaacaccataacaaatgtccacttttttgttggctacctgtaggggataatacaaatccgtactttggatcagccttttttcatctcaataacttccgcacccatttgagcgcatgtggaaagtttgggtaacgcaacgggatatcaaatttcgtcgtctgtttgagcacgcttttgtaatgagtaaatgcatcaaagcttgcttttccatggtatgtaccgatgccgctttgtccaacaccaccgaagggcaaatgaggattggcaacgtgtacaaccgtatcgtttatacaaccaccgccgaaacgaacttgttgtaatacttgttgttgcacatcgcgatcttctgaaaacaaataaagcgcaagcggcttttcgtaatcgttgatcatttgaatcgcttcatcaatcgtcccaaacgtaagaatcggcaatatcggcccaaaaatttcttcttgcataatgtcatcgtcccacgtcacatcgtctagcaacgtcggctcgatccaacgttgttcaatgtcatacgttccaccatgtacaacgataccatttgttaaaaaacgcacgagccgttcagcatgacgaacagtaacaatacgaccgtacgcatctttatcaccgtataattgctctatatactgcttcattcgctcaatcaacaaagatttcaccgaaatatgaacgagcacataatcaggtgcaatacacgtttacccagcattcaaaaattttccccatacgattcgtttggcagctaaatcaatatgcgcggaggcgtcgacgaccgctggactttttccgccgagttctaatgtaacaggcgtcaaatgctttgccgcagctgccatgacgatttttccgaccggcacgcttcctgtgaaaaaaatatgatcaaaacgtaaatctaacagctgttggctaacgtctactcctccctctacaacagcaacatactcctctggaaacgcttctgaaatgattgttttcagcaatgccgacatttctggcgtatattcagacggcttcactaccgcacaatttcctgccgcaatcgcgccgataagtggactgatcgcaagctgaaacggatagttccacggcgcaatgattaggcttactccatatggctctggatatatgtaactttttgacccgaagtgcgtcaacggtgtcggcacacgttgtggttttacccaatcgcccagtcgcttcgtgataaagcgaatctcttcataaacgataccgatttctgttgtatacgcttcaaacggtgatttatgcaactccttttttaacgtatcagtaatcgtctgttcatatttttgtatcgtttcttttaatcgtgttaactgttttaaacgaaaatcaagagaaagcgtttctcctgtatggaaataacgtttttgtttcttgagcaactcgttcatttatttcaccctcgtcacacccgatcttgaacctttctgacaatattcgtgacataaaacgaacactaaatgcaaggagtttattcgccatccccggaataatgacggttttattgttcattacccctttgtacccagcctccaccacttgtttaacatccatcacgaaacttacgcaaggaagcccctgcctttaggcacggggaagaattgcaccttacgcaagttccgccaccccctttccataagcatatccgtcaaatcgctgaatgacttggacatatctataatttattccttgtgcgatacgctttccgtccttgcctttaatatcgaaacttccagtctttctacatgcgacttcgccaaaccaaacgccttgatatttccctcttgggacaacagccttaaccatgtcccctgtttgaaaaccaaagaagaatttttgtcttgcaagataacctcttgggaagccatatctatctaggtttgtacgagagcgactaccacgcccttttgccttgataaataacacttcttttgttttgaaatataagtgatttgttgtgctttcgcctacacaacaagcgtcaaaataatgtgttttcggcaagtctaaacgaatacgattcatttttgttcgtgcacctgttccacactcgacatctaatcctgtctgctttaacacttcatacgctttccatcttgtcgagttgatagcacttgtatcctttaatgtttctttgacttgcttttgaatgtgcggatacccgaattcttctgctgtcttacttcctttgcgctgattacagtcatgacaggcaagacataggttatccactcggtctgttccacctctcgattttggaatgatatgctccacttcaagtggaacattttcttttccgcaataacaacacttccgcccaaacttttcaagcaaatactcccgtacttcatatccttgtagcgtgccttgttgatactcaatgccgctgatttcaggatttcgcatgagttgcgtgtcgaatttggcattttcgtatgatatatacccaatggggcataacttctttaggcggttaacccatgtttggatattttgcacacgactctctagtgatggcggcaaccacccgtcttttctcctacgattaagaaaacgtggttttctgtatcgagtttttcgatttcgtcttgctcgacggaaagcacgccttttatctattctttccttgatgtctgtgcgatggtcaagttgccctaaccataccacttcttgtcctcgcaaaatcgcaagtcctgtgtgtttgcttccgtgatcgattttgagccgatatgttgctttaatttctgattcgtctactgattttttcaagatgatggtaaatggaaatcgcctgtaaatcgccgccttcccttgtttcaacagctttcttgcaactgcttcgtgacaaggagcaagcggacgtttgtttgtgtctaacacaaaaaccatagggttctcccctttcctctgcataaagcaggtcatattctcctcgaccatgttatagatgcttgttatgtgcaagacactagcgctacccaccacgcttgtttaaccttgcacgacagaggaacgggctggagaagcacccgaacgtgtcatgacatctataacgtaggctctgtttcaagccttggtctggtcaacatggggcttacaagcccatgactttagtcattgggttgttgacagtgatattcgtgtgtcgcaactcgttacttaacgcttctgaaaaagataacacatacgctttcgtcgcataatgtacagccattaatggtcctggttggaaagcagccgttgatgcaacgtttaaaattttcccttcgtttctttttaccatatctacgacgactagtttcgtcaaatgagtgagtgtttttatatttagatcaatcatatttaaatagatcctttaccttcccttcacctccctcctcaactgttccacaagcgcctcttggtatcctgcttttttccgccgcaatatttcttgttttactggctgcaagtcatgaagcgtcaccgattgcagtttcgccaaacgttcatcggatagcgggacggtcggtttggtcgccaaataatcagaacagtcgtaatgccaaagccgaacagatgaaccgtaccgctcgacaaggcgctgcgccatttttagtccttccgggtcaaaatcgcccgaataataaaaggtaaccccttcttttacgagtaaatcaaacagccacctcgtcgctaaattcaattgaccgtttgtgctaatgagcggtacgttcgcatctaacagcgtcgaaaacacaccggcattttcgacgacaaagacgttgtttcctacagacggatacgcccgcactagcggcatcacttcccgtaacggcacatttagcgccgtattcgttgcacatgcggcagcgaaaacaggatggcggcctttctctgtttctgccatcacgccagcgcacgtcacaaagtttaatacatcttcccgcaacagccgatacgactgcaatagttcgttcacgtcttcgaccgacgaaaggtcgtactcggtgtccgtataaaattcgagcgccgaaagcaatagcttccctgcaagtgtatgcaaatcaaacatatgcggatcgttcgctactttttgcgcaaaaacgggcaagcgaacgtaggtggacggaagctgttcgagcgcgcggcaaacagcagaaagcgccgcctctaacgcgtgatgattttgttgatacgctaattgcacaaaccgctgcttttctaccgccatcaaccaatcgcgctgtgctcgatacgtattcataagccgggtaaaataggcttccttttcccgctctatttcttgttgttgctcttttttcgttacgagcggctcgccaaaatagcatgacagcaactccacgagagaaatgccggcaaaccttgtattcgcaagctgttgttcaaacgccgcgagcgacacgcggctcatttctttgccaaaaaacgacgcgatcgcttccttttcctccgccgaaaaagacgaaacggaaatcgtgccccctatgcgaccaagcgattcgtatttctttttcatttcgcaaaaaaggcggtgaaacgaacgttcaccgcgaaaaaattgcaccgcttcctctacccgattcaatgcgatccccctctcatcattgccgctaacttttcatccgtaacaagctgctttatttttccgttccaataatagcgaatgaccgtcacgaacgaagcatttttcggacgaacgagttcgcaaatcgatagcgccggaacggtatcataatcgccccagagcgcttgcgagttcatcacatagttaaacccaagctgctcgacaagcccgaacatattgcgaatattattttcgtctacccccgcgaacgcttcatccaacgaaataatgtacggcgcatcgtctgctgcttcttgataacgcgaatacgtcgcggcaaacaacggaatatacatcgccatcgctttctccccgccgctaaattgatagaaccgttggttcgtcaactctcgtttcggttcattcgttttttggtaataaagggtaaatgaaaaccatttccgatagtctaatacttctttaataatttggtggagcgtattgccttggccgcgctcttctagcaattcgcgcgctcgatgaattttcgagcggaaatgtttcgtcactcgctgcaaatcttcctcttttaatagccgcgagttcatccgcaacaactcgacaagctctttcgtatccatctcttcttccgtttccgcggtgcgcggcttccattgaataaacaacaccaacccagaagacgtgtcgagctgttgcattagttcgttcatatcttttacccaacgctccgcccgttgaatgcggctgcgcaaaattcgaccgatcgtttttaaaataatttcttcatacaattcgcggtcttgctctttcatatattcccgctgcaagaaaatgtcgtgctcgatttcacgcaatacataaaatggtgatacgcgctgccctttataatcaagcaaaaggacgatgcggtcttgcttttctctccatccggatacttttaattccatttcttcatctagctcgatatccgtaaacaaattgtcctcctcagctgcgacaggctcttggctgagccggtattccgttaaattcgccgactcttggaaaaagacgctatttaatcggttcacaagcgacgttcgagcttctttcgctagcaccccgtattgctgcatcgcttcttttgctttttccaaccaatcagaaccgtgaagctctacaagctcaagggaaagctctcgcgcaaacgaccgcttccacgcctccgctagccgctttgcgaacgtttctttcaccgaaagctgttcgcatttttcacgaatggctttcagctcatgctctagcgcaatgcgctcgttcattttcgctggcatttctcgctgcaaaaatgccaaccggtcgcggacgcgctgaatttccgcttgaacttcttctgcgcccattagttgcagcgtccgctcgatttcttgtcgcttcagttcgagtttttgctgctcttttgcgagcatatgccgttcgcctttcgtttcatcgatttcttgttgcaacgtttctaactgctctgtccgatgatgaatcatgtcgagcaaatggagaaactcccgatgggtcatttgcaattcatgaagcccacgcatatacgatttcataaaaacaagcgcctgttcatagccgtccttggaaaactctaaatcgagcccctcggtttgctcgcgcaacgtttgttttgcttgttgccaatcgcgggcaagctgggctaacttttcgtttttcttttcccattcgcgttgtttgcttattatcattcgcttcgttttttctcgttcttcaaaggctgcgcgcatgtcgcggtcggttggaaaggcacgaaaccagcgggttatttgcgcaatcgtctgctcgagctgttttagcatgtcggttccctcatgaagctgggcgcgaagttcgtggagttctgcttcgagtgcggcgatcttttctagccgccaacgcttgcgggcagtgcgtccgataaacaacgctttttcccgcgccggggcatgccctttgattaagccgagcgtataacgcccttcttcatgaagcataaacgttccgtccatttctccatcggcaagaacgatgctttgaagtacttcgttaatgcgcgttttggacactttgcatccttcatctacatctggctgcaaatagtctgctaatgtatgcgccaattcgacaggacgtggaacaatcactcggtcacacgttacttcgacatcggtttctgtaattaacgcatcaagtagccctgcatgatacaatgccgattcaatccgctcccgaagcggttctggtacatggtcttgaaattccacccctgcataaaacgggacaaaagcaatccctttttcgtctaactccgcccgcgctgcgatcgtttgttcatcgcgcatgagctcggggtctttttgcgttttccattggttccattcggcttcttttgaggcgattttttcctctaataacgtgcacgtatgcttttgcttcattttttcttcgttttttcgattgagtgcttcgtaatacgcttccgtaaacggttgcttcatctcatcgacgtgatacgtttcgtatagttcgtgaagacgctgtaaaaatagttggacagagggttccggtacggaaacgtcttggcattgttcgagccagcgaaatacttcttgttggaaacgcgctttttcgttttctaacagttcgagccatttcgcttcttcatggcgcaattcgtctacttcccgctgcagctcccctgcctctttactcgtttcttcatagcgcgccttcatttcatcatggcggcgccaaagcacaatcgtttgttctagtttttcaacgtattcttgtccttctcgcttccagacggtaaaatcaaatttcgtttggcgctgtcgagcaaagtccgcttcgttaagagcatgggaagagaaggaactttccatcgcatcatgccgtaagtcttctacttgctgcgtgagttgcttttctatctgataccgccggtcttcgtcttcttctaactggcgcttatagcggcgttcgagctgctctttttcatcgatttgccgcaatagtttttgttgcttgtcatgaatgtcgcgtatttcttgttggactcgctcatattctttcgccgcttgaaacacttcgtggctcgctaattctaattctcgttgatgcaat

SEQ ID NO: 1794 - DNA, 19128 bp, synthetic construct
  source 1..19128: mol_type = other DNA
  misc_feature 1..19128: note = Synthetic
tctcataagctttaataacttcatatttaaactcttcagaataatgtttgccagacacagaaaaactccccctaagagaaaacagatttttattttttaatctgtctaccttagggggagcatatcagctcccagcatttcatcgcgccaaaaagcaagatcaaagctaatattccgttcgggcgccaaatccaataaagcgctcctcctatcagtccaaagaaccagatttttggagagatcacccccacaattcttccgccgtcaagaggatgaatcggaagcaaattaaataaattaatgatcgctcccagcgcgattacaagtccccaaaaaggatcctctgtcatccaatacagcggaaaagccggcaaaaacgccaatgtcccccacagcggcccggcatatgctaaataagcttcatcattcgctgattctggttgttttttcagcgccaccaccgcgccaatgaaagggagaaaaatcgctttagacgtcggtatgccttttttccgcgctgccatgagatgccccatttcatgcacataaatcagatagatcaacgccacagcaaacttccatccatagacaagcgcatataaaccaaaggaaataaataaagaaatgagagagcttagcttcaaaaattttgcaagcgccaacagccattttagctttccggccataaacaacccgacagtccctatcgtcacccacgcttttttcatccgtgtcaatccgttcaatcttcctttcatttgcgatgcattttaaattcaaggaacagttcattgtaatcagcgagcatccgttttcccaaattctcgtacacttctaatcggccaatcgaatggaaatcaggataaaaccgttgatcctttaccacttcttttggcatatattccagcgcttttttgtttggcgtggaatagccaacatattcagcattcgccgccgcatgcttcggatcgagcataaaattaataaactgatgcgctccttcaatattttttgccgttttcggaatcaccatattatcaaaccatagattggagccttcctttggcacaacatagtccagcttgtcattttccgcaataatttccgccgcatcgccagaccacacgaccccaatcgccgcttcttcattggccagcaacatctttatttcatcgccgacaatcgccttcacattgggcgtcaaggaatcaagctttcttttggcctgcaataaatgcgcttgattcgtatcatttaatgaataatgaagactgtttagcgccattcccatcacttctcgggccccgtcgacaagcaaaatttgattccgcaaatccttgttccataaatcattccagcttgtcagctttttgccgccaagcatttctgaattatagacgattccgaccgtgccccaaaaatacggcacagaatattgattgcccggatcaaatgatagattcaaaaaacgcgaatcgaggtatttcaaattcggcagcttggaatgatcaagcggaagaagcattccttcctctttcattttgctgatcgcatactctgacggtaccgctacatcaaaggtcgttcccccttgagcgatttttgccatcatagcttcgttcgaatcaaaggtttgataaatgaccttccatcccgtttctttttcaaattccttaatcagcttcgggtcaatatagtcgccccagttataaacagtcagcgtacggcttccggcatagccttctgattcatttaggcgataggatatataaagtaaagcggcagtaatcagcaaaacagcagcaaacgattgaacaagccttctcatctgcgccctccttccccatacaaacggccgcctttttggctaatgacataatatccaacgacaagaagaaccgtaaataaaaacagaagggtcgacaacgcattgatcgacaaggaaattccttgccgcgctcgtgaataaatttccaccgacaacgtcgaaaagccgtttccggttacgaaaaacgtcacagcaaagtcatcaagtgaatatgtaagcgccataaagaatccggcaaaaataccgggtgtaataaacggcaaaatgactcgtgttaacacttgccattgattcgcccctaaatcgtgcgccgcatccattaaagtcggactcatttcctgcagctttggcagcaccatcaatacgacaatcggaacactgaaggcaatatgtgataagagaacagagataaaccccagcttgattccggcaatcgtaaataaaattaaaaacgaggcaccaataatgacatcaggacttacgatgagcacattgttaaacgtaagcagcaaatttttggctctccgtctttttacataataaatcgaaagcgcccccgccacacctaaaatcgtcgagatcgtagccgataacaaagcgatcacaagcgtattgatgacaataattaaaaggcgaggatcatgaaatacctccttgtaccattcgaaggtaaatcgctgaaaatgatgcatcgtgccgccgctattaaacgaataatacataagataaaaaataggcatatataaaatgacaaatacgatcactaaataaatttgtccccatgtccgatttcgcttcatctgccttcctcacttccggtttcctgttaacccgataataaccgccattgcaatcattaaaaacacggcaatggtcgctcccattccccaatcctgggtcacgaggaaatgctcctcaaccgccgtccccagagtaatgacgcgattgccagcgattaaacgcgtaatcatgaacagagataatgacgggataaacaccgcttggcagcccgcttttacaccatccagcgtcaatggaaacacaacgcggcggaatgtcgtccatgcggaagccccgagatcgcgtgcagcatccacaagcgacggattcagctcttcaagcgcattgaaaataggaagcaccataaacgggataaaaatataaaccgatacgaaaacaaagctaaagtctgtaaataaaatttgctttttgccgattcccaacatttccaaaatagcattagccaagccgaacgttccaaaaatgcctaaaaaagcatacgccttcagcaacaaattgacccacgtcggcaaaataatcaataaaagccatagctgcttatgtttcgtttttgttaaaaaataagcggttggataagcaatcagcaacgaaagcaacgtaattaaaaacgcataccaaaacgaattcagcgccattttcaagtagataggagtaaaaaatttctcgtaattggcaatggtccattttccttcaatatcgaaaaaggaataatacacaataagcaaaatgggcgccgcgacaaataaagcgatccacaacacatacggaattaaataaaggttacgcacattatgtctcatggcggccatcatccatctcccccatgtgcataacatgaatcgcctccggttcaaaataaaggccgatctcttctccaacttccgcttttttcgtagaatggacaagccactcattgccgttttcatcataggcgcaaatttcatagtgcacgccgcggaacaacagagaatctacccgcacacgcaatttgccgcgctccggtgccgtcatttctaaatcctctgggcgaatgacaatctcgacgtgttcatttggcaaaaatccgctgtctacgcattcaaactgttttccggcaaattccacaagaaaatcttgaatcatgcgtcccggcaaaatgttcgattcgccgatgaaatccgcaacaaatcgattcacgggttcatcataaatatctttcggcgtgccactttgctggatttttcctttgtttagcacaaaaatttgatccgacatcgccagcgcttcttcttgatcatgtgtaacaaagataaaggtaatgcctaatcggcgctgcagctcccttaattcatattgcatttctgtccgcagcttcagatcaagggctgatagcggttcatcaagcaacagcacctccggctcgttcacaatcgcgcgcgcgatcgccacccgttgccgttgtccgcccgacatttcttgaattctacgattttcatatccttctaaattgacaaaccgcagcgcttccttcacttttttatcaatctcggcctgcttcatttttttaatgcgcagcccgaatgccacattttcaaacacatccaaatgaggaaataaagcataatcttgaaacacggtattcacttgccgcttattagccggaacctggttgatcggctgatcatgaaaataaatcgttccgtgcgatggctcaataaagcccgcaatcagccgcagaatcgtcgtctttccgcatcctgatggccccagcagcgtataaaactttcctctctcaatttcgaagcttacatcgtcaagcaccgcaaccccatcatacagctttgtcacacgctcaaagcggatgattgcatctttcaacttccagccctccattgtatgcaaaatcggcgaaccaatcattcgctttactatcattcctattagaacatgtgaaagtcgaaagcgcaacgggaaattttctaaaaaacagaaaagatccgctcctttccagattcgcataaagcaggagcggaaaaacggcagacgatgacaaaataagggcggcggagccatccatacaatgaagccgcctagaacaccgaagatcggaagagggtgacagacttgtctctgtcacgaaagcacacagcaaagaatcgaacagcaagcggtctgatgacctcccccacctccacttcgcttagaggcgggagacttctcgatggatgtattaaaatgagcaaatcggtcggcaagcggtaaaccgattatcacgaaataacgacagctaagctttaaggaaatcagagattcttctattttccccacacaatcaaaaaagatcgttccttctatattatccctgttagggtttcaatccctcatagttaagataaaaacccgatcggtatacaaaaaggcacaggaaatcgctgagtttcaatccctcatagttaagataaaaactatcgtgatctggaatatctttttcatctatagttcgtttcaatccctcatagttaagataaaaacgtgtttgaagacagcttccgtcatctgtcttcagcgtttcaatccctcatagttaagataaaaacctaaaaaacactgataaatcaaaggatggacaacaaatacaggttgattatacaactatttgaaaattgaatcaatatgtttaaaccgttgatatgataggcatgtttcgggataaaaaagtgtcgtcgatcccccggactttttgcatgattggaggtcgacgacaaaaagagaaaaagatttacctctcggaaaggaggcggaacatgccgaatccttgcgagtttcgtccttcgaggcctacgcggtataaaaaagttaaattttccggcgaggataaaaggcggtactgtccctgccaagctgtaatataaaaccctttaaacatcgtcacaactttgtcgcgcttcctaacatcaatcggttgaattgtcagcctttcgttcggctctctcccataatacacctcaaatttattaacttaccccttgaattttacaaaaaaccatttaaaatgaaaatatatcataccaaagcaacactctcagggttactatgataagggctttctacttttagggggtagaaatgacccgcggcgttggggatcgcctatagccctttttcaatgggcattccccattttactgcgatctcagaccttagcctccaatgctaaggtcttttttgttatatcaaaccatatagaaaggggattttcatgaattacaaaatcggactcgatatcggcattacatctgttggttgggctgccattaatcttgacttacgacgtattgaagatttgggggtgcggattttcgataaagcggagcagcctcaaggcgacccgttagccctccctcgtcggcttgcacgttccacaagacgtcgactccgccgacggaaacatcggcttgaacgcattcgtcgccttctcgtccgcgaaaatgttataaccaaagaagagatggacaacttgtttacgaaacgtggattaacagacgtatggcagctgcgtgtagaggcgctcgatcgaaagttgaataatgatgaactggcgcgtgtgctgcttcatttagcgaaacgaagaggctttaagtccaaccgcaaaagcgaaagaaatagtaacgaaaatagcgtgttgttaaaacatgtaaaagaaaatcgctccattctagacaagtatcgcacggttgctgaaatgattgtgaaagatgaaaaatttcaatatcataaacgaaacaaagcggatgattactccaatatgattgcccgcgatgatttgcaacgagagattcaacttctttttgcaaagcaacgcgaattcaacaaccctatttgcactgaacattttgaagcagcctatttgcacatttggtcctcgcaaaggcctttcgcatcgaaagacgacattgagaaaaaagtcggtttttgcacgttcgaaccgaatgaaaagcgcgctccaaaagcgacttacacgtttcaatcatttgtcgcttgggagcatattaataaactgcgacttgtttcccttgatggaaccagaccgctgacagaacaagaacgtcagctgatatataaacaagcatttacaaagaataaaattacttatcatgatattcgtaaacttctcgacctacctgatgacattaaatttaaagggcttgtatacgaagtagatcaactattgaaaaaaatggaaaatatccgctttctagaattggacgcttaccataaaattcgcaagtgcattgagcaagtttacagcaaaaaaggagtcgaccaattttctgaagccgatttcgatacgttcggctacgctcttactgtcttcaaaaacgacgaagatatttacgcatacttacaaaatgagtatgtacgagctgatggaaagaaggtttgcaatttagctaaccgagcatatgactccgcactcattgatgaattactaaatttatcgttttcaaagtttgggcatttatctattaaagctcttcggaacatccttccttacatggaacagggagaagtttattcaagggcttgcgaactagccaattatgattttacaggacctaagaaaaaagaaaaaacacggttgctcccaactattccggacatcgccaatccggttgtcatgcgggcgctgacacaagcgcgcaaagtcgtgaatgcgattattaaaaaatatggttcgcctgtgtctattcatattgaattggctagagatttatcgcgttccttcgacgagaggaaaaaagtccaaaaagaacaaacagaaaaccgtaaaaaaaatgaaaccgcggttaaacaactgatggaatacggactaacgaaaaatccaactggcttggatatcgtcaaatttaagctttggagcgaacaacaaggaagatgcatgtattctctcgagcctatttcgttggaacacctattagatgaaggatacaccgaagtcgaccatatttttccttacagccgcagtttagacgatagctacgccaataaagtgcttgttttaacgaaggaaaaccgccaaaaaggaaaccgaactcctgccgagtatttaggtgtaggaacggagcgttggaacaactttgaagcctttgtactgacgaacaagcaattctctaaagcaaagaaaaataatttgcttcgactgcactacggggaaacagaagaaaaagagtttaaagaacgcaatttgaatgatacgagatacatttcgcgctttttcgtcaatttcattaaagagcacttaaaatttgccgacagcaacagaaaccagaaagtgtataccgtgagcggaaaaattacggcacatcttcgcagccgctgggatttcaataaaaaccgagaagaatctgatttgcatcatgctgtcgatgcggtcatcgttgcctgcgcttcacctgatataattgaaaaaattactcgtttttatcaagaacgggaacaaaacaaagaactcgccaagaaaaaagaaccgtttttcccgcagccgtggccgcatttttctgatgaactaaaagcaaggctatccaaatttccgcaagagagtataaaagttttaaaccttggaaattatgataatagcaaactcgaatcgttaaaatcggtttttgtatcacgaatgccaaagagaagcgtaacaggcgcggcacatcaagaaacattgcgccgttatatcggtgaggacgaaccaagcggaaagattcaaaccattgttaaaacgaaactctctaacatcaagttagacgcggatggccacttcccaatgtatggaaaagaaagcgatccgcgaacatacgaagtcattcgccaacgcctgcttgaacacggaaacgatccgaaaaaagcgttccaacaaccgctccacaaaccgaagaaaaacggtgagcctggcccaattattcgaagcgtaaaaatcattgacgtcaaaaaccgagtggtgcatctagatgaaaaaaccgtcgcttataacagcaacatcgtccgcaccgacgtctttgaaaaagacggcaaatactattgcgtacccgtatacacaattgacattatgaacggcgttttgccaaacaaagcgattgaggcgaataagccatattccgaatggaaagaaatgaccgaagactatacatttaagttcagcctgtatccaaatgacctcgtaagggtcgaatttccgcgagaaaaagtggtgaaagattcgctggggagagaagtaaaagttaaggatatcttcatgtactataaaacgattgactcagctactggcggattagacttaatcagccacgatcaaagcttttctttacgaggcgtcggttcaaaaaccctcaaacgattcgagaaatatcaagtagatgtgcttggcaacatctatcaggtgaaaggagaaaagagggttgggttggcgtcatgtcatgatcagaaaaccgagcaaactgtcgattcgttacaatcagctagtgattgagcaagaagaagcggtgtcaattcctttggaagatatatgctccattttgattgaagagcctgctgtcaccgttacttccgtagctttaagcaaaatggctgagtataacatcgcgttgtttacatgtgaccaaaaacgcttgccaaacggggtgttcaatacgttccagaaacactctcgacaattgagcgtactgtacatgcagtacgcttatacgaaaccattcaaaaaacgaatttggcaacagatcgtcattcaaaaactaatcaaccaaggaaaatgcttagagtttttaaacaaagaaggagcagaagacttatatcgaattagtaaaaccgttgactcaggagatacaaacaaccgtgaagcatacggagctaaaaaatatttccactatttgtttggcagtcaatttacacggcggagcgataatacaatcaatatcgccctgaattatggatatgccattatgcgcggcattgtggcccggtcattagtgaattacggatttttcccttgcatcgggattcaccacgataatgatttaaataaatttaacttggcggatgattttatggaagtactgcgacctctcgttgatttatacgtcgcccagcatgtgaatccagacgatgaattttccgcatctatcagggcagatttatataatttggcaaatgtggatatactaataaatgacgaaacattgactgtggtaaacgccgtagaggaaatcgcgaaaagcttcgtcaccgctagcaaaacgcaaaacccttcgtgcttaaagttacctaagcttctcccgctccaattacacgtatatgagtaattttatgcgcttgcttgtgttttttgatttgccagttctcacaagtagggagaagcgagactatcgacggttccgcacatttttattaaacgaagggtatgatatgctacagttttcagtctacagccgcatttgcaacggacatgaggcagctgataaacatttggcaagattaaaaaagaatttaccatctcaaggatccattcgggcgatgattgtaacagaaaaacaatacgcaaaaatgcagcttctattgggcgaagcaactccaaaagagaaaacgcttaaaacaacacaactaactcttttttaaaaaaacacagccaatactcaaaatgctaacatctaccgctccgtttttccgcaatcaaaaagcctgtaatccttgaaattacaggctttttgacacacgtatcataccacagcaacaatctcaggggaactatgaccatcgagcctgaagctattactgttgttgtatcataccacagcaacaatctcaggggaactatgacctatgacagtgttgaagttgacatggtagaatcataccacagcaacaatctcaggggaactatgaccgacactagatttatgtggtataacactaaatcataccacagcaacaatctcaggggaactatgactgatttagaggtatttccttacgccaatatatcataccacagcaacaatctcaggggaactatgaccaagcgcaatgcaaacagagtattgcacgatcataccacagcaacaatctcaggggaactatgactgtgggtcttaaaaatatccttattatttgatcataccacagcaacaatctcaggggaactatgactttctgatgatgatgaatcggagtggagtcatcataccacagcaacaatctcaggggaactatgactttcttcagcttttatttctctccaacctaatcataccacagcaacaatctcaggggaactatgacgaaagctttgaaaagtgtgtcgaggaatatatcataccacagcaacaatctcaggggaactatgaccaagaccggtgccggaatgactttaccttcaatcataccacagcaacaatctcaggggaactatgactcataagacgtaaatccttttctgttaatcatcataccacagcaacaatctcaggggaactatgactgacgacatctcgatgattcatgatatggtatcataccacagcaacaatctcaggggaactatgacatccttgattactgagttgacacgcaccaaatcatactacagcaacaatcttgtaaatttgcaaattatttgttttacacattagctaattattttttgaatataatcacaaaattagacatacgggctttacatggaatggcggacatgttaggcttatggcctagcgagaaaagagttcccactcgcccctttcgccagaaaacatgtccgcagaagctctatatcaaaccatcaaatggtctttcttcaaacaaaaggaattaaatttgcacaatgttccatattttcgctagagtaatgcacaaaatctcgttagaatttgcaaaaaatgatcattttgttccaaaataacgtgctaattttacacaaatgttcctcaaatcaattttcagttcctcataggtaagataaaaaccacttgcggaatctgattcacgtatttgcgctgcacgtgtttcaatccctcataggtaagataaaaactcgcatggccgaattcaagcaagtgaactcgacgagtttcaatccctcataggtaagataaaaacaagaatgatcgttttccagccgatggtatacaacaaggtttcaatccctcataggtaagataaaaacgatggatattcgattgaatacatggcggattacttgtttcaatccctcataggtaagataaaaacacctcctaatgctaaatcatctaatgctcgttgaatgtttcaatccctcataggtaagataaaaactttagatgagtttcacgactatattgaatatctagccaagtttcaatccctcataggtaagataaaaaccccaaaaaaacattaataaatcaacattccgaaagcagttacactaccattataaacgcaacgtaaaagcctatcaactgtttgaacccttcatcaatacagggatttcatcaataaaaactgtcgtcgatcccctaggaattgtgcgctattggagagcgacgacaacttaaataggcttattccaaaatttcaaacatcccaaatccttgagaatttttcgaaccaatcccaacatcatacataaaatttatgtaatcataagacgcttcaatttcatatatcccattccacgcattgatcaggaaacctttaaaacttgtaatgactttatcccttcctgttacacgaacaggtcttattgtaacccgctcagttggctcttgttgaaagtatgactgaaacttgttgcaaaagttcttctcaaccatatctgaaaacacaacgtcaaaaggagaaaagaaatgagttctcttatttccatacctgttttcgtatgtgctataaaccgtcagaggagaaagcatgcgaattcgataagttttttgggcagaaagctgcaacgttgccgcttgcgcctcctccatatgaatcggctgtccattaaggttaaagtgttccttcaatacatagtttcttcccaaatcgacaataagagactccaccacagatgaaacatgccatgtcacttggtcaaaaaactcgatttttttctcatgccgatgtatacggtatgttccataaagccggctaaaggtaaatagtttaaacctccgcttttcttttgtatatccaacattgtgcaaaaaatccgcaaggtcaaaatcttgaatggaacggtataaaaatccttgcaacacttcttcatagttgatcggtaatataagggttccatcttttggtctaaatcgaatcgtaagcctcatctgttcctcctataaaatgttgtcttctccgccttttcgtaaccccatctcttcgcgtttcgaatatttttgcgtgcgaaacgtataaaacacaatagaatctgtattgggatccatgatattcgccagttccatttttagcttgacataattggcttcggaaatttccccttctaacaccgagttttgcacccaatataaatacttcctagcaatctttaacgctttggcgacacgctttttatcaaaatcatagacgagtatcacaaacatagcaacacctaccataacgagcgatacggctcatattctttttcgccgagaagatgcttttgtattttataaagttccaaacgaataagacggcggtaggacacggatttaccaagatgtctgtgattaactgttgttttcatgcgtttgtccaattcttcaataaatcttctccgtccctcttctgataacagtattccttccatatttctatcaaaatctttcttcgtcatcatcttcttgttgactaaagtaaaaatcaatcgatcgaccataatcggtttaaatatttccgcaatatccaagtttaacgaaaaacgccgaaaattcgtcgcgtgcaaaaaaccgatacgcggatctaaataagttttgtagatttcacttaacaccatcgtatagcaaaactgattcccaaagctaatcatggcatttaaccgattgagcggcggcctttttgaacgcttttcaaataaaaaatccggatgatggtttaaaatatcatcaaacatacgataatatttctcacgcacatgcccttctgttgacatcatttcctcgacgcttgtccattgctccaatttcgcccggcttgactggaaatcgaaaatcatctccttaaatttttcttgattggtttttacacgattttgataatatttcaacacttggatcatttgtccgatcgaaccgtcgataaatttccgcgctaaggcgagacgtttttccggatctaaatacgcttcggcctgttttaaaataacgtgtccggcatttaaatgttcacgtgggtaaaacgttcccgtataataaccgtgataattaaaatagtgaatacaaatacgtttttgcgccatgagctccaaaaacttcttggtgacattcacttcgccaaaaatatagatgtcattaatatcttcaacaggcaagacccgcttgcgctcagctgtttcaaaacaaatactattgtcttgccggaacaactcgccgctttgaaaaatataaagtgtttttttcatcatgattcctccgcaaaacaatattcacgataggcgcagcttcggcaaaattgaattttttttgattctggcggaataggtaaccgggcaatgcggcgaatatcagcgaccacttcttccaatactttttttccttcttctgtccatcccactttcgttactttcttttcttttggaaacaataactccccttttgcctcaatccccattttcttcaatgtatccagatagtacaagagttgatagtaggcacttttttcataggtggatgattttttcacttctccaacaaccaaagtgtccccctcgcgacgaatacggtccactttaatattgccaattagcatttcttttttctggcgctgatacgttgtttccgagatgaagcggccaatttcgaggttatcgtcctcttgatcggccgcaatttggtgggcaatcagccaaacctcgcgtttacaaataaagtagtaccaaatatgcgtgccatttacatccattacataatccatgcatccaccatctcactcgagcgaatcagtccatattcgctgttataatattggtttaatagatcattagacaaatgaagcattcgtgttttttcatataaatcgcggtctaaatttttcacaagctgaatcggtgccgaaattacgtactgaaggatatccctttttaaacgcaaataattttcaaatctcgtttctaaattgctttcttcgataacggtcgttatatattcttgccagattgctatagcgcggtcatccacttcgacaaacacatctactgcttgatgtgcgttttcaatcagttgaaattctgatacatattccggcttttgcttgattcccggcttatctttggcatcaaactttaactcttccatcgcttttataatcccatcggaggctgtgaacgatttagcgttttttacattggaaaaatattgatggatagcatcaaaaaattggtgttccaacatcgattcctctggaagcagttctttagcgatatttgtatggaccgcaccgtatacatatttggattccaacgccccatttcgttccatcggcgtaatgtacactttccctaaacaatccttttgcccgttgcggttgcagcgtcccgccgcctgtacaatggagtcagtcggtcccaagtcgcggtacaccacatcaaagtcgacatctactcctgcttccacaacctgtgtagaaatgacggctaccttttgcttctctttaagaaggtctttgatcgcttcaatacgctgtttacgttcgcaaggaacaatgttggtagaaaggtagaaaacatgataaccgtgctgcttcagccattttttgagtcgttcgtacacatcaatagacgttttaattgtattaaaaattgctaaatacgtttttccatcctcaaagtgaagttgaaattgttccatccactcatctacattgtatgtccctttgcttcccttgagccactgaagatggacacgctccatttcttgaaaaaagtgaatcggctgaacggactctgattctaaaagctctatcgtttcaccttgtggaaaaatgagcggctgtgtagctgttaataataaaattttgcaagaaaacaattcagccatattcgacagcacaacgcgcaacaacggccaatactcaactggcacgttttgaatttcatcgagaattaaaatgcttcctgcaatttgatgaaacttcttcagcgcccgattttcatagccgataagagtttgaaacagttgaacaaacgtcgtaataataaactcggcttcccagctttctgtcagcaacaaggcttgtctaagcggcaactcttgatggtctgtgcggtattgaaacgtggataaatgatgatgtttaaccaaataacgttgctcatttcctttgaaatcttgtaattgggcaagaagatcgtaaatcactttctcattttgatcaatgacgctcgtaaacggcagggcataaataattttgggcgtatatccctcatatttctgcgcgtgttcccgccattttaaagcaacagaaatagataaaagcgtttttcccgcccccgttggcgctgtcaatgtaaatagcctttgtgcagcattagtgcgggcaatttgttcgattcgttccatgaccgtcccatacattcggttgcgccaaccgtttgttccttcaagtatttccacatcaaaattcgcttggcgatattgatcgactagatggcccggaatatggacgcgcgagtttcgcttaatattagctgcagaccatttatcagcgtcgattaatacagagtataacaacaacgcataataatataattttgccgtaagcgctcctcttttccgtcgcgtaagcaaataaaattggcgatacgtttcatcaaaagcgttctcataatgttgtataaaatttgcaagttcttcagataaggaaagcgggatctgcaactcctcccatagtggcgataaatccccaataatggacgaggcatgcttttttatatcttccaattgaatttttaacgtccgcacccgatcatacagcgagcgctgtatgtcatcttcataaatgtcatttgaatctgttacatctagtgctatatcgcgcaaattcccatggtggtgcatgacggcaaaatatcctagcagcggagcaaattctgaccatgaagcaggcaagcttttggagcggcatagcaagtgtgcagcaaacaccgcagaaataaacgagtgatgatgtaaatctccttccgtctctttcgttcgcaaatacgtttgaaagtaagataagtattttccgaaatcgtgtgtgacggctacgatcttgcctatgtattgcaccgtttcgtagtcttctctcgataaaggtacatactcaagcagagtttttaaatattcatatacttcccgcaaatgaactactaatcttttatctggttttgtatgcgacaaatacatgcttccaccccctaaaaaatagcgcggcggtctgacatgcgcgctacatgaacaacacatgttccctttcgttgccgtacgtgacagtaacgtatggcacgttaggaacagcgaccaaccgccgcgacaattctagcaaatagtagtccgtctcgagaatggctcgttctttcgtaaaatggcgggtcataaattctttcacaaacctcgtgtcagttgacagctgaagcgagcgctcgcgcaaatccgagatgcgcgcgaccgaatggatcgggattaaaccgtctgactcattttgtaccccttccgcctccgcgatccactctagttgtccaagcaattccgacagaccgagatacggcgggtaaatatatcggtttgactgaacccgtttctttacatcttcataaatcaccgggtctttatgagaaaaataaacgcggtaacgcaatgccatctcttcttttctcggaagcacaaactcaagagggatttgcgtatgtcctgcactattgttaagatgaccctttgatgtcaccaacatataattgactgtttgtatcatttttcgaaccggggtgcggacggaaagccccacttggcattgatcgaatgaaaatggctcgtaataaccgtctctctcgattcctaagattcctgcaattaatcccacaatcgttgttcgcggcggaaagaaatatgatagagaagatgagttcgtatccatctttcgaaaatgccccatcttcccgatcaaatcaaaaatgagtatattcatacatgtcaccctttttacagcactgaaactagcttgcctgctacgtcgttaggcagaagatccgccaattgacctttctgtccttcgtagcttaacaataaattcgaatcttgccagtaataaacatgggcaatttcatcattgatttctaacaatctattcactagtgcatcgatccgaagttcgacttcagagatgctgcgcagcccctctgtttctgttaaactgattaaatcgcgcaaatctcccgctacaaattctggagaagtgtattccacgcgcatatatagacgcggatattgaccaactttactgcgggtggcactcaacggaatcgccttcaccatcgcctgatccaacaggcgaacatcgtcttccgcaagccgtgtatgcgtggcgcgatggccgctaacaatgccatgaaaggctaaaaatgagtagtatacacggtaatcttttccgatattgccgccatcatttttgttatccgaaccaaaatgcgaagtaatgctcgtcgattcaacaagcgtcactttgtttaatgagtagccccaattgaattgaatcggaccaataaatgtcatggaacttcctttatcctcagatttcaacggcatcgtcgctccaaacagccgaacatcaatgagttgatccaacatccaatcttgctgctctttcgataatttattaacatttacctttccttcaaatttgtcaaataaatgcttgattcgttcagtcgcgttgaccgtctctccatctacttttcctacaaaaatttctttgccgatttgttcaaagtaatcacggagatagcgttttaaacgaacatcgcttactaagttcactgagcgctcataatccatgcgcggacggttctcttcgtcgatgtcaccgttcggattggtcagcttggcatcataaagaaataacatatcgctattattcatcacttgctttcctccttatcattcttttcttttttggcgttctccaaaatccgtttcgttccataagcataacctgacaataaataaaaaacgctttcacgatctgataaactccatttttcctgcatggccgcatctaacaaatgtttatgctccgcgtaaataagctcattatgcgcagaagca

SEQ ID NO: 1795 - DNA, 16544 bp, synthetic construct
  misc_feature 1..16544: note = Synthetic
  source 1..16544: mol_type = other DNA
ttaacgaaaaaatttttgaaacaggacacacaaaaagaccgaaaaaatcggtctttttctttagtaaaatatcaacaataaaatttaacagagccaagaaaaaaactcggtgaagatcacgaacaaagcatcattaaaacggtgcgcggggtggggtataaaattgaagactaaactttgttccttcctttttaaaaacaagcatgatatgtttcggcgcacgcaatggcgcttaaccatgctttatagcggtctattaatgatttttttaatcgtctttatcgcgatcgtctcttcccttctttatgcgatcatgaccaacgaccaagagcgccgaatcaacagcttagccgatcaggaaatgaaagcgatcgaagaaattttgattgaacaagcagctctcggatggatggatgatcaaaacgtcatttttttaagtgaagatcaattctttttttatgtcatcaatacgcgcggacagctcatcatgggcgacgaagtccataaaggattgcgccccgcccttttatctacattacaaaattggacgccggaagaaaacgaactgaaatatatggatgtcgccgttccgcggcacatgcatcaattttcgcgctttcgctcatttgaattaaagctgctcaccgccgctcgtccaatcttcattcgcaatcatcttgtcggcgtgttatacgtcggaatggatgtcacttcatttttccgaatgtttaaatggttgcgtttcattcttggcggactagccattgcctttattggcgttgcggtgttgttcagtcatttcatgtccaaacgtgcgctcgttccgattcaggaagcatacaatcggcaacgcgaatttgtcgcgaacgcctctcacgaactgcgcacaccgttaagcgtcattttctcctccatcgaagcgctaacgatggacgaagaaatcacaacgaacgacttcagccaaaaaatattgcatcgactgcgcgatgaagtgaaacgaatgacaaagctcatcaatgacttattgacgctcgctcgctctgattcagagcacgccgctctcgagttagtgaaggaaacctttgattttcgtccacatgcggaacgaacattgcaatcgctggaagaactggcgatgaaaaaagaaattagcctccattttgacgcgccgccatcggtcaccgtcgtcggggatgccgataaattaacgcagcttttatacattttgcttgataatgcgatcaaatacacgccagatggcggagaggtctcgttaaagctcgatgttgtccctcacaaacaacaacgcttgcttatcatttcggtcaaagacacaggcattggcatttcgcgcgaagacatcggacgaattttcgatcgcttctatcgcgccgacaaagcgcgcacgcgccagcatggcggccatggcctcggtttatcgatcgccaaatggattgtcgatgcccatcaaggacgcattgacgttaaaagcgaagtcggaaaaggaaccgaatttattgtccgcattcctttttgatgagaaaaaggtgcttttcacagcgaaaagtgccttttttctttttgtccaaaaaatttctttcatccccttatttttcatctaattttcttttttcttttctacaatccaaagtgtaaacaagctaaggaggtgaaaaagtgaaaaagagaacgatcttgctgcttcttcttttagccgtcatcgctttcggggccatgcatatcgtgggaatgtttgtcggatttggcggcagaatgatcggggcgccaatgatggaaatgcctcatcatcacggtccattcggtggtcatcacttccatcacggtccacgaggcggaatgatgcatccaggcagaatgatgatattcggatggttcccgcttctcatccaattgacgatgatcatcatcggctggatcatctggaaaaccgccaacagcggatggaagtgggtcggacttggagtgatgggagccggattggtggcgcttctgccaaaaatcttgcttattccactcgctctattcgccgcttacgttttgtacaagaaaaagaaacaggagtctttcagcagcactttagcggaagaatggacattatcgacagcaccaacaatgaaacgagactttttagatgaatgggaaaagaaaattcaaaaggaggagtaacaaatggggcttttcaaacgagtcaaaaacgtcatgcttgccgatttgcatgatctcatcgacaaattagaagacccaatcagcatgacaaaacaataccttcgcgaattggaggaacaaatggagaaggctcaacgcgcactcgcacaacaattcgccatcgaacggcgctatgaacaactcatccaacaagcggaagaaatgattgaaaaacgcgcgcgtcaagccaaactcgcagtcgagaaaaatgaagaggccatcgccaaaatggccttacaagaaaaaatcgcctacgagaaaaaacttgccctatataaacaacaatacgaaacattgaaagaaaaaacaacctacttaaccgaacaactgaaacaattacacgaaaaatacgaagaactaaaagcaaaacaactcgacttaatcgctcgcgccaacgccgcccaagcgattaaagacatcaacgcatcgctcatttcctttaacccagaacacgccttaaaaggctttgcgcgcatggaagaacgcatcctcgccctcgaagccgaagcaaaagcaagcagctacctatacgaatcatacaaagccttgcacacccttccgcttcaaaacgaagtggaaaaagaactcgaacaactaaaagaagctaaatgatgagttcccccttttatatagatgcccccttgcgtaacgcgagggggttttgatgatacaatcttcttttccaatataatcttcctattgatacttggttgttttacaaaatctatgtctttactttgttattcttaattaatttataatttaattcttgtacaatgaagaaactacctaaaatttttaacattaatgtgaaattattgttgaattttccaaataaataatttatcatgaaaacaagatcatatcacagcaatgatctcagggttactatgataagggctttctacttcaggggtagaaatgacccgcggcgttggggatcgcctttagccctataatgggcactccccatttctatgcgaacttagaccttagcgaaatgctgaggtcttttttattacatatatataaaagggagaggaataagtagatgaactacaaaattggtttagacattggaattgcatccgtgggctgggcagtgattaaccttgatcagaaaagaattgaggatttgggggttcgtatatttgataaagcagagcatccacaaaacggagaatctttagcacttcctcgacgacttgcccgctccgcaagaaggcgccttcgtcgcagaaaacatcggcttgaacggattcgtcgtctgctcattcgagaaaatattctaactaaagaagaaatggaacaattgttccaacaaaaaaacttagtcgatgtatggcagttacgtgtagatgctttagaaagaaaattgaacaatgaagaacttgctcgagtgcttcttcatctcgcaaaatggagaggttttaagtcaaatcggaaaagcgaacgcaacagcaaggaaagcagtgaactgttgaaaaatatagaggaaaaccgttcaattttagcttactatcgaacagtggcagagatgattgtgaaagacgtaaagtttgctgaacataaacgcaataaatcagatagttatacaaatatgattgctagagatgacctggaacaagaaataaaaattatttttgagaaacaacgcgagttcaataatcctgtttgcacgaaacatctagaaaaggaatatttaaaaatctgggcatcgcaaagaccttttgcttcaaaagatgatatcgagaaaaaagttggtttttgtacatttgaaccaaaagaaaaacgtactccaaaagcaacgtacacattccaatcctttatcgcttgggagcacatcaacaaattacgtttagtttcccaaaacgacatacgtcctttgactgaatcagaacggcatcttttatacgaacaagcatttttaaaaaataaaatcacatatcatgatattcgcaaattacttaatctatccgatgacacatattttaaaggaattctttatgatcctgacacccctctcaaacaaattgaaaatattcgctttttagaattagatgcctatcataaagttcgcaaatgcttagaaaatgtttatggtaaagatgccgtaaagatgtttgatgaaactgattttgatacatttggctatgcgctcacgatattcaaagatgatgcggatatttatgcttatttacgaaatgaatatatacaaaaagatggtaagcacatacctaattttgctaataaagtttatgaagagcaattgattgaagaactactcaatttatcattttcaaaatttggccatctttcaatcaaggccattcgtaaaatccttccttacctagaacaaggagaggtatattcaagagcatgtgaattagctggatacgattttactggtccgaagaaaaaagaaaaaacgttgctattgcctaccattccaaacatcgctaaccctgttgtaatgcgagctttaacacaggctcgtaaagtggtcaacgcgattattaaaaaatatggttcacctgtatccattcatattgagcttgctcgcgatttatcacattcatttgacgaacgaaaaaaaatacaaaaagatcaaatggaaaatcgaaagaaaaacgaaacagctattagacaacttatggaatatggattaacaaaaaatccaacaggtttagatattgtcaaatttaaactttggagtgaacaacaaggaagatgtatgtattctcttgacccgattgagttagaacgcttactggaacctggttatacagaagttgatcatattttgccttatagtcgaagcttagacgacagctacgctaataaagtacttgtattgacacgggaaaatcgacaaaaaggaaaccgaattcctgctgaatatcttgggatcggtacagaacgttggaataaatacgaagcgtttgtactcactaataaacaattttcgaaaaagaaaaagcaaaatttgcttcgtttgcattataaagaaaccgaagaaaaagaattcaaagagcgcaatctaaatgatacgagatacatttcaagattttttgccaatttcattaaagaacatttgaagtttgctgaaagcgatgatcggaagaaagtttatacggtaagcggaaaaattacagcgcatcttcggagccgatgggattttaacaaaaatcgtgaagaatcagatttacaccatgcattagatgctgttatagttgcttgtgcttctccatggatgattgaaaaaatcaccgaattttataaaacaagagaagaaaacaaagaggtgtccaagaaaaaagagccacacttccctcaaccttggcctaattttgcagatgaactaaaagcaagactatcaaaatttccaaaagaaagtataaaagctttaaatctcggaaattatgatagtaagaaactcgaatcgttgcagccgatttttgtatcccgaatgccgaaacgaagcgtcactggggcagcccatcaagaaacgttacgcacatatgttgggattgacgaacgtagtggcaaaatccagaccgctgtaaaaacaaaactatctgatattaaactagacaaagacggtcatttcccaatgtatgggaaagaaagcgatccacgaacatacgaagccattcgccaaagattgctcgaacataacaatgatccgaaaaaagcctttcaagaaccactatataaaccgaaaaagaacggggaacctggaccaattatccgaacggttaaaatcatcgatacaaaaaatcaagttataaaattaaatgatggaaaagccgccgtgtataacagcaatattgtgagaacagatgtgtttgaaaaagatgggaagtattattgcgtccctgtctacacaatggacataatgaagggaattctcccaaatagagcaatcgaagccaataaaccatattctgaatggaaggaaatgaccgaagattacacatttaagtttagcctttacccaaatgacttagtaagaattgagctcccaaaagaaaaaacaattaaaaacacattaggtgaggaagtaaaaataaaagacatctttgtctactatagaacgatccattcttcaaatggcggactatatctagttagtcatgataatagcttccttctcgaaggcattggttcaaaaaccctcaaacgattcgagaaatatcaagtggatgttcttgggaacatctataaagtgaaaggagaaaagagggttgggttggcgacacctattaatcagaaagccaagcaaactatcaattcgttacaatcagttagtcattgaacaagaagagaaaatttctgtcccattagaagacttatgttccattgtaattgaagaacctgctgtgaccattacatctgttgcacttagtaaaatggctgaatataacattaccttatttacatgtgatcaaaaacgcttaccaaacggagtgctcaattcatttcagaaacactcaagacaattaagcgtactgcacatgcagtacgctttttcaaagccttttaaaaagcgaatatggcaacaaattgttgttcaaaaactaattaatcaaggaaaatgtttggagttcttaactaaagatggggcagaagagatttaccgaatcagtaaaaccgttgattctggagatacgaacaaccgtgaggcatacggagcaaaaaaatattttcaatacttatttggcagccaattcactcgccgaagcgacaatacacttaatattgctttaaactacggatacgccattatgcgtggaattgttgcgagatcgttggttaactatggcttctttccttgtttagggatttaccatgataatgaattaaattcatttaacctagccgatgattttatggaggtacttcgcccactagttgatctatacgttgccaaaaatatttcacatgatgatgaattttcttcaacaatcagggcagatttatataatttgaccaatgtggatatactaataaatggtgaaaagctaactgtatcaaacgcaattgaagaaatgatcaaaagcttcgtaacggcgagccgaaaccaaaatccttcgtttttaaaactgccggaacttctcccgatcaaattacacgtatatgagtaaatttatgagattactcgtatttttcgatttaccagttatcacaaaaagggagaaacgtgaatatagacgttttcgtacgttcttattaaacgaaggatacgacatgttacagttttcagtgtatagccgcatttgtaacggtcacgaagcagctgataaacatttaacaagattaaaaagaaacttacctcctcaaggatcaattcgggcgatgatagtgacagaaaagcaatatgcaaaaatgcagctacttttaggagaacctacaccaagagaaaaaacgttaaagtcaacacaattaactcttttttaaaaaagtaacgcatactaacaaaaatttctgtaacgaatcacttttttaagagttaaaaagcctgtaatccttggggatacaggctttttagcatacgtatcatatcacagcaataatctcaggggaactatgaccgacaacaacggaacgacgacggaattatatcatatcacagcaataatctcaggggaactatgaccctaatgcgcggtataacattaacaatactatcatatcacagcaataatctcaggggaactatgacttatccaggaattattcgcgcaaggcattaatcatatcacagcaataatctcaggggaactatgacggtcctagcgttgcaacgccgtttggcgcgatcatatcacagcaataatctcaggggaactatgacacttcgattttgagcgtcgcaaaactagaaatcatatcacagcaataatctcaggggaactatgacttttcaggatgataagttgctacatctttgatcatatcacagcaataatctcaggggaactatgactttgaacctgattttcgagaaaaagattttatcatatcacagcaataatctcaggggaactatgacattcgtctttgatttcgttctcaatccactatcatatcacagcaataatctcaggggaactatgacaatttttcttacactatctaccgaatctggatcatatcacagcaataatctcaggggaactatgactcatcatacaaatcatcataagacaaatttatcatatcacagcaataatctcaggggaactatgactcctctttcgctctttcttcttcctcttcgatcatatcacagcaataatctcaggggaactatgacccacctttcatttgaaaagtcgctggaaaatcatatcacagcaataatctcaggggaactatgacagatcaattaattctttgcactcattgataatcatatcacagcaataatctcaggggaactatgacctggaaaagcgctttgtattctgttcaatatcatatcacagcaataatctcaggggaactatgacgtgtgttaatcgcttcttcaatatcccatcatcatatcacagcaataatctcaggggaactatggacctcatagttaagataaaaactataaaaataataccataaaaagattttttgtttctatccatcttttcaaaactgtcgtcgatcccccagagtttttacacaattagaggtcgacgacaaatgttttctatcccccctccccaatcacccttcccttttcccatcattccatctcattttttctcggttttcacatctcaatcatgaccaattcttttctattcgccacattataccatttttctacatcttttttcaccaactgtaaaaccgtcatgatataatgaaaatgacttgtcctttgaaaggtggtgaaaaaaatggtagaggcgatgttgcaacaaattctccaagaggtcaaactgacacgcagcgacgttcaaacgttaagcaaccgtgttgaaaatctcgaaaagcgaatgacaaacgtagaagaacgattaacaaatgtagaaaatcgattgacaaacgtagaagagcgactaagcaacgtagaaaatcgattaacaaacgtggaagagcgactaaacaatgtagaaaatcgattaaacaatgtagaagaaagactatctaacgtcgaaagcgaaatggctggcgtgaaagaacgtttaactaacctcgaaagcgaaatggctagtgtcaaagaacgtttagctaatgtggaaggaagactatctaacgttgaaaacgaaatggttaacgtgaaagagcgtttaactaatgtcgaagaaaacatggtggtcttagaagcaagagtaaatgaaacaaaagccatttgcgaagcgattcgtcacggtcaagaagtattggttgccaaatatgattctctcgcactcgatatccacaatgtagtcggaacaaccacctctctcaccaactcactcgatgaaaaagtacttcctgccatcgatgatcacgaatcgagcctccaagttctcaacacccgcgttttcaaagtcgaaagcgcactgcagcgattagtgaattcctaaaaatttttaaaacggtgtgacgtttcagaacgccacaccgtttcttttattttttacatattcatatgatgagagtggttgccgccaagcgatggatcgagcattccaaaaatcatcgcaatatgggcgacaatcaaaaagatgccgacaaaaatggcgtggtatttcaatttttgttcctcattccatcctcggcccactatgcctaaatctaataggcttaatccgaataacggaatgacgcccattaagtaaaatcctactgcaatgatatcgatccatccgcgccattcgccattcattgtaaacggaatgacagcattaacaaacaaataaataaaaattcctaaaaagtaaaaaccgacgatgatgctgcatatcttattaattttacgcatcattccgtcgaaacggcgcgtaaaaaggatcgccagttctgttaccgcaatggtctcggcaagaacaacaggaatagccataaacaaaatcaaattccaaggttgattcaccgctaaaagctccatgtaatgagtcatattcatccaaccaccccctgcatatattggttacaaaattcatatgtagcaaccatttgtgcattttctttgcaaaatttgagaataatttttgacaacattcgccggacctttaacaaatatggatgacaaatataatggaagaataaaaaaacccgctggtcatcgccagcgggtttgattttatcgcttattaatttcttctaacaatagcttattgacaagcggcgggttggcttgtccttttgtcgctttcataatttgaccgactaggaagccaagcgcgcgatcttttccgtttttgaagtcttcgatggattgtgggttggcatcgagtacttcaagaacgattttgcgcaatgttgcttcgtcggagatttgcacgagacctttttctttaacgattttttctgggtctccgcctttttcgacaagctctttaaatactttcttcgcaattttggaagaaattgtgccgttttgaatgagcttgatcatgccagctaagctttctggtgttaaggcgatttcatgaagctctttttgttccgcatttaagtaagcggacacttcgaccatgagccagttggaagcaagcttcggatcagcgccgtttgcgactgttgcttcaaagaaatcggccatttctttcgtgagcgtcaatactttcgcatcgtactctggcaagccgagctcctcgatgtagcgcttcttccgttggtctggaagctctggaatcgttgcgcgaacgcgctctttccattcgtcgtcaatataaagcttcacaaggtctggttctgggaagtaacgatagtcttcagaaccttccttcacgcgcattaacacggttgtttttgtcgcttcgtcaaagcggcgtgtttcttgttggatgactccgcctgagagaaggattttctcttggcgtttcgcttcgtattccaagcccatgcgcacgaagttgaatgagtttaagtttttcaactctgtttttgtaccgaacttgtcggaaccgattgggcgaagcgagatgttcgcgtcgcagcgaagcgagccttcttccattttacaatcggatacgcctgtatattggatgattgattttaatttttccaaatacgcatacgcttcttctggcgaacggatatccggctcagaaacaatctcaatcaacggtgtgccttggcggttgaagtcgactaatgagtaaccgtcgcctgtgtgcgttaatttacctgcatcttcttcaaggtgaatgcgcgtaatgccgatttttttctttttgccgttcacttcgatttcaatccaaccgtttctgccgattggttggtcatattgcgaaatttggtacgctttcgggttgtctggataaaaatagtttttgcggtcaaatttcgtttctgtcgcaatctcgcagttgagggccattgcggctttcatcgcatattcgaccgcttgtttgtttaaaacagggagaacccctggataacctaagtcaatgacgttcgtttgagtgtttgggggtgctccgaagtcggttggactgcttgaaaagatttttgactttgttttcagttcgacgtggacttcaagtccgatgaccatttcaaagttcattcttcttacccccttacaacgctggtttttgtttatggtaatccgttgcttgttcgaacgcatgagcaacgcgatagatcgtgctttcatcgaaatgtttaccgatgatttgcaatcctactggcaagccattgacgaatccgcatggaattgagattccaggcacacccgcaaggttcactggaatcgttaaaatgtcgttggcatacatggttaatggatcgcttgttttctcgccgattttgaacgctggcgttggcgttgttgggccaatgatgacatcgtatttttcaaatactttctcaaagtcttgtttaattaatgtgcgcactttttgcgccttcttgtagtacgcatcgtagtaaccagagcttaaggcgaacgtaccgagcataatgcggcgttttacttcgtttccgaatccttcgctacgcgttttcttgtacatatcgattaagttttccgcgttttctgtgcgatagccgtaacgaacgccgtcaaagcgcgcaaggtttgcggatgcttcagaagatgcgagtaagtagtaagtcgccaatgcgtattttgaatgcggaagtgatacttcttcccatgttgcgccaagtttttcgagcactttcaacgcgtctaatacagattggcgaacttcttccgatacaccttcgcctaaatattctttcggcacggcgatttttaatcctttgatgtcgcctgttaacgcggatatatagtctggaacctcgacgttcgcagatgtggaatccattgggtcaagacctgcgatcacttgtaacaaatacgcgttatcttcaactgtgcgtgtaattggtccaatttggtcgagcgaagatgcgaatgcgacaagtccgaagcgagaaacgcgtccgtatgtaggttttaaaccgacaacaccgcagaacgctgctggttggcgaattgaaccgcccgtgtcagaacctaacgcaaacggaacttctcctgccgcgactgctgctgcagaaccgccgctggaacctcctggtacgcgctcaagatcccaagggttgcgagttatttggaatccagagttttctgttgaagatcccatcgcaaactcgtccatatttaattttccgatcgtaatcgcatcggcttcatgcaagcgctgcatgacggttgcgtcataaatcggatcaaagttgtataaaattttacttgcacacgttgtgcgaagcccttttgtcacaatgttgtctttaattccaatcggcatgccgaaaagcaaaccgaattctttttctgtcgctagtttttcgtctagttcttttgccttgcggcgagcgttttcttcatctaacgttaaaaacgcttgcactttgtcttctacttcagcgatccgtttaaacgattcatcgactaaatcagagacagaaatttctcttttatgtaataggctacgtaattcggaaatcttatgatcaaataaagccatcgattcttccctccttactctaaaatggctggtacacggaattgcccgtcttgatggtccggtgcgtttttcaatacttcttcacgcggaagtcctggtgtcgggatatcttcgcgcatgacgtttttcatatcgagcacgtgtgaagttggcggaacgttttctgtatccagctcgtttaattgttcagcaaatgtaataatcgcgtctaattgcttcgtaaacatttccgcttcttcttctgtaatcgctaagcgtgccaaatgcgccacatgtttcacttgttcaattgaaattcttgacatcgttttcacctccaacaaattcgacctgccacaatactatgatgataccaaactttctttcattaaagcaacatttgcaaaacaacatttgccatgattcaatcatacaaaatctcctatggagattacactaaccatttacttgataaatccgaacaggcagactagaattggaataaatattcattttaaccatattgaagggggagaggaatggcaaaatgaatattacatttgaccatctcgtccattttacaaaaagccctgaagaagcgaaaaccgcgtttcagcttatcggatttcatgcgataaacggaggaaagcatccttcttggggcacatataactgcctaaactactttaccggactgcgctacattgaatggatcggctttacggactttgatcaagcgaaagcttctgacaacgtattaatccagcaaatcgtcgcagactcccataaaggggagggcttttcacaattggcattccgcacaaatgatatggatgctgtcattgaccacattcaggcaaaaggactaaagccgattggtccgtttgccggaagccgaaaacgtgaagatggcaaagtattaagctggtcgatgctgtttatcgaggacgaacaagatgatacgtgccgttatccgtttttcatccaatggggcgaaccggaagaagcccgcgcgaaggaaatggtaccgcttatgcagcacagcatcggatcgccatctctttcgtatattgggatgaatgtaagcaaccttgacgagtcattgcaaaaatattgccatttattcgatgtgcctcgccagtctgtaacgcaaagcaaggatgaatttggcacctattccgaacttccgatcgggaacatagcggtccgcttgtatgaaacaaaaagcctcactgctccaatcggccatactcttatcaaccgtccgtttttatgcggaataaccggaatgccggaaaacaagaccgtccaggtaaaaaacgggatatatcagtttaccgcttaaattgcttccactcaacaagagggaagcctttttgtttcagtgccttcttagatgcccagcaccatgaacagaaaaagagaatgctcccctcaagcatcctctttcatgcttatgaaatccatccggcttttttctttccttttaaaaattgcatgatcacccatgcggcggttcggcttgtgatatcacgaaagtccacggtcggatccacttcaacgatatccattgctttgacgattccatattctcctagtgcagcaattgcttccaataacgtatagctatccattccgcctggacctatggcgggacatcccggcgcgaacgcttgatccaaaacatccatgtccaccgaaacgtaaatcgcatccacttcttgtttcagtttttcaatgctttcccttacaatctcctggatgggccgttcgcgaacgtctttcattgtataaatcgtgaccccgttctgttttccgtactccgtatacgctttgctgttcgcaaaatcgcggatgccaatctgaatcagatggtttccatccaatgttcccgactcgattaaacttcgaaacggcgtaccattcgttggccccccgtcttctaaattgcgcaaatcgtgatgggcgtcaaattgaatgaccccgaccttctcccatcgctttcggaatccgcgaatcgccgggtagctaatcgaatgatctccgccaaggaccagtaacaacgaatcgggattgactgtcacgatttgttcgatcgtttcagcaattctctcttgagattggacaagatcggtcggatgcatcaaaatatcgccgcaatctgtcacctttatatccgctaaatcgatattctcctcaacggaataagtggtgtaggaagaaagcatttttcggatggcactcggagcaaaagacgctcccgagtggctgatcgaagacttcgataaaggagctccaatgaggcagacctctcccgcctcatttccgttccacttctgcaagatttcatttgcctttgtgacatgacggtcttgaaataaagctccccctgcttctttaagaaagcgaaacattgacatcgtatcccccctttttcaccaccacttttccttcttttaagaccatgtggacatgattcactccgtaatgataaggaacatacgcataattcggtgcgtcccaaatgacgatatccgcctttctgccaatggcgatgcgtcccgcttcctccccgcggttaatcgcataagcggcattcaccgtgacggcatgccaaatttcttccggtgtcatgttgagctttagggccgctaatgacataatgagctgcaaattttctgtaggcgaacttccgggattgaagtccgtcgccagcgcaacagacgctcccgcttcaatcatctcgcgcgctcttgcgtatttttctttcgctaaataaaacgaagttcccggcagcaaaacagcaatcgtatttgacttcgccagctgcgcgatgccaacatccgatgcgccgacaaggtggtcaccgctgaccgcgcccagttcaaccgctaattccgttccgccaagcggttcgatttcatccgcgtgaattttcacggcgaatccaagcgattttgccgcttgtaaaaacgcgcgcgactgctcgaccgtaaacacgcccgtttcgcaaaaaatatcgacaaattcggccagctcttctttttgaatggtatgaagcaaggcggccatccgctcaagaaactcgtccggattgtctttatgctccggcggaatcgcgtgcgcgccgagaaacgtggagac

SEQ ID NO: 1796 - DNA, 23129 bp, synthetic construct
  misc_feature 1..23129: note = Synthetic
  source 1..23129: mol_type = other DNA
catgaaggagacttctacggtttgcgagaatggcgaaccggcgatcccaaacaatggatccactggcgcacgacggccaaacgcaatcagctggtggtgcgtcagtttgaaaagcagagcgaacaggatgtgacgatcattgttgacgcctgggtatcgccccgctcgacggcggcagaagaagcgagcgtcgagcgaatcgtcagcatggccgcttcggtcgtcgccgatctctcggcggtcggaggctgtcaaatgtacttggcctgcgccggcgccaaatcaaaaaatctccatggttcggtttcgcaggcgttcgtgcacgaagcgatgaccatgctggccgaagtgacgccggcgacgcatgacgccattgatcgggcgctgctggaagcgctgcgcgtcgggcgaaccggcaaggtggtgatcctcagctcacgcaagctggagctttccgacaccaacacgttccagcaggtctggaacgaccacacggtgcggtccgagatcggacgggttatgtacctatcggacgctcggggtgagttagaaaacctattcatcgacggcgcccaaattaacgctgagaaggagtcgtcatgaaggtcgaacggctactgcagatcagcgttgcggttttggcggcgctgggtgcgatgttgctgggcgggggtgagacggatgacgctgcattgccgattgcggcggtggcggcggcgttcatttcggtttacgtgaccgacattcagcgatggttcagcttgaaccgcaatctcgccaacatcgccgccttgttggcggtcgcgttctcgatctccgacttctggcccggcgacagtacccaaaaactgcaggcaatcgccaagttgctgatctatctgcagattgtgctgctgttccagcggaagtcgacgcgggtctattggcatctgtgcgttttgagccttctgcaggtggtggtcgccgcggcgctaaatctgaacgtctcgtttggctttatgctggtcgcgtatatgttcgccgcgctgacgacgctcagtttgttcttcatctatcgcgaaacggtccgcgtcgatcccgttttgaaagccgagcacgatgcgatcgacaatcgcccggtctttgccttgtttggcgggcgagacgagttggtcgacaatggtgaagaagggggcgaagcggtcgtgctgcaatcgcggttgccgaagaacctggcgaccgtcttttcgagttggcagatgttcgtgcaggtctgccgcttgggattcgttacgttgatcgcgaccgtcgtcgtcttttacgcgtttccgcggcccagtcgcgaccagtggggcggccgatttgcgggcggcctgcgtgagaccggttttaaagatcagatttcgttcgatcgcatgggccgcatcatgcagagcgacgaaatggtgatgcgggtcgcgtttcgcagtcccgtgaccgacgcaccgcgcgagtcgccgattgagccctatttccgcggaacggttctcaatcgatatcaaatccagacctcgagctggattacgacctattcgcccgatgacgagggggccatcgagttgccgactcctcctccgggacaagagatggtgcggcaagtcgtcgtcttgaatccgcggacgcggttggtgcaaacggcgcatgggcatctgttgttcagcgtctatccggcttatcgcgatcggctgacttccagcgaaatcatcgacgaccggatggccgggttcctgtcgtacgccacgcccgacgttctgggcgccaaaccgtcgcaatacaacgtgctgattccctggcgacccgcggaaatggagaatcgcttgctggcggtcgtaagtcgcgggaaggacaagaacaagctcgattaccgcactcgagagtacttgaacacgctggacgacatcgaggtcttcgccttcggacagttgcagcagacgactcgtcaggtgatcgccgacgccaagattgatcccaaaaatgatcttgagatcgccgagacgttggagcgattttttaccgacgagggggagtttagctacacgctcgaaatcgatccgcgcgtccgcgatccgaatcttgatcccttggaggacttcgtcgtcaatcaccgctcaggacattgcgagtattacgccggcgccttagcgctgatgctgcggtaccaacagatcccttcgcggatcgtcgtgggatacaaagggggcgagtacaactcggtcggcggctacttcgccgtcaagcaaatgcacgcacacgcgtgggtcgaggcctacatcaaacacgaagatctgccggagtcgcttcgcgataactatccggtcggcgcgtggttgcgactcgatccgacgcccagcggcgagaccgacgcggtctacgaagaagacgatggcctgcttagcaagacgctcgattggttcgattatctcgaactgatgtggcgcgattacgtggtcgagatgaattcggaacgccaagagaacgcgatctacaagccgtttaccgatcgcatttggcggccgctgggcggttggttcaactacgaagagtggcgacagtgggtgaaagaccaggcggccaagatcggcgtcgatatcgaaggggaatggtttagttggtacatgagcctgctgacgatcttctgcacgatcgccggtttcggcatctaccatttaggccgcttcctcgtgcggcggtttggcgtcccattctggcgttgggttcgccggcagttgcacttcaatcggcatggcgtcacgttctacttacagttggaacgccgcctagcgaagcgaggcatgcgacgcaagccagggcaaacgccgcatgagttcgtcgactccctccgcgagcgtctgacgccggtcgccatggacgccatcgcgcccatcgtcgaaacgtactaccgcgtccgcttcggcggcgctatgctcagcgaagaggcgctggccgggatcgacgagcggatgctgatcttgcagacggagcttgatcagattgatcgagccccacggttctaaccgaaccagcgcattcgcattacgtggggtggggcaacggcagcgacacgtcgcgcggacgatcctcaagcttacgccctgatttttccatggcgtaggccaagatttggtcgcacgatagttgcaagtccggcttgaaggcgccattctcgtcgcgaaatagggaagcgtcgccaaaccagatgtcgggccagaagaccaagtcgcagatattagcgttgggaaactgcgtctcgagccacgacacgtaatattcagattgatgttcttcgtcaaatccggtggtcgttaagacttcgatgacgtcagccgcttcgcgataggtcaggtcttccactagcagcggttctggaacccaagcgctaaggacaaactgttccttgtcggttgtcttccaatagttggtgaactcatgcgtttcgcattttcgacttgtccgcgcgtgccaacgcgcaagtagcgaagaggcgtcatcccctgattccaatgcatcttcgatctggtcgcaaagctcacccaattccgccagctgttgcggcgtcggcttcggaaggcgaaatcgctcgggaatcggcatgacgcttccagttgcgagctacacgttaaacaagaagtggcaaacgtccccatcctgcatgatgtacgccttgccttcgacgcgtaatttgccggcgtcgcgaatcgctttctcggagtggcactgctccaggtcggcgaccgagtaggtttcgcagcggatgaagccgcgttcgaagtccgtgtgaatcactccggccgcttgcggggcggtggcgccaatcggaatcgtccaggcccgcacttccttctcgccggcggtaaagtagctttgcaggcccagcagcttgtacgccgcccgggcgaacgcgtgcagagccggttcggtcaggccaacgctttccagcatctcattgcggtcggcttcgtccagttcagacaattccgcttcgagccgggcacaaactgggacgacttcgcccccttcttcttcagcgcgagcccgcactttggcgaccagatccccttcgcctgctaggttgtcttcgtcgacgttggcgaggtacaacaccttcttggcggtgatcaaaccgagtccgcgaattcgcttggcgacttccggatcagtgatcgacatcgagcgaatcggtttgccggccgccagaacttcgtagcattccgacaacagctcgatccgggccttggcttctttgtcgcccgaccgggcgcccttggcggcgcgttctttcgacgattcgaccgtttgcaggtcggccagcatcagctcggtgtcgatcgtttcgatgtcccgaatcggatcgaccgagccgtcgacatggatgacgtcgccatcgtcaaagcagcgaaccacatgcacgattgcgtcgacctcgcggatgtgcgacaggaacttgttacccaggccttccccttcggacgcccccttaacgatgccggcgatgtcgaccagctgcagcaccgccggaatcaccttttgcgtcttgatgaactgctggatcgtctccaggcgggggtcaggcaccggaacgatgccgacgttcggctcgatcgtgcagaacgggtagttctcactggcgatgcctgccgcggtcaaggcgttgaacagcgtcgatttgccgacattggggagaccgacgattccagcttccatagctaactgacttctatctgagggagtgtgattgttgcgccaagccgttgattttacccgaaaacgccccaccggtaagcggtgctgccgaagctgggcgaaccgatccgcggcgggaaacggaaaaagcgtcgatcgctgggcgatcgacgctttgacttggctgattggccgcgagcgaggggcgactagtacgagccgcgtcccaggttgcgggggctgcgggtcggcgtggcgctgcgggtcgacgttgagttcgacatcgaggtcgggtagctctgcgtcgtgtaggtcggctcggcataggtccgcaccgaacggctgctcggctgcgtgtagacgtgaccgccgccttggctgctcatcgtcgtctgcgacccttcatagataatgtccccttcttgcgggccggcgtaagtcggaacgccatggctgatgtgggcgccatgagcattcccacagccgcaatccgggccgcaatcgccgccgcagctcgagccgcagccgcacgaagcctggccgcactcgcaacagcggttgccgtagcggacgcccaggatgccgggatggcagatcttgtgcgggttcgggccgatgtagttgccgtggcagtcgcacgggtcgcacttcggcggatcgctccaccattcgccccagtaggtttcatcactgcagcccgagccgcaggtcgctttcttacgcaggtagctcaagatcaccttcggcggaatgatcggcaggcaaagcttgaacggcgagcagttggccttgccgcaagttggcgcacaggggcttccgcagctcgaaccgcagtcgctgcagggcgcctgatggtagtgctgggcggcgccggtttgggcggaacctaggatgatcgccatcgtgatgacggcgaggatggctgaaagtcgcatcggcgaaattcctcttggctgacggcgggggagcaggcacaggcccacggagtaacgtccgttaaccctctctatcggcgttactcttccgctaatcgagaaaatccgcataaccggcaaagttttccacccggccggggctagcagctggcggccgttttctaggccaagaaatagaaaaaggccgtcgcgtggggcaggaacgcgacggccctaaagaaagggcgaaccccttcttttgtgttgaaatcataacgctatttatcgtcaggaactcggttgcggttcatcgcaattctcaacttttgcctttaccgcgcggccaaaaaacggccagcgccgattcttccacatatcccgaattttcgtcagcgccgaccaatcgaccgtctcccctcccaaaatctccgcgagcgtctcctcctggccgcgataccccggcgggaaccgcaaaatcacctgcgagccgctttcggtcttccgcgccgccaaagacgccagcgttcctttggcaatctgcaagtcgcccagctcgaccagcgtgtcgacccgcggcccaagcaaaaaccgccgatagcaaaagtgccagccattctctttcttgatcaactgccccagcgtaaaccacggcgtccgcggcaagctgatcatggtgaacgccgacagcctcgtcgtttccagagtcagcggatagcggcgccacgccaccaggtcccacatgatccgcacgctcagcttcagcgcttgcagcgaacggttcatcgtcagcgcggcgatgatcaaaatcggcaacgcaaacatcaggcccagcgccgggtgaatccagcacaagaggtacatcaccagcaccacgccaattcgcaagcaccgcagcgccgtatcgaccagcggaaacggcgacagcaaaatgatcacttcgaccaggttgccgaagatccagatcgccgcataaaaccccagcatcaccacaatcgtcaggtacgtcagcagcttctccgtcagcgtcggatcggtccccaagtcggcgcccaacaaatagatgatcagccgcagcccaaacaaaaagccgacgaaattgaagaccgcccccaagatgttcagcggcgtcttcaaataactggcgaacgtcaggatcgtgtccttgaacaacacgatcaaactgcagatgccggtgatgatccaaaaccacggctggtaaaagaagaacagctcgccccgctggtccgactcggtcatgaagtaaacgaccggccccgtcaccgacaacaccatcagcggcgacagcccggtcgccgtcacgccgacgacattctccatgccgctggtcagcagacccgatcgtcgccgcccaaagtattgcgaaagaacatgcgtcggcgaggagtagatctcgtcatgcttctccaccgccggcgattgttcagcggccggcacaacctcctcggcgccgatcgcaaacgtcggcaatgcgatcagaaccagcagcgagaccagcgccgatttcatggtttcccccctgcacaaaggtaaacaaacgcccaatttacccactattcgtcacgagatggcaaatctcagagtttgaccctgttaattgccttgctcgcccagttatactatttatcctgccaaatcggatgttgccagtaagtacgattctaaaccttcccgccttatgacgcctcccttgccgatccgccggctgcagcacattgcggtcgccgccgctgacgccgtccaaagccgcgacttttatcgcgacgtgctcggctttcgtgaagtcgaacgcccgccgtttgattttcgtggcgcctggttgtgcgggtacggaatccagatccacgtgatcgagcggaccacgccgctcaagacgtcgatcggcgacatcgacacccgggccagccacctggcgtttgaggtcgaagaccccgccgcaatcaccacaattttggaaggccacggcattccttacatccagcgggtcaacgccggcaacatccaccagacgttttttcacgatcccgacggcaacccgattgaggtcgccgtttacccaactgatccaccgtttctcccctagtcgaggttgatcggccgctcggtttgcctgccgcgaaggtgtggcgatccgagccaagccgcagacctcacatcaaaaaaatcccacctaaggaaaatcttatgaacgccaaacgaatcgttctgccgctggtcgtcgctctttcggtcgtgatcgtcgccgacgttcaggcaggcatcttcggccgtcgccgcgagcggatcaaagccgaagtcgccgcgcagctccgctgggaaatgaatggtcaaatcgaacaacaagtcgccgccgccaaggccgaaaacgccgctcagctgtctgccgaatcgagcgagcagatccaggccgaagccgccgcgctgaaggccgaactgcaagcggccgtcgccgacatgcgcaagtcggccaaagcgatgctcgccgccgaagcgaaaaagctgcagcaggaaacggtcgccgaaatcgccaagctgcgcaccgacgccgaagccaaaatcgccgcccagtccgacaagctgaacaaacagttcgacgtcgccgtcgccgacctcaaaaagcaggccaacgccaagctggatgacgtcgccaaccaaatcaagacgcagaccgacaaaatcgccggccaggtcgaagcgaagctcgagccgaaactcaaggcctcgctgatgaccgccctcaccgaaaagtcgcccgccgccccggccgacgaccagccggaagaggaaaagcaggaaacccccgccgtcctgaccaacgaaacgacggtcaaagaagaagccccgaccgaaaccaagtagcccccacggctgccagcccaatcaacctctcccagccgtcggcgacgaaagtcccggcggctgtcttgatttcgaacccaatattgaaattcccaaaaacacgaacccgagtgcgcaagccgagggaatgcggccgcaatgtaaatgacgaatgccgaaaccagaatgacgaatcaaacccgaatgagcgaatgattaaaagcggaaagcggaccggaccggaccatgttccaactttttcttaacctggcgccatgctcttatcgcgtcgcacgcgcgattgaagcatgtcttcgccctccgttaacaacctggaccaccggaccggaccatttcgttttttcacgccgagtggactcggccgcagctttttttcttcagcgccaccggggcgacctaacccgagcctgcacatcaccttccgccaaaccgggcgcgaccggaccggacgattccctttttttcgcacaccaagtggactcacccgactcctttttttcccgccttcacccatccacgaccaccgatcaactggaccggaccgtttcgctttttttcgaacggcaagcgtctcctcctgggtgccactggccatagccagtgtcttcctcggctgcagcggcgatcgctgctcgccatcagcaagcggaccgccggaccggaccgtttcccctttttcgaaagtcgagtggactcaatcgcgtcatttttttcccagcccgaccctcctgccaacatgcccaagacaagcgcacaccgagatcgcaaccgcccagccatttcgcccgcggcaactcgacctcagtgagaaaaatcggaaccccagattttcccaaatatcgagcaattgagcaaaccgatttgggagggtgaagatgccgccagagcgaccggcaagaaacgaaaaaagccgccctgtacgtgacatgacggctggttgctccgtagagcagtgcctgcgaatttttcattcttgttacgaaaagagtcgcaagcagaaatcagatacactgctgttcagcgtacctgcccaacggtgggtcgtcaaccctccaaattttaggggctgacgtgccctaagctgaaaatctcgctccttggaccaattcgcaactgaaagccaccgtggtcattgttgtagtaactaccggaactttcattctccccagtgtcatcggggctagttgtattataattaaccatcggtggctttcaagatactggttgacatggccggacttttcgatacatttatctctatcaggccaaaagaaaggaaacgtcacagagttgcacctctgtgacggtcgccaatcttgaaacgcattgagaactggctcggccgactgtatttgcgaaacagttcctggtcctaggctgatatgtgagagtacgctggctcgaagggaggggtgcatctctcccggatggattgccgagatctgtcgtgtgacgcagcacgagggctagtgtactcgttttacttttccacagcaaacaccgaggggactatgtcagatttggtcctaggtctcgacattggcccaacgtctttgggctgggctcttttttccaaagacactctcatcgactgcggcgtccgcatcttccccgaaggggtcgatcgtgatcagcaagggggcgagaaatcgaagtcccaaagtcgccgcgttgcccggggaattcgacgtcaggtccgccggagagcgcaaagaatgcgacagttgaaggacgcattgatcaaagcagggctttttcctgccgatctagaggcgcagaccgaaattctagcgaccgatccctacgaattgcgggccaaggcgctgctggaggaactgacgccgcacgagatcgggcgagtcttattgcatctcgccaagcggcgcggtttcctttccaatcgcaccaccgatcgcggcggcggaagcgaactgaaggggatcctggccgcgatgacccagttgcaggcagagattgccgaacggggctgcgaaaccttaggacaatatcttcatcaacttggcgtcagcgacgaggacgcactgccgcgcttgcgcggtcgccatacgttgcgggcaatgtacgaagacgagttcgacaagatctgggaaagacagtcttcctttcatgcggagcttctgaccgaagcgcttcggtatggctcagaaggaaaaaaaagttatccgctcattcccgaggcgcggcgcaaggaagaaaccttgcttaagcgattcggtttgcacgggctcatcttctttcaacggaaaatgtattggccgaaaagcatgatcgggcgttgcgatctagagccgaaagagaaacgctgcgcgaaagcggaccgcctggcgcaacgtttccgcattctgcaagaggtcaataatttgcggctcttttcgcccgccgatcgcaaggaatattccttcgtcgaactggttggggccgacgctgacaagaagctcgtcgcttatcttagcgaagcgaaggagcgcacctttccgcaaattcgaaaaaagttcgggctgccggaatcagtggcgtttaactacgaacgaggtgagcgttcgaagctgaagggacacgaaaccgacgcgctgttcaacggcaagaacggattgggtaagaagcgatggaataatatcgccgacgacgtaaaagatgagatcattcgaattgttctggaagaagatcgggaagatgttgcgatcgaaaaactgaccaaccagtgcggtctcaccagcgacgaagcggctatcgcaatcgcccttcacctccccgcgggatattcgaactattcccgagtcgcgatccgcaacttgttgcctcatctggaagccggcatgccgctgatgggcaatgacgcgtctgactcggcgctgcacgctgcgggatatctccgtccggatgaacgcgaggttcgtcaatacgaaaaacttccggagccgcccgaagtgcccaatccgctggtgcggcaagcgttgtatgaggttcgcaaggtagtgaacgcgttgattcgagtacacggtcggctgggaacgatccgggttgaattggcccgggaagcgaaaaagtcggccgaagaacgaacgcagatccgaatcgccaatgcgaaacgagaacgcgagaatgccgcgatcgcgaagacgctgcaagagttgaagccgccggttcgttcaacccgtcgcaatatccaacgctatctgctttggcaggagcagggaggcgtttgcatttacaccggaaaggcgatcagtcaggcgcaacttttcgactccggcgaggttgacgtcgaccacatcttgcctcggtggcgcagcctggacgactccatggcgaacaaggtaattgcgcatcgcacggcaaataacgaaaagggagacaagacgccgtgggaatggctggggcacgacaagagtcgtttcgacgaactgctattgagggcacaacggctttcttatggaaagcgtcagcgttttgtgcaagagcatgtcgaactttcggaattcgttgagcgtcaacttcgcgatacgacctatattagtcgcttggtggtccaatatctgaaaggacttggcgttccgatcacgacggtgaaagggccgatgacggcggaactacgtcatcaatggggactcaatgcgttgttgaacgcggatggatcgcagcggaagaatcgcgcggaccatcgacatcacgcaattgacgcggtggtcgtcgggttgactgacgcgaaacggctgcatgcgctggccaaggcgcgcggcagggacatggaattcccatggccgaagtttcgcagcgatgtcgcggacgctttagggagactgaaggtctcgcatcgagttcgacgccggattcaaggcgcgttacacgaggcgacgatttacggcgctacccagaaagcggagacgccgaggccgcaagcggaccgcccgtgggcgaaggggtgggtcgaagatccacaagtcgtcgtgcgtcgtaaggcggtgaccgatctgacgaacacgaaacacttggagaaggttcgggacgtgacgattcgccgcatcctgcaagatcatttgcgccagcggcagatcgatcctacaaaaccaggagccattcccaaggacgcgtttagcggcgagaacgctccccaaatgccgtccggaacgccgatcaagaaagtacgaatggttgaggaagggcaaacgttcaggccgctgcgcgaaggagaccgcttgcaattgaccaagcccggcagcaaccatcatatttcttactttgcggtcgaagaaaaaggggaagaggtttggaaaggaagcgtgacggtgatgtgggacgccgcccgccgcgcgaaagacgccgaagcttgcggtaacatggtggctcgcgatgatggcgccgaggggcgatttgtgatgtcgttgtcgatcggcgagatgtttgaaatgacgcaggacgacggcgagattatcttgtgcgttgttcgcaagatcgatcagcgtagtaaacgcgtttactacaaacgacataccgatgcgcggcccgtggcggaaatcaacaaagacaatctttatttgacccccaagaatttgcagcaacgtgaggcgcgcaaggtgaccgccacgccgctgggacaaattcgggacgcgaacgattaaacgcgttgaatcgcatttttgcccaactacaatgccaaccaagcgtttattgcgtcaaggatgacccaacttcactttcgttgaatcgaagtttgggttcttatgatcaaacgaacggtcgagatttctcgcgaggcggtgcatttagggctgcggcacaagcaactcactttcaaacgcgatggggagatcgttcactcgattccctgtgaagaaatcgggatggtggtggtcgaccatcctggaacgacctacacgcatgcagcgcttcgtcatctggccgagtccaatgcggcggtcgtgatttgcggcgtcaatcatttgcccgcggccatcttgcttccgatcgccgatcatagtgaggtcgtttggcgattgcaggagcagatcgctgcgccgaaaccggtttgtaagcgactgtggcgacaaatcgtctgtgcgaagattgacgctcaagccgccgtcctacctgatagttgtggcgggcggcagcgtctcaaggctttgatttcgcacgtgaagtcaggcgatacgtccaatgtggaagcgcgtgccgccaaaatctattggcaatactggtatccggaggttgagtttcggcgcgacccggatcgaggcgggctcaacgcacaactgaactatggttatgccgtcttgcgcgcagcaatcgcccgggcgatcgtttcggcagggctaacgccagcgattggcctgcatcatcgcaatcgcgccaaccctttctgtttggcggacgatctaatcgagccgtttcgtccgatggtggatgagcgggttcgcgaacttcatcgtcaaggctacgattcgctttcacaggaatgcaagggagagttgctgaaactgctcacccagcagaccaccttgggaggtgagaaggggccatggatggttcagttgcaccggatgcttggctctttggtgcgctgtttgaggaaggaacagacggcgctggagattcccgttccatgcgaataagcgggtaccgagcgatgtggatcatggcgatgttcgacttgccgaccgataccaagcaggcgcgaaaggaatatgccttatttcgtaagaaactgcttgaagatggcttctatcgaatgcaatactcgatctatcttaggccttgtgcctcgaaagaaaatgccgaagtccatttgcggagactccgcgcatttctgccgccggagggagaggtcgcggtcctttccattaccgacaaacaatacgaacgaatggaatttatgctgggaaaactacgtgaatgtcgcccaggaatgcccaatcagctcgaacttttttagcgaatctcgcacgcaagtcgtgttgtcacagtcgtttagcaggcaggtagtgtatctgattcctgcttgagaccaatccgcaacgcttcctggcgaacatgataatgtatcgccagtgtatctgattcctgcttgagaccaatccgcaacgcaatggatccaaaattgaaagctgcgctgagtgtatctgattcctgcttgagaccaatccgcaacaaaaacgaaggcgaccacctcccatatcgtagtgtatctgattcctgcttgagaccaatccgcaacgaagagaagctacgggcggcggcggactacagtgtatctgattcctgcttgagaccaatccgcaactaccaatgtcgcatcgctccggtactattaagtgtatctgattcctgcttgagaccaatccgcaacccgatctccgagaattgccgcagctgcagagtgtatctgattcctgcttgagaccaatccgcaactgacttccgcaatcaatgactatcgggacgagtgtatctgattcctgcttgagaccaatccgcaacattgcgcgaaaagtcgtcagcgatcaaggcagtgtatctgattcctgcttgagaccaatccgcaacgcctcgtttggtggttgctcgcgtcgtcggagtgtatctgattcctgcttgagaccaatccgcaacacaggtcctgacgcattcacaggtcctgcgagtgtatctgattcctgcttgagaccaatccgcaacacaggtcctgacgcattcacaggtcctgcgagtgtatctgattcctgcttgagaccaatccgcaactatgtacgaataggccgtttgacccatcgtagtgtatctgattcctgcttgagaccaatccgcaactacggatacgatccaacacgcgaagcgcagtgtatctgattcctgcttgagaccaatccgcaaccgttggtgctcgtcagccgcaagattctagagtgtatctgattcctgcttgagaccaatccgcaaccacgacggaatggcaaagctggcggtttcgagtgtatctgattcctgcttgagaccaatccgcaactagccaattatcaagcttgcgttggtctggagtgtatctgattcctgcttgagaccaatccgcaacaccatttttacgtttgcggtcgcggttggagtgtatctgattcctgcttgagaccaatccgcaactgttcaaactaagagataagtccgggtagggtgcgtctggacgcaccagagattgcgcgtgcggactgcctttgccttgcgtggcaacgcacagaagtaacgtctgcgttgccacgcgaagtggaatctggcgttggttagcggggcttggtgcgtctggacgcaccctactttagacttcggccgccgcggcctgccctaccggatcttctcatccggcaggccggattggatgccttggtcgatgggcatttcgtcgggtttgccgttgccgtggactgcgatcaggcggtcgagttctttgcggagctgtttcactttggcggcgtaggcgggatcgttgatcaggttcttgtcttcctgcggatcggcctgcaggtcgtagagttcggccatatgtcggtcgggcgagccgtcgccgtgtgggtagcggatgtatttgtactggtcggtccgcagagcccggacgttgggggtgtaggggaactgctgttcgtagttgtactcgtagtagaaactgtcgcgccagctggcgtcgtcgccttgggctaggcgtttccagcttttgccatggatgttgtcgagcggccgggcgccgcagatgtcgaggatcgacggggcgaagtcgatggtggccgagatgttgtcgatcaccttcggctggtcggccggcgtgagcccgggatagcggacgaccagcggaatgcggatcgacggctcgtggccggtccgtttgtcgaccatgccatgttccccttcgagcagaccattatcggaggtgaagacgatcagcgtgttgtcgagctggccggtcttgtcgagatagtcatacagccggccaacgctgtcgtcgaccgagaggatcgtgccccaataggcgcggaccatgcgggcaaagtcggcgaccgcctcgggactgtcgtcggggaacttcttgcgccagtcgaagagcgggccatagatgccgtgccaggtatcgagtcgcttcttgaaccaggccggtttgtcttcgagatggaaggcggtctcggggtattggatgtcgacctggtcgaaggtctgttcgtacttttcctcgggcaggtaaaagctgtggggcgccttgtgcccgaccatcagacaccatggcttgtcgccgtcgcgcttgcggagccaatcttcggccatgtcggtgacgacggtggtgtagtagcccggcacgaccttgcggccctggccattaaagttgaactcggtatcgaagtacttcccttgtcccttgtgagtgacgaagtaatcgaagccggggcggggctcgtcgttctcttcgcccatgtgccacttgccgagataggcggtttcgtaaccttcctgctgcagccgcatcgggaagctgacgaagtcggacgggtagtcggtaaagttgttgaccacgccatgggcatgcgcgtagaggccactaaggatcgaagcgcggctgggggaacaaagcgaagtggtgcagaagtggttcttgaagagcaacccttcattggccagtcggtcaacatgcggcgtcttcagatggggatgccccatgcaactgagggcgtcgtaccgctgatcatcggtcaggatgaacagcacgttgggacgcttggcggacttggtagccgcgtcttgggccagcagcgagctggtcagcgcgcagaagatcaggaaagaggcgaggattctcatgcgatcgaggccttgtgagaattgtgcgggggcaggtcgtcggcccattttgccggcggacgggtgtttttatcttaccctgcggcagtggccgtttttacccctgggcaaaattcgctcgcccggcgccgatgctcagccgaacagaatgtacgactcgagctcgccaggctcagaccgtagctcttcgcggctcgcaaaatagcgacttacgtcgctattttgcgagcccatccctgcgaggttgtttgagggggagagtacgccaataacgaaaacaaatggttagttttgcgatagatattcagctggcgtgcaataacgacttttctgttaggtgctcaaaattgcggaaaaagggcgtctactttcgcgacaagaatcacggtcagattttgtttgtctatggatttggtgaaaatcaatgcatttgggggaatttccacccttggcgttgggtcgtcttcagtagcgcatcggcggcgggtgcgtcttcaaaccgctgggcggcatcgttccaagtaacgcgctggttgagccgaacggcgacattgccaagcaggcagagagacgtcagccgcgccccataagagaaaggacagtcggttggtccgccgctacgaatcgcagccagccactgttgatggtggttgctggggtcttccatcgtcaggggcgaaagttgaaagccgtcttgcgcagtcccgggcacaatctggggcatcccgccaaacttgccggcgtaaaccttggatcgctcggcgacgatcaaaatgccgtcgtccggaacgcggcggacgccaaccacttcggccgacggtttttggccgccgtcgtaccaggtcagcggaatcgcgggcgcaccggtgcaggcgacctggtatttcaccacgctccagctcggcggcgattcgttcgaaccgtcgccggaggttttgacctcgatcgtcgttggcgccgtgatcggcagaccgctgacgattggatcgagcaaatggcagccgttgtctcccagcgcgccgctaccaaaagcccagtgtccgcgccactgcagcggatgatagccgggcgcataaggacgcatcggggcgccgctgatccagagattccagtcgagatattcggggaccggatagtcgccggtaggtcgcgaaacgccttgtggccagaagggagcggttgaccaggcatggatcgctttgatctggccgagttcgcctgcctgcaagatctgccgcagccgccgatagccccgtttggcgtgatgctgtacgccgaactgggtgacgacctgggagtctttcgcggcggccgccatcacctgacaatcgtcgtagttgttggaaagcggcttttcgcaatagacgtgcagcccctgttgcatcgccagcaagctggccagggcgtgcgtatggtcgggcgaactgatgacgacggcgtcgagattggccgaggtcagcatctcgcgaaagtcgcgaaagccggccgccgcggggaatcgcgcgctggcttcgttcaggtaccgcgcgtcgacgtcgcacagggcggcgacttcttcgtcctggcaaagggccaggttgctgaagccttggttgccgacgccaataaagccgagccggagtcgctcgttgggggatcttgcctgggcttgctgcggcaaatggggggcgatcgcggcggcagaggcgctcagcagcaaacttcgacgggaaatacggttgctcacgcggcggtccccctcttgtcgccaagggccgcagggccgaatctagtagattggttttggtcgcttacttgaagagaatcgctttgaacgaagttcccccgcctgccccgaaattcgacacgctccaagaagcgcttaccgcgcatggcgctccgcttgacccggcgatcgccgccgagctcgaccgttacgtgcaggtggtgtgggaaatgaatcaaaagctgaatctcacgcgtcataccgactacgaccgcttcgtggcgcgagacgttctggatagtctcgccctggcggggcagctgaagccgggggatgagatccttgatctcggttccggcggcggcgtccccggcgtcatcatcgccattctacgtcctgacgtgcaggtttctttgtgcgattcggtgacgaaaaaagcgaaggcgctcgaagagatcgtcggccaattggggctttcgattccggtttatcatgcccgggcggaagatttgctcgaagatttccggtacaacgcgatcgtttgccgcgccgtcgccccgctgaaaaagctgctcacctggctggccccccattgggcctcgtttgatcagcttctggccatcaagggggggaagtggatcgaagaacgcaacgaagcgcggcatttcggcctgttgggggatctgcaactgcggaaagaggtcgaatacgagaaccccggcaacgatcacccgagcgtggttttgaagatttggccggctgggcggaaagaaccgtaaaattcggcgcttcttcgacttaccaatcggttgacgcgactacggtttccgaagcatgatacatgatgagggaactcgtcctcggggatgatgcgcgacgtccaaagctattctgatgtcgtgtgattccttatattctgacttttcgtcaataactgcgctcgcagcgacctatcgcgttcgggaggattgcgccttggctggaacactcggagacttcgcggaaaatctgattcgtcgtggcatcgttggccccgatcagttggccgaagcggagcaactagcagacaagaagaaactccaggtccacgatgcgctcgtccaactcggatatgcgaccggcgccgacgtgatgaaggcgctcgcccaggagcacgggctggaatatatcgacctcgactcggtgttgatcaatccgtcagcggtcgaactggtgccggaatcggtcgcccgcgaaaacgtcatcatgccgatgtcggaagaagatggggcgctgcgggtgatcgtgagcaatccgttcgacctcgaggcgttcgataagctgcggtttatcttgaaccgtaaggttgagatcgcactcgccccccgcgaaaacatcctggagtcgatcaaccgctattacggccagcaggaaggcgaatcggccgatacgatgctccaggaattcaccgatacggcgatcgacttcaccgacacgatgcaggaggatacgcagacctacgccgaaacctcggcggtcgacgataactcggccccggtcgtccgcctggtgcagctgatgatcaacgaggcggttcagctgcgggcttccgacattcatgtcgagccgtttgaagaccgcgtccggattcgctaccggatcgacggcgtgctggtcgagcgagatagccccccccggcggatgttgggcgccctgatttcgcggatcaagattctggccggaattgacatcgccgaacgccgccgttgtcaggacggccgtatcaaggcggacattggtaccaaagagatcgacctgcgtgtcaatgtgataccgaccaaccatggtcagtcgatcgtcatgcgtattctggataaagatagtattaaagtgggggttcggcagttgggtctgtcggaagcctcgttccagaagtttcaaagtctcatcaagcggcccaacggcatcattctggttaccggaccgaccggttccggaaaaacgaccacgctctacgccgcgctcaacgagctgaaccgtcccgacagcaagatcatcaccgccgaggatccggttgagtactacctgccggggatcaaccagacgcaggtccgccacgacattgggctcgactttgcccggatcattcgggcgatgttgcgtcaggcgccgaacatcatccttgtgggggaaatgcgcgatcaagagacggcttcgatgggaatccaagcttctttaactggacacttggttttcagtactctgcatacgaacgatgcgcccggttccattacacgtctcgttgacatgggggttcccccttatctcgttgcgagtacaatcattggggtgcttgcacagcgtttggtgcggatcatctgcgacaaatgcaagtcgccatttacccccagcgacgcggttttggaagaagccggcatttcgcccgaggacgcggccaacgccacgttcatgaagggacgagggtgcggcaactgccagcgaagcggatataagggacgccgcggtatctttgaattgatgccgatgtccgccaaaatccgggagctagcgttcgagggagcgtcgactcaggagattcgacgcgccgccgtggggctggggatggcgaccttgtatgacgatggcatcgccaaggcgatgaaaggactgaccaccctggaggaggtctttcgcgtcgccaagcaggtggagaagtaatcgcactcctaggatcggcgcaacccgcccacttttcgcagcgggtgtagattacgtcgcatggccgggggaatccgtttttacgaaatgcgccgcgattccgaccatttcctggatttcatcggccgcgcggtgacaatgacaacgatccgccagctttcctattccttttcccctatcctcatccacgcagcagaacggatcgcacgacgacttccggcctgatcaggtcggagccagcaagatcctgataacggcgtccagacaatccctatatccctcgtctggaatcgcagttgtcttgaagcgccacaagcaaggcgacgcttcgtacgctggatagctcgaccgtgattcattcctattaacaacccaaaccggctcctgacgcatctcgcagacgagattcgttcacgcgagtcgatttcgttttggcgtcattcctgccgaggggtgatgcgccctcttgttgaatgtaattaaggattcgtatggccacgattctgatcgacaagttgttgcaagccgccgtgaagcaaggcgcgagcgatattcatataaccgtcggacagccgccggtgtttcgcttgcacggcagaatgcgacaactcgatacgaaatcgctcactccggaagacaccgtttcgctgatgaaaagcatctcgccggaacggtgccagcgagaattgcaagagtcaggcagcgccgactttggtttcgcctttagcgacctggcccgtttccgcgtgtcggtgtttcgccaacggggcaacatctcgatggtgttgcgtcagattccgaactcgatgctgacgccggagcagcttggcttgcctgaaaaggtgatcgagctgtgtaagcggccccgtggtctctttttggtgaccgggccgaccggttccggtaagagtacgacgctggccagcgtgatcaacaacatcaacgagacggtcgaccatcacatcatcacgatcgaagacccgatcgaattttatcactaccacaagaaatcgacggtcaaccagcgggaagtcggcgtcgacgtcccgtccttcgccgaagcgattcgtcgtgcgttgcgtcaggacccggacgtgatcctggtgggcgaaatgcgcgacttggaaacgatcgaagcggcgattaccgcggcggaaacggggcacgtcgtgttcggcacgctccataccaacagcgccgccggtacgatcaaccgtattatcgacgtgtttccgaccaatcagcaggatcagatccgcacgcagttgggcgaaggtttgatcggcgtgttgtcgcaatcgctctgccccaagatcggcggcggtcgttgtgcggcctacgagttgctcaactgcacctccggcatcaagaacctgatccgcgaa

SEQ ID NO: 1797 - DNA, 23129 bp, synthetic construct
  source 1..23129: mol_type = other DNA
  misc_feature 1..23129: note = Synthetic
ccgttcccaattcactccgcgaaggctcgtacggctgtggagcgagcaagtggcagacgattcgccgcattgttctaccgcacgccttgcctggcatcatgaccggcatgattctggccatggctcgcggtgccggtgaagtcgcgcccctgatgctggtcggcgtgctcaagcttgctccggagttgccggtcgacctgagtgcccctttcgtccatcttgaccgaagcttcatgcacctcggttttcatatattcgatctaggttttcaaagccccaacagcgaggcggccaagccgatggtcttcaccacgacgctgctcctgatcaccgtgatcgccaccttgaacctgttcgccatatggctgcgtgcccggctgagaaagcgatttcagtctggtcagttttagccccatacgacgcccatgtttcgccttcgtgactagcagaagccaaactccatgagtcaaccacaatcaggaacttcggaaacaagccggctcgaattgatcgcccaggggcacaacttcgctcccgtggtgcacgatgccgtcttccgtgaagaaaaggtcctggagatcaagaacttcaatctctggtatggagacaagcaggccctcttcaatatcagcatgcccataccgcgcggtcaggtaacggcactggtcgggccatccgggtgcggcaagtcgaccctgctgcgatgcgtcaatcgcatgaacgacttgatcgacaccgttcggatccaaggcgatatcttcctgaacgatcaatcgatctgcgatcggggggtcgacgtcatcgagcttcgcaaacgaatggggatggtttttcagaaacctaatccattccccatgagcatcttcgaaaacgtcgtttaccctttgcggatcgacggcgaacgcagccgtagcgtgctcgaaggggtttgtgaacatagcctgaaaggtgccgcaatctggagcgaagtgaaggaccgactccacgaaagtggcctgagtctctcaggcggtcagcaacaacgcctgtgcattgcacgagccatcgcgagcgagccggaggtattgctgctggacgaaccgtgctccgcgctcgatccgatcgcgaccggcaagattgaagatttgattcgcgaactccgcggcgagtattcgattttgatcgtcacgcacaacatgcagcaggcctcgcgaatcagcgattacaccgcgttcatgtacctgggtcggctcgtcgaatatggccaaaccgtcgatatattcaccaaacccaaactatccgaaaccaacgcctacgtaacgggacgatttggttaggattcgccccacttactttttgcgaaaggacgccgacgatgatgcctcgattgcccgttgcagccagactgctgacgctcttggtgttgacgacctttatttgctgcgcggccgttgcccgcgccgatgaaacggccgcgcgttccgcggaccaccagaaattcaccgaagacttctggaccttcctgcaagacaaatacagtgattggaagcagttggaaggcttccctcaaaacgttcctgctcccgaggccggcaccgacggcaccatctacgtcaacgatgccgccgcgaaggatcttgctaaactcgattatggttcgatcgtcgttgtcgagtaccagcgggacggcaagccctatgccctgtcggcgttgtttcgtgcgcgccctggcgtcaataaaaagaatgacgactggtacgaactgtactaccttgccgacggcacgatcgttaagtcctcggccgattcttccaagtacaaccgaccgggatttctcaccaaggtaatcgatggccgcctgtgggttctttctttggatagcccaagcatctcagatctggttgccggggaaggtcccgagaagcacgttacgctgcctggtgccggtcccgatcggaagactatcaaaacggattcgcgagaaacggccatccattacctgtttgccaaaccaggtttcgtaacttacttcgaggatggccgtgcctggatcttcgccaagaataccgaggccgcgacgcacttcaaaaaagaagggcttcccgaaaagcacgtcacgcgtattggtgccggtccgatgcgaaccacgatcaaagctcccgacgccgaaacgatcgacatgttcctcggtaagcctgaaaagtagaaatctgaaagcgaccactcatgacccgccactggatccgacagatcgaagccgttcgttcgcacctcctctcgatgggatcgcacgccgaggcccaagttagcgaggcgacgcgggcactgaatgatctcgatcgagagcgggccctcgatgtgatcgccgaggacgaccagctcgatgaaatggacgttgccctggaagaagaatgcctgcactcgattgccctctttcagccggtggcgtcggatcttcgtctgattatttcttcgatgtccgtgggccacgaactggaacgaatcggtgatctcgcggtgaacatcgccgaaagcgtggtccgacttcgcgacggtggtatcgcaaccaatcagatcgtcctgccagagtgtttgaagcaagcaaatcagcaagccgtcgagatgctgcgcaagagcctggatgcattcatcgatcgcgacgcgttaacttgccgtcagttgattcttcaagaccgcgaactcgatcgattgcatcgccagatattccagtggctcaaggacggcatctcgaacaatcccggtgacctcgactggatgatcgagatcaccggcatttccaaacatatcgaacgaatcgcggatcacgtcacgaatatcgccgagatcgtcatctattggatcgaaggcgaaatcgttcgccatcgtcaatcgttcgacgacaacgaggaagcggcacaatgatctcgcaaaccatccagaccacggaaggctttagagtatcagatcacactgacccaacctgtttccttcaaccaaagcgtgaagacgaaccgtggctcaacgcagcatattgatcgtcgaaaaagcaggggggccgcttcacacagtcgcgcacaacctgcaacaaaccggctgccaggtttacctggccagcggaacgcgtgatggcctgcaacacgcgatggaatacgtaccggacgtggtcgtcttgtcgcggtcgttggaagaagtagaaactcttgatctttgtcgttcgatcctgcgtcacctgggagaagactcgacaccagccatcttgatcgccccaaccggcggggatttaagcggcattgatgaccctgcccacgattctcgcttggccgagtcgctggctctcgaccttttggctcaatcggtcaaaacgctgacctttcgtgcccgccacaccgtcgacacgcaagctgttctcgagtgccatggcatccggctcgaccctcgcttttccctggtcgaaatggacggcaatcgtctggacctgacgcctaccgagtttcggctactgcaagcactgctatcgcgtccaggacacgttcttaccagggctcagctcgaagaagccgccggccttccagccaaggaccgcgagccggagtccgattccgagaacgctagcagaactcgccggatcgatgttcatgtcaaatcgattcgcggcaagctcgaccggaaggggatcctcatcgaaaccgtccggggggtgggctatcgtttccgcgaagccgcttggaatataaactctttgaattaaatctcttacgccaaaaaccacaccagcgagggtacgtcttcccgccaaaattctttcgcgcattttgcggagctacgtacttgaagatgaactggcgattaaggtatcgttaatcaggcgtggtgaagcttgtcagggttcttaacccgaagacaatcagtttcgccagggatgtcgtgctagcaagtacggttggcaggcgatgccaatcggaacggaatccaccaaaacgatggaaagcgcgacggattatcgtgctgattcgggagtcattgaagaccccgcgacatggaacggatttccttcccgtgatgattctctctcgaattgacgatagagaatggaaggaagatagaaatcatggtcggtttgaaagcgaataacagtttgagtggtaaaaccctctgggaacggcgtgagcttctccgaagccaagccaatgtgcgatttgtcgatcccgaacagttttgtgccttagcggtctcttgccgcaagattactcgagcagatgaatccgcagctggtcttaagggcctgttcagcgaagacgatggcctgacgtactacgtcgaggaagaaacgctcgataagtaccgcgatggggccgatgtgcctgatacgtcgttggaacttgtttagtcgccctatcgctgcctacctggctggcgatctcatctcgatgggttcagcacattcttgttgctgaatcatggatggacttattgaattcccccactacttcggtgggagctgccgaccctctgccagcagccgcatcaccgataacccctacgggttgtctgcttccgcatccgtttcgtcgaagtgtgcttccggagcgtgtgagccacgcggaacgcgaacgctctcgaccagatcctggacctcttccggaggtggagacgtcatccggctgatcacgaccgccacgatgaaattcagcgccaggcctatcgccccgaccccttccggacgaaggccattggggatccaactgcttccctggaaccagggggtcatcagtggctcgtcaaagcccagcacgcggtccgagcggcaaaggatgatgtaaacggccgtgaacagaatgcccacgatcatccccaaggtcgctccctctcgattcattcgcttgtcgaagatccccaggaagataatcgggaagaagcttgccgctgctagtccaaacgcgaacgcgaccacttcgccgatgaaacctggcggagcaatcccgaagtagccagccaccaaaatcgctccgatgatcatgattcgagcgatgagcagtcgccggggctcggaagcattcggttcgaagaagtgcacgtacaagtcgtgagccatcgaactggaaatcaccaaaagcaaaccagcggccgtactcaatgcggctgccagccctccggtagcgacgatcgcgatcacccagggcgaaagctgcgcgatctcaggcgtggccagcaccaggatatctttgtcgatcttgacttcgtcaaagttgccgtcgacgttcttcagcgaaagaatgccgtccttgttcttatcttcgatcgtaatcaagccggtcttctgccaggtatcgacccactgaatggggacttccttgccttcatcattaacccggtaaaccgggatgtactctacgtcatcgtccgacttggcaacttcgccaatccgggcaccttcgagcgtattcagaatggagtagcgggcaaacatggccagcactggtgccgaggtgtacagcaagcaaatgaacagcagggcccagaaagcgctgtaccgagctgcccgaacgttggccaccgtatagaagcgcacgatcacgtgcggcaggcctgccgtgccggccatcaacgcgaacatgatgagaaacacgttcgccatgtcgtagttggtaaacggctgcgtgtaggatgaaaagccgaggtcttcttgaatcaagttaaccttctcagcgatatcccccgtcgcaaaaccaatttgtggaatggaactgtcggtcaacattcccgacaaggcaaacgtcggaatcaagaacgcggcgatcagcacgaagaactgcaccacctgggtccaggtaatccccttcatgccacctaacacggcaaacacgccgacgatgaccatccccagcacgaccccctgccaggtctcgacttccaggaagcgggcaaacacgatccccacgccacgcatctgaccggcgacataggtaatggaaatgaacacggcacaaacggcggccacaattcgagccgtttcgctgtagtagcgtttggcgacaaagtcaggcaccgtgtattgaccaaactttcgcaggtagggcgccagcaacatcgccagaaggacgtagccaccagtccagcccagaagaaagaccgagccatccgagcccaatccgctgatcaggcctgccatgctgatgaacgacgcggcgctcatccagtcggccgcggtggcggctccgttggcaatcgcaggcaccccctgcccggccacgtagaactcgcctgactccttcacacggcttcgccagccgatgtacaggtagatcatgaaggtgatcgtcacgaacccaaaagtccacgctcgcgtcgccgtcatggcggcgcctattagcggcatttgttcgataaaatccacggactactccttcacgtcatgtttgcgatcaagatagtccatcaccagagcgtagaccaggatcaacaccagaaacacatacatcgacccctgctgagcgaaccagaagcccaggggcaaattgccgatctggaattgattaagccactcgataaagaaaatcgaacaaccaaaggccacaaaagcccagatggtaagcagcacgccgatgaccatcaggttttgctgccaataggcgacctttggttccgggcggctgggaggtggggaagaagacatgcgggattttccgggacaacaattttcgaaagaaaagaaaagttgtcgctaggaaaatcaattcttatgcgtctgtcaactagacgcatccctaagtaccgcttgaaaagggggtgaagagctgcaaatcgtgaacgatccggggaaagcgtgtggctttggtgtcctttcccgatgctatccgagtgcagctagttccgctccaaggttacttgaccaatcatggcccatgtcgccaaaaatgcgacgcctaaccaagcgtggagtaattcgacaggcatatgcaacggtcccaaccaagtggtttcgctttgcccatccatgagtcacttcacccatccgtggctagttacatgtatcggacagtgcatgcatacttttttcagaatttggcctgcctcggatttaatggattaaacgttacctacgcccctgctcccccggacaatcgacgcgccaggggttgcctgtcccgcaccgggttgtaacggatgtagcgacttggccagttttacgcagcacgtgcgggggacaggcgccgtctaggtcggcaaaagaatctcgcctcgacccatttgggccaggtcgccgtggaacaggtcgtagtcccgccaagcaatcaagcgagcgacctccggtacttcctgacaggcgaagtctttggccaacagcggcatcatggtcggcttgaagcgacaggcatgcacgaaacctgccatcagatcactttgctgattcccgtgcagaatgatcgttccgcggcgcatcatcagccccgggttggttcccgccttaccgccgacgaagatcgttccggccagcatctcgtacccgacaaagtcgccgcaatcgttggcgatggcgatcgttccgcgccgcatccggtgtcctacttcactgccggccgaaccgagaataaaaacatggccaccagccatgccacgattctcgccaggcaggggcgcgccgacacgatcgccgacgttgcccaataccttcagaaagccccctttcatcccttcagccagattgtttccaacgtggccatgaatgaaaagcgaaccctcccgcatctcctggccggcgtgatggccgaccgagccttgcacgaataacgtgccgccatccagaccggcaccaacgttgtccgctttcgagagattgccgatgatccggagcgtctcttcgcgacgcgtctcgatttcgacgtcaaagagctcccccagttcgacgcgtcggtttccttcccaaaccgtcaccttcgccacctctgaaagcgacatcggcaacagacgtgaaggcaacacgcctcgtagatcgaggccaaccgtgatatcgtgacgtaagcgaagtctcatgaatctattacggcaatcctgggcgacatgatacgtcctttaatataaccgaccccgacccaagcgacatgaccaccctgccccgataccagcgagccgctttgatcgtctgtggcggtgaaagccgccgcatggggcaatcgaagccgcatcttccgttcggcaacgaaacgatgctcgaacgcgtcatacggatcgtctcgccgttggtggaagaggtcgtgctgctaacgggcaagagtcaagaacttccactgcttccttttgactacgtcgaactgccagatcgtgtcgaacaacaaggcccggcggcggcgatctatgaaggcctgaagtatgtgaccggctggtccgaagccgcgatcgtgctgggatgcgatctgcctctggtaacgcaggcgtcgattgaatacctgttcgagcaactttcgtcgtacgatgccgtcatccccctgcacgaaggaatgcctcagccattggccgccgtttatgccaacagcgccagggaaaccttcgagaatattctcttctcgggtaaccagcgtctgttgtcgtgcatcgaacctctgaacattcactggatcgatccgcgcgagcttgccggcgtcgatcctaatttaggtttactaagaaacgtcaacacgccggacgcgtatcgcgaagcgttacagatcgccggcctgaaacatccactggaagattgactcacacggggaaagaaaccacatggctgacgcagctcaatgggaattgaccaaacagcggattgccttcactgacaagatgttccgtgacttcatcgacggcctggaaccggagctttggtttcgtatgccacaagaaggagtcacgcatatcgcctggcaggtggggcacatcaccattgccaactatggcttggggatgcttagaatccgcggcaaacgggccgaagacgcaggcctgattcctgagagctactcggcgaatttcggccgcggcagcgttccctcgcaggatcaaacgatttacccctctcaggaacgtcttattgagatctataagcgagccaacgaccaactgctggaggaactggaaacctacacgctcgagcaactcgacgaaccgagcttgccggatcatccccttttcaagaccaagttcgagacgctcgtctttctcccctatcatatgatgatgcacctagggcagatggggctgttgcgccgtctctcaggcaaaccgccgctacgctaagaagcggcccaacggggagtgctggcttgccgaagagacgttcgctacgttctgatcttcttacagagccgaatcacacaaatcggacgggcaagccccaggcaaagctaactacccccaagaagcagcaaaaggactcgcgtccaatcgacgtaagtccttatgtgctcgaatattgcctttgagcggaggacaagggattcgaacagatgaagaaaccactggaaaaacgatatcttccgagcaaggcggcgcagaatccggcgcacttcgcgccacattgtcacctgatcttttgtcagtagtcaacgcctgggatagcctctcggagtccgtacgccgcgaaattatgctgcttgttcaagatgctcgtatcaacaacgccccctagccgccggagattcacccccgttgatctcatgacgtttcccttgtcgagaaaatgacttggtagtctcgaataatcaacgacggcacctaaccctcgccagcccaatttgcacggtcaacgaaatcggcgcataaaaaatgccgccctgcactagacatgacggctggttgctccgtagagcagtgcctgcgaatttttcattcttgttacgaaaagagtcacaggcaggaatcagatacacgccctgaagtatagccactccaattggggtgtcaacgcagtcaaatggtgatattctaggctagtgaatttctcctatatcttgtccgcaatacaacgactgcattctaaaaagacaattacatgtctgatcttattcttggcctcgacattggcccaacttcccttggatgggctttgttttctgaaaacactctagttgactgtggagtgcgaatattccccgaaggtgtcgaccgtgatcagcaaggtggcgagaaatcgaagtcgcaaagccgccgcgtggcacgggggattcggcggcagattcgtcgtcgtgctcaaaggattcggcagttgaccaaggctcttgttgacgcaggtcttttcccagttgaaccgcaggagcaggagaaggttttatcacggaacccgtacgaacttcgagcgaaggcacttcgtgaagagctttcaccgcatgaactcggccgcgtatttctgcatttagcaaaacgtagaggctttctgtctaatcgtacgaccgaccggagcggcggaagtgaactgaagggcatcaaagcggatatggctcagctagatgcagatattacatctgctggctacgagacgttaggtgaatatctctatcatcttggtagtggcaatgacgcatttccggtacgactgcgtggacgccatacgcttcgtgctatgtacgaacatgaattcgagaaaatttggaatgctcaggccaactatcatcctaagctactcacggttaagttgcgttacggccaggaaggcaaaagcagctatccgcttaccccagttgcgcgtcgtaaagatgaatcgctgctagaacgctttgggctacatggcctcttgttctttcaacgcaagatgtactggccgaaaagcatcatcggacgttgcgatttagagcccagggaaaaacgctgcccgaaagcggatcgcttggcgcagagatttcggatcttgcaggaagtcaataatctgcggcttatttcacccgcggaccgaaaggaatatacattcgccgagttcctcggtcccgattccgataagaagctcgtggactatttgtgcgaggccaaagagagaacttttcctcagattcgcaagaagttcaagctgccagaatcaattcagtttaactatgagcgtggcgagcgttccaaattaaaggggcatgaaacggatgccctctttaatgggaagaatggactgggcaaaaaacgctggagcgaaatcgctgatagggtcaaggatgaaatcatccggattgtgctggaggaagatcgagaagatatagcattattgaagttgaccaacgagtgcggccttacatcggaagaagcccagaaggctgcgtctctccacctgccttctgggtatacgaattactcgcggcttgccatttccaagttgcttccccatttggagattggcatgcctttgatgggaaatgacgcttctgattccgcgctgcatgcggctggttacctccggcctgatgaaagagaggtaagacagtacgaccttttacctgagccgcctgacgttcccaatcccctggttcgccaagcactctatgaaattcggaaagtgatcaattcactcattcgtgaatacggcaatctaggaactattcgtgtggaattggcccgcgaggcgaagaaatccgcagaagaacggacccagattcggattgcaaacgcaaagcgagagcgagaaaacgccaaaattgccaaagcattgcaggacatgtcccccgctatcaagccgactcggcgcaacattcagcggtatttgttgtggcaggaacagggaggtgtttgtatttattcaggcaaaagtattagccaagctcagctgttcaattccggagaagtagatgtcgatcacattctccctcgatggagaagcctcgatgactccatgtccaacaaggtaatctgccatcgctccatcaataacgaaaaagcggatcgaacgccatgggagtggctaagtcataataaggaacacttcgacgagttgctccttcgtacccaaaagttgccttatggaaaacgccagcgtttcatcaagcaggacgttgagcttaatgagtttgttgagcgtcaacttcgtgatacgacgtatattagccgtctacttgctcaatatttaaaagggcttggtgttccgattaccaccgtcaaagggtcgatgacagcggagttgagacatcattgggggctgaatgctttgctgaacgaggatggatcgaaaaagaaaaatcgttccgaccatcgtcatcatgcaatcgacgcgattgtcattggcctgacggatgcgaaacgcctccatgctttggcgaacgcccgcggcaaagacgtggaattgccatggaaggaccttcgtcatgatgtcgcaaaagcattgggacgcatgaacgtttctcatcgtgttcgcagacgcattcaaggggcattgcatgaagccaccatctatgggcctacccaaaagaaggagcgcccgataccgagtgaacaaaggccttgggctaaggattggattgaagatcagcaagtcgttgtccgccgcaagagtgtttccgacctgaccaataccaagcatctagcaaaaattcgcgacaaagcgactcgccagatccttgaagatcatttgcttcgacagaagatcgatccagccaagcccggagcaattcccaaagaagctttcaccggcagcaataccccacagatgccatctggtgtgcctatcaaaaaggttcgtatggtagaggagggacaaacttttcgtccgatccgagaaggggacaatagacagcttacgaagcctggtagcaatcatcatattgcttatttcgccgtggaagaaaacggagaagaggtctggaaaggcgaagtgaccgttatgtgggacgctgctcgccgggcgaaagaccttgataagtgcggaagcatggtttgtcgcgacgatggccatcaggggcgatttgtcatgtcactgtctatcggcgagatgtttgagatgacccaggatgatggcgagatcgtcctttgtgttgttcggaaaatcgaccaacgtagcaggcgagtcttttacaaaaagcacactgatgcgagaccggtagcagatcttaactatgataatctctacctaacgcccaaaaacatgcaactgcgcgatgcccgtaaggtgacagtgactccattgggacaaatacgagatgcaagcgattgatatattgaatacctcacgggtgtaattacaatttcttctgacgcgctagttgcgcatttatgtcacggacgacccaacttcatctgtgtattgtggaagtttgggttctatgatcaaacgcaccgttgaaatttcccgtgagtcgttccatttagggttgcggcacaagcagctcactctcaagcgagaaggggatatcgttcacacgattccctgtgaagaaattggaatggtggttgtcgatcatcctggcaccacctatacacatgcggcgctccggcatttggcggaatctgacgcagccgttgtcatttgtggagagaatcaccttccagccgcgatcttgcttcctttggccgatcatagccaggttgtatggcggttgaatgagcagattgaagcgtcaaagccgctatgcaaacgactttggcaacagatcatccgcgcgaagattgacgcccaagcttcgatattaccaaagcattgtcctggtcgcaggaagttaaaggcactagtccctgaggttaagtcaggcgatgcatccaatgtggaagcaagggcagccaaaatttattggcagttctggtacccagaagtggagtttcgccgcgatcctgacagcaatggaatcaactcattgctcaattatggatacgcgattgctagggcagccatcgcccgcgccattgtttccgccggattgacgcccgcattagggcttcatcatcgaaatcgctccaatcctttctgtctggcagatgacttgattgaaccttttcgtcccatggtcgacgaacgggttcgggaactccatcgtcaaggttacgaatctctaacccaagagtgtaagggagagttgttaaagctcctatctcgccagacaacgattgtgggcgaaagcggtcctttcatggttcatttgcatcgtatgctcggttccttggttaggtgcttgcgcaaagagcagactaccttggagatcccagtgccatgcgaataacagggtaccgtgcgatgtggatcatggccatgttcgacttgccgaccgatacgaaacaagcacgaaaggaatacgctctattccgaaagcgtctgcttgaagatggctttcatcgtatgcaatactctatttaccttcgcccatgctcatcgaaggaaagcacggaagttcatttgcgacggattcgcgcatttctcccacctgagggagaagtggcagtgctctccatcactgacaaacagtatgaacgcatggaatttatgctcggaaaattacgcgaatgctctcctcaaatgcccgatcaactcgaacttttttaaggtcgtttaggcgtaactcattgcgactaagccacttagcaggaaggtagtgtatctgattcctgcctgggaccaatccgcaactcgccgaagtaatggcataccgcgtgcacgagtgtatctgattcctgcctgggaccaatccgcaacttgatcgggtagggcaggatgtagttcttgagtgtatctgattcctgcctgggaccaatccgcaacgcttcagcagcttaccggctcggcgatccagtgtatctgattcctgcctgggaccaatccgcaacgcatctaatccaccgttgcccgtgcccgccagtgtatctgattcctgcctgggaccaatccgcaactcctgagttgggttttcatactggcaggcgagtgtatctgattcctgcctgggaccaatccgcaacatcttgccctttgcatcggcaagctcttctagtgtatctgattcctgcctgggaccaatccgcaacatgcgacccacgcaaacgcatatcggtccaagtgtatctgattcctgcctgggaccaatccgcaacggccgaggcgacgtggccggtggtcgatgcagtgtatctgattcctgcctgggaccaatccgcaactcgacccagtaatcaagcaccggaccgcgcagtgtatctgattcctgcctgggaccaatccgcaaccacggcgagtgatcgccgcatgaaaactaaagtgtatctgattcctgcctgggaccaatccgcaactagttcgacgtcgaaggcgtcgatcgagaaagtgtatctgattcctgcctgggaccaatccgcaaccaccagtcgccagcatccgtcgagttctttagtgtatctgattcctgcctgggaccaatccgcaaccggccactcgctgggctcgccgccatgggaagtgtatctgattcctgcctgggaccaatccgcaactaccacgccctcggggcgatgcgctgggatagtgtatctgattcctgcctgggaccaatccgcaaccgttatcaaccgtgccgagcgtgatctctgagtgtatctgattcctgcctgggaccaatccgcaacagttcggggaagcgggaagtcgattgataaagtgtatctgattcctgcctgggaccaatccgcaacgcttggtccttgaggttgccaagcttcacgagtgtatctgattcctgcctgggaccaatccgcaacgaaaatcgtaccgaccttgtacgagaattgagtgtatctgattcctgcctgggaccaatccgcaacatctctcgcatcatgcggcacaagtcgtacagtgtatctgattcctgcctgggaccaatccgcaacactgaccgcccagggctgttacacctgcacagtgtatctgattcctgcctgggatggccaattggtgccactgataaatgataatatgcaaaaaggattctcccggctccttatgtatttcaaaaaatttgcgggcacccaatcgcggattttcagagtcgaatcatatgattttcgaccatgcgtggtatcagtggtccttcccccattcgaacattggcggttttctccgtagaattgggctacaaccagaaaagccggcgcaatttgcggcgcggaaaccggttttccgtacgcatgcgaggcccctccatttctgtccgtgatgaccggtatcgaacacccctatagttcaatatctagcaataggcccaatatgccgggaatatcgtattttcccgagtgaaacgcgttttcgctataggtgatcagagccgcgaaaaattaccaactcgttgttgttccttgtcgatgaaactcaaccaaacctgcgccaaatgacagcaaaacaactcccaatatatgtcggttcacctgagtccattcagactttcctggcttggcttgatgacttcgaatcggcgttagtgacgcgaagcgaagacgggagtttcgtctgcgatatcggcaagttaaatgcagtcattgccactgcagacaactatctgcattgcttgaatcccgtcgatgccgaaaaggtatctgatctacttcgtgacttgcagaaacatacggccgccttactggcggctggtagaagtgcgttcatatcgccaacggctgccgatcttgaactacgtcagaaggtggcccacgcaaaaaaggctgcttcagactatattgtttggctcaggctacagtccaaaaatgtcgtaactaccccagcgaaaaagaccaattcgaaatcagctcccacctctactagctggatgggcgttcgggaattagcggacgcctataaagtacccgccgacaagtttgatgctttctccaaggcactccaacgaaaacgcttgagtctgggcgatgaagcgtggcaggaagtccataatccgcaaccgaaccaaccgcgttttctctatcgtgcggatgccacggcaatacaagaactggcttccaggtacgtcaagtagcggcagcctagttgtccgcccattgtccgcccaaaacttttcctagcgttttcttgcgactacaggccgtgtcctgcgggaggacaaatgtccgcccaacgtctttccgcaactctaaacgctgatttccgggaaaatacagatatgcgagccacacttcgtggttcggacctgtcgcacaaaggaatgtacgaccatgaacgaagacaccggcaaactactcgtgtcccccaatgaagccgcgaggttactgtccatctcgccaaggaagctctgggacatgaccttcacccaaaccccaggccttccgcacctgaagatgggtcgattgacccgataccggattgcggacctgcaagcctatctggaagcgaatctgaagggaggccagcatgacgcccgttaatcttgttcttagtagtctcaagaacgtgaaaaagactaaatcgggctggcaggcgcattgcccagcccattctgaccagcattccagtttgagcgttaccgaaggcgaagacggaagagccctcatccactgtcatgctgactgccctcctgatcaagtttgcgcgtcgatgggcctgcaaatgtcggatctcatgccaaacgaaacggaattcaacccaagcaagaaaccagacaaaggtaaaatcgtgaaaacatacgcctacgaagacgaggccggcaagttgctcatggaatcggtgcgatacgagaataagacattccgtcagcgaaagcccgatgggcatgacggatgggattggacagtgaaaggggttcgagttgtcccgtttcgccttccccagctactagccaacccagacgcttctgttttcatcgtcgaaggagagaaagacgttcattctctggaagcaatcggactcgttgccacttgcaatgccggcggcgctggaaagtggaatcaagagcacgctcagttcctccagaatcgcgatgtaatcattctgcctgacaatgatgaagccggagagaaacacgctgagaaggtcgcacagacgcttgtagggcttgctcgtagcatcaaactcattcacttgcccggcttgccgttaaagggtgatgtgagcgactggattgaatcaggcggaaccgacgacaaactagctgaactggtgcaggaatctgaaatatggcaaccgcaacaagtcgcctatgaaacaggcgatagcttggatttcgagccgtttcccatcgagtttttacccgagccagtttgcagttttgtccgagacggcgcaagagcgatcgggtgcgatgaagtcttccttgcacttccattgctttccgctctcgcatctgcgattggtgattctcgttgcttgcgactaaaagatgggtgggaagtgctaccgatcctatggacagccgtcgttggggaaagtggaactgcaaaaacaccggccttcaaagcagcattgagcgccgttcgaactcgtgagaatgaaaacctcgaagaatacgacggtttgatccgacagcatgaagatgcgatagctatctacgacaagcagttccagaaatggaagaaaggtagcaatgcagacgagttaccaccagtgaagccggtagaacctcaggcgactcgccacattgtcgacgataccacgctcgaagcattggtccctattctcaaatcaaatcccaggggcctgcttcttgcacgagatgaactctcagggtggctttcctcttttgaccgatatacgcagggtaaagggggtggagacgccgcacgctatctttcgatgcacacaggcggggaggtgacgattgaccgaaagtcaggcattcccaaaacgcttcgggtacctcgttccattgtttcgatcaccggcggaatacagccggcagtattaaagaagactcttggccgcgatcatttcgaaagcggtatggccgcccgattccttctcagtcatccaccacgcagagcgaagaagtggaccgaaacgggtatttcctatgagcagcagcaatgcctctctgatgtgtttgatcgactgtactcgctagagccggagatagtcgaagacgtgaatcgtgatccggcagtaataacactttcgaaatcggttaagtcgttgtatacgacgttctatgaccgacatgccaaggaacaaagcgaactcagcggagaacttgcatcggcctggtcgaagcttgaagaatacgcggcgaggctggcactcgtgatccattgcgttagatgggccgcgaaagacgccaatttgaagaatgatcgatcgattgacggcgatacactttgcatggccttagaattaaccgagtggttcaaacatgagacgcgacgcgtctaccagataatggcagagtcacaatctcaacgagaagagagagccctagtcgattggattaagagaaggggcaatccgataactgctaggcaagcacggcaaagtagccgccgatttgagacaacagaagatgccgagtcagcactagacaatctggcccggaaggggttgggatcctgggaacaatcatccattggaaacactgggggacgtcctacgcgttatttcagcctcaattgactgtctactgtctacgtatccccaacagtcttcgaataactcccgggtttcgtagacgttgactgcgagtaagttctcacactcgcatccaagatactctcggcgacctctcgccccgattcactcaagaccggtaagtgatttcttgggacttgccggcttgaacaaaaaaacaactagctagcccgcacgaagcggcatacaatcgcatagaacagtaattacggagaatcaaagaatggcatcgatttgtaatgacccgaacggtacccgtcgcattctatttgtcgctcccgacggcaaacgtaagacgatccgtctcggtaagattagcaaacgcaactgcgaggccgtaaaacaccgagtcgaattgctgctatcagcaaagattacctgccatgccttggacggcgatactgcaagatgggttgcagccttggaaccccctctagcaaagaagttagccaaggtaggtctaattgaggatcgagaaaaacaggagcgggcattattgggacagtttcttacggaatacgttgccaagagaatcaacgtcaagccggcgacgcgggaagtctggtcccagccaatccgcaacctgaaggaattttttggcgaaaatcgtgtcctcgatactatcacggaaggggacgcagaagactttaagcttcacctgatcggcactggactagcgtctacgacgatccacaagcgactacagttttgcagaacgttttttggaaatgccaagaaacgaaaattgattccggaaaatccctttgagaacgtcaaccataaagcgataggcgtaaaggatagacaacgcttcattacgcgcgaggacacggaacggcttctagaagtctgcgatcctacatggcgggtaatcgtcgcgctggcacggtatggcggtttgcggtgccctagcgaagtgctctcactgcgatggcaggacgtttacctaccgaaatgccggatgattgttcgatcccccaagaccgagaaccacggcaaagaccgacgagagattccaatcttccctgagttgtttccgatcctccgagacgcccaggaaattgccccagatggcgcgatctacgttatcggaggcaactatcgagacaaagcgaatactccccagggatggcgcaacatcaacctgagaactcaatttgaaagaattatcgatcgagccggccttacaccatggccccgactgttccaaaaccttagatctagcagagaaaccgaacttctcgccgatcagcactcaatccatgtggtagcagattggcttgggaacacccctagcattgccatcaagcattatcttcaagtcacggaggaagattttcagagggcaattaaaggatcgaagagagacgcacaaagcggcgcacaagtggcgcagaaaacgacgcagcaccggcatgctggcgttcgtagcaattcgcaggagtcgcccctaaagcgtgatacagaggccacttctgcgaagcgttgcgagacgcaacctgttgctacaaaagactttagcggaggacaagggattcgaaccctcaaccggttacccggcacttgatttcgagtcaagctgctagccagttcgcgtatcctcccggcttgggaactactcagtttactgtctctttggtttctatcaacccggtctgaaatcgttcctggggcaaaacttgggaccgatttccgcgggccgaggttcgcgccaggtcggagacggacatttcgcatctttcggtttttgcgtttctatctccgaaatctgaattgtccattaacttcaccatcataagatgcagtttctaagctgtttgatgccctgatcttgcgagaatcttttcgccaatagggaatatgatggacaactcaagtgatcaactattcacgactttaatcgactccctgcttcagcttcgcgagggggccctcaagttggaagaggatttctcctcttccctggcgaagatccctgagtcgcagcggcaatgtggtcggaacctggtgcattacctgagtgttcgccagcatgatatccgtgaattgcaatatcagttgcatgccttgggattgagttcgctcggccgcatggaagcctacgtgctgccgacaatcgatgccgtgcttacggccctttatcgcctggccgatcggacgccgcctaagatcgatctgcaaaactcctacgagggcttccaagccggccgcgcccatctcgatcagaatacgaatgttctgttcggcgaaccaggtagttctcggcagcagcgcatcatggtgacgattcccagcgagggcgcccggcagtatggtctgatctttgagctgttacaggcaggcatggacgtcatgcgcatcaattgctcgaaagatgaccacaagacctgggcgcagatgatcgaacaccttcggcgcgccgaaaaggaaacgggccgtcggtgcaaagtgcagatggacctggccggtcctaacccacgaaccggcccgctggaatcgaagcccggcgtattgcattggcgtccccgtctgaacgacgtcgggaagatccggtcgcgcgcgaaggtatggatttcttctcgggacactgggcatcaaaacgccgatgaagtcctgccagttccccctgatgccatgggcaacattcaacagggggacaagttactggtcaccgatactcgcggccgcaagcaaacgcttacggtcatttccgtggaagacggcggctgctgggctgagggggaagacgaagcatttgtcgaacccaatgcccctttctgtgtgcttcgaagtgacgagcaggtatttcaaggaaacatcgctcaaacgtttgccagacaaaccgaccatgaattcaatgttcgagttggcgatcttatcgtgctgactgatggcgatattccggggcaccctgcccgaaaagatgccaacggcaacatgactgagcctgcgagcatcggttgcaacttgcctgaaatctaccaggacgtgcgtccaggcgatcgctttttctacgacgacggcgaactgcaagccgttgttcgcgaagcgtccgcggaaaaggttgtcatcgaagtcacgcaaacacgcaaagacgcggtgaagatcaggagtgacaaaggaatcaactttccggacacccatttcaatctgcctgcgttgactcagaaggatcgggcggatcttgatttcattgtcgcgaacgcggatctcttagcctattcgttcgtgcggcatgtccgtgacgtggaagacttgatcgacgagttgaatgctcgcggcgccgattcactcggagtcattcttaaaatcgaaacgcaacaggcctttcaaaatctccccgagttgctgctcgcggcacttcagcatccgccgattggggtgatggtggctcgcggagacatgggtgtcgagatcggcttcaaccgtatgtcggaagttcaagaggaaatcctctggctgagcgaggcggctcacgtaccggtggtctgggcgacgcaggtcctggagagtctggccaagaaaggactaccgacccgggcagaagtcaccgatgcggccatgagtggccgcgcagaatgcgtgatgttgaacaaaggagagcatattgtcgaaa

SEQ ID NO: 1798 - DNA, 23084 bp, synthetic construct
  misc_feature 1..23084: note = Synthetic
  source 1..23084: mol_type = other DNA
tcgacccggcgaaccgatgatgctttgttctttgatcatctccatgatgtcggcggaggagacgttataggcgcgcatgcggtccagatctaactcgacgcgcatcgcataggcgcggttgccgaggatcttggcgcgaccgacgccgcggacgcgctgaatctcgggcaagagattggcgctgacgtagttgtaaagaaagttctgatcgtggttggggtctttgctgtaaacgttcacgtacatcagcatcgacgtcatgttctgcatgacgatgatgccctcgcgctcgacgatcggaggaagctgattcttgatcatctggatgcggttgttgacgttcaaaaccgcgacgttggggtcggtgcccggctcgaacgtgatcatgatcgacgcttcgccggcgctggtcgcggcggaagtcatgtaccgcatgttcggcacgccgttgatcgctcgttccataatcacgagcgtcgagttgaccagaatcttggcgctggccccgggaaaagagaccgagaccaccacgctgggcggcgcgaccgacggaaactgcgagatcggcagagaggtaatcgccaatccgcccataaacaaaatgagcagagagatgacgatcgccagcgccggtcgatggagaaatttggaaaacatgacctggggctgcctattctgcgtggtacttcaagtggccaagaacttcttcaggagcggtgtacttgaattcgatcttgtcgccatcgcgaacctgtcgaatcccttcgaggatgatcttgtcaccctcttcgagtccctctctgatcacaaagatgtcatcctgttcgctttcgatcgtgaggtcgcgctggtgaacaacgttgtctttgtcgacgacgaaagcgtaccgcttggcgagaatctcgtaagtcgctcgttgtgggatgacaatcacgtccttcagcgtgcggtggatcaagatggtgccggtttggccgttacgcagcaggcccttcgggttatcgaagtccgcgcgaaacgcaatattgccggtcgtgttgttgaagtccgcttcgatcgcgccaatctttcccggctgggggaagaccttgccgttggccagcttcagttcgatctgcagcggatcggcgctcgggttgtcgtcgagatccgacttgtattcgaggtaacgcgactcaggcacgttaaagtaaacccacatcacgctattgtcggagaacgtggtgagcacgtctccatcttcaatcaagcttcccagctggcagtgctggcgatcgacaatcccgtcgaaaggcgcggtcacgttggtgaagtccaactcggctcgcgccagttcaactttggcttgggccttcgcgagttcggcttgtttgatcgcgagttcctgcggcgagacgatccctttttgattgagcgtttgcgcgtttttcagctcgatgccgattcggttggcctcggcgacctcggcgttgagtttggcttgaaaaagggtcggcaagatcttgaacatcagatcccccttcttcaccgcttgaccttcgttgacgcgaatctcttccagatatccaccttctaaggcgcgaacttcgatgtgttggcacgagtggatctggcagacgtactgttgcgtactgatcacatctttgcggagcgggctggtgaccagaatgacatgttcatggtgtccctcttcgtgcgactcgccatgggcctggccatgcgacgcttctggcgtttcagaatgcgcggcttcgtgcgactcggccgtctgcgactcgcagccggacagagaaagagaaaccagcgccaagatgacggctgcaatcgcggagattttcatattgctcgtgcgtacctctaagttaccagcctggaaaggcccgaagaacaattgttggggatatcgctatctgttccgaaacgagaagaaagtaatgtcccaacgggtcaaattgaccctggttttcaaggattcataaattctgacagagaccgtagggatggctcctggtcagcaggccgcgatggcgtgtccgcctcggggggacaaacgaaattcgcatattaggcatgccgctatagcggggcgttaaaggcgggacgctatgccgtttggctgcgacgcggattgtttctgctcgagacgaagcgtcaggaacgcccaatctggaatcgcggatcactctaatgttgtccctgcgtcgaggatgatttgttacctgctattagggattattatcgcacgatatgaatgacggcaactgcgactgtccgtagtcgctcagcgcgatcggcggccaatttgacctgctttgacggttcgatttcacgctcaaaatctggtcgcggatgcgtctcctgggcaagctcaaaatcaggggaaaaagattctgaaaacagcgtcgatagctcgccccaaattcaatcccgtcacgctaagtcgacctcgaaaaaggaggtggaaaagcgccgatcaaaattgtctctagaccggatcagcgagacctaagacaatggtttgtgttgccaggaaggaagcgccaaacgcaagcggtcatgacgctgaatgtgcgagacgtataggcgtttttcgctaaaatggcgagctgacggcggtgctcgaatcggctagagacggcgtgttgccaagccttcgacgaaggcggtgaggatgagcgacgtggtccgcatcgcgctacttgatgcgtgcgtggagagccacgtcagctcgctgctatttcaccatcggcggcttgggggaaagggctgaaacgatcgcttcatttcaccttcctacgggccttgatagccgcccgaattcgcgaggcaaacgagtgtgattggaggcgctaattcgcactgtttacgcgccccctacatgaacacttattaatgtaactcgcaccctgggttagcaaataatgtgccgactcattcaacccgagggggggcgctttggtgatcggccaagcgttcgctttgaacgcgtctcgcgctcaatcaaagtcgtatcggcggagatcggcttcgttatcgtgtgggataaccgtcacaccaggacgcgatcgcttatttttggggtaggattgaacgatatggtctgaatcgatccttcttatggttggcggcgacgtgcggaaactgcggaatctagtgcgattgacgatgatcctgatcggcgcatcagcgtgtcttgccgcttcctctgcgcaggcggcaaagggagtgttgcatctgaaagtggtcgattccgagacgaaggctccgctcagtgcgcggatgcatctggtcaatccccgcggcaatcgccagcggataccaggcgttcccaatctggacgatcacttttcgttcaccggtgaattgcatctagagctcgcgccggggcgatatacgtttgaaatggagaccggtcctgagtatcgcacgcgctccggctatttcgagctgaagagcggtgacgaagataacaccacgctagagatgacccgctttgtcgatatggcggccgacggctggtggtcgggggatctatttgtgcagcgcggcgagattgacatcgagacgctgatgctggccgaagatctacatgtcgcggtcaatcatgcgtgggataacaagcaaaacgcctatgaaggaaaaccggtcggcgatccgctggcgatcttcggcggcgaccgcgcctggtggcggttgggtggtcgtgacgaaagagcaggggggcgaatgatcttcgccaatgtcgacgcgccgctagcggtgcaatcggcaaaacctgaatatccgtcgacgctcagtttcgtcaacgagttgaagagtaacgctcgtgtgcatcgcgcggcggacgcgaccgcctgggacttgccgctgtggatcgcccaggacgcggtcgactcggtggtgatcgctgggccagagttagagagcaaggggggggcggcgaaaccggcgcccggttctcgcccggccgatcgtttgttgtatcgcggggcgcaggggagagcacgctgggcgcagcagatctactttcatttgctcaactgcgggatacggattcccccttcagcggccagcggatcgggcgcaacgagcaatccgccgggctacaaccgagtctatgttcacttggacggcgagttttcgtatgacgcttggtggcgcgagttggcggccggtcgcgtgatggtgaccaacggcccgatgattcgcccctttgtcgagaatcgattgccgggggacgtatttacggcgtccgcaggggaatccctggaaatcgaagtagcgttgaatctgggaacgcgcgacaagatcgcctatctcgaagtcctgaaaaatggccaggtcgaacatgaagtgcggctggacgacttggtcaaaaaccaaggacgactgccgaagattcattttgacgaaagcggttggtttttggtccgcgcggtggccgaagtgcccgagacctaccggttcgcgctgaccgggccgtactacgttcagatcggggatcagccgcggatcagcaagacgtcggcccagttcttctacgattgggtatttgagcgagcggcggcgattcagctggaagctggggaccaacggaacgagattctagaaatgcaccgcgaatcgagggatttctggcgtgatatcttcgagcgagccaatgctccgtagccgcgttgcggcgtcgtcgctaggaggtgacattccagggcgattctcttgtataatcggggttttcaccctgattagctgattgcctgtatgctcgcgccggccgattggcggaagctctatcctttcgcctcccatacgctcgaccttgatggtcaacgatatcactacgttgacgaaggagcgggaaaaccgattctgtttgtgcatgggaacccgacctggtcgttctattggcggaacttgatccaggcgtttcgggggagtcatcgcacgctggcggttgatcacatcggttgcgggctgagcgacaagccgcagaactacgagtacacgctcgagcagcatatcgacaacctgacgcggtttctcgagcgattggatttgcgcgacgtgacgctggccgtgcatgactggggaggcgcgattggactgggcgccgccgttcgccagccagagcgctttgagcgactgatcttgttcaataccggggcctttccgccgccgtacgtgccgtggcgaatcttcgcgtgtcgcgcgccggtgattggtaacgccgcgatgcgcggattgaatttgttcgctcgcgcggcgattacgatggcgaccgaaaagccagagcgaatgacgccggaggtaacagcgggactgcttgcgccatacgatagctgggcgaaccgcgtcgcgatttcgcggtttgtcggggatattccgctttctccgcgccatccgacctacgcgacgcttcagcatctcgaacagcatctgccggacctgcagcagaagccgattcagatgatctggggcgcgcaggattggtgctttacgctggaatgtctgaagcgatttcaatcgtattggcctcaggccgaatcgcatgtgtttgacgacgctggccactatgtggtggaagacgcacacgagcgcatcattccgttggtcgaatcctttctgcagcggaccgcataatgaacgacaatcactgttctgatgggcgttggtcgcagctgacaattggccagatggcgacgctcgcctgtctgctggaagtcaacgcgccaaagccgggcaacgtccatcggggggccgatttcagcaatctggggctcaacgattttgccgccagcgccgtggcgattgggccggcgtttgatgtcgccgcacaaagtcgcatcggccgcacgattctcgcggcggttcgcgcgacgcgctgcgtggtcgacaccaacaccaacctgggcttgttgttgctgctggcgccgctggcggtgacgccggtcagggagttgaatccccgcggcgtctcgcaaaggctcgccgatttgaacgaagacgacgcggctgacgtctaccgggcgattgccttggccaaacccggcggcatggggcaagtcgacgagatggacgcttttgggccggcgccggccgatttgctggatgcaatgcgggccgccgccaagcgggacctgattgcgcggcagtacgtcaacggctgcgagcaggtcttcgccgcggtcgactatttactggatgcgagcgcggcgcatctgccgctcgcggatcgaattgtccatgcgcatgtccggcaaatggccgaacatcccgatagtttgatccagcgaaaatgtggagacgagatcgccctcaaaagctcgctgctggcgcggcgcgtgctggacgctggagcgccgatcagcgaagaatactttcatgagctacggaatctcgacttctggttgcgggccgacgatcatcggcgtaatcccggtacgtccgccgatatcatcggcggcgcgatctttgtggcgctgcgtcagcggaaagtgacgctgccgttgcgatcggcgccgaccttctcagcggaatcatcctcatgaccgaaacctactgggtacgcatcgcgaaagacaatctcgtctttagcgctggccactttattaccttcgccggcggaacctgcgaacgggtgcatggtcataactatcgcgtcgaagccgaaatcttcggccctctcgacgagaaccattacgtcgtcgactttatcgccgcgcgcgacgcgttggcgcagattgtgggagagcttgatcaccggatgctgctgccgaccgcacatccccagatcgacgttgtcgccgatggcaaagaggtgacggccaagtttgaggagcgtcgctgggtttttccgcaggctgaatgcgttttgctgcctgtgccgaatacgacgacagaactgcttgctcgctacgtgggacgccgcttgttggacctgctgcaagagcggaccggcgtgcgcccccaacatctacgcatcgcaattgacgagaactacggtcagtggggcgtctgcgagttgcggggcgaatagcgatcgcagcgcacgccgcatctatcgccatccgcttggcggcagcatcttaaggaagccgaactgcggcttttaccgaagtgcgctaaatacgtaagaaactttcttgaccaaggtgaagtcggacctaggtttgcgtgacgcaatggagcgccacacgcacaaattcccttctcgtactaccgagacatccacgcagttcggcaggatacccgagaaatgcaggtcgaatatatcaatccgttcattcgttcgatgactaataccttcgatacgatgctcgggtgcgggatcaaacggggagcgttagttctcgcccaggatttcaatggttcctacgacgtttgcggcgtgatcggactttccggtcgagcccaaggagtcgtggttgtcaatctttcgcaaagcgtcgcgattcaagcggcagctgcaatgctgatgatggatccctccgagttcgatgggctgaacgatgatgtcgtcgacgccgtgggcgagatcgccaacatggtcgccggcgccgccaaagcggaactcgaagaattcgagctttcgatcagtctgccgaacgtagtggtcggatcgcctccggacattcgctttccgtccgaagtgcatgcgattgcgattccgttcgagtgtgcttggggtcccatgtcgttgaaagtcggcttcacgccggttggcgtgctggcctaagctagcactcgccccgatgaggcggcaaagttttcctcatcgatacgaacctccgcgacgataaaagagagacggcgctttcatcgtcggtagtcgtagggaaggggcatggcaaaagttcgcgacaacgggtctcaccagaccaatcccaatctgcgcaaagcggccatcgtcttgatgagcctgcccgaggatgatgcggctcaactgatgggccggatgagccccaaggaagtcgaagcggtctgtatcgagatcgcgcatctcgatcgactcaccggccaagaacaagaaacggcgatcctttctttcgccgagcagaatcccaatcaactcgctggcgccggcggcggcatcagcttggccaagaatctggtcacgcgagccctgggcaaaggggccaacgaaactctcgacaacgttcgccaatcggtcgaatcgatcccgttcggctttctccgcaaagtcgatagccaaaacttgctgacttttatcgtcgacgagcatccgcaaaccatcgcgttgatcttgtcgcacctgccggcgtcgtacggcgccgaaatcatctccggtttgccggccgatcggcaactgtcggtcatccgccgcatcgccaacatggggcaaaccaatcccgaagtaatcgaagaagtcgaaaaggggctcgagacgcggatggccagcgtgatgagccaatcgtttgaaaacgccggcggcgtccccaccgtcgccgagatcttgaacgtcaccgatcgcgccaccgaacgagcgctgcttgagcatctcgcccaggaagatcccgatctggtcgaagagatccgtcgtttgatgttcgtctttgacgacatccaaaagctggccgacaaagacatgcaagcggtcctcaaaaacgtcgaaagcgcccaatgggctatggccctcaaaggcgccagccaagagctgcgcgacaaggtcgtcggcaacatgtcaaaacgggccgccgacatgctgctggaagagatggactttctgggcgccgtcaaggtttcggaagtcgaaggagtccaacagcaaatcgtcgacatcgtccgccgcctggaagacgccggcgaaatcgccctctcggccggagacgaggaagaacaactcgttcagtagtctgcttgttcgagcccccctttcttcatcgcccgccgcgccggcaagggaaatgcggcctctatctcgactaacgaagccgcttcccgcgtgggggagtttacccttcggcattctggtttcaacattcgacatttgcccgccaggactggaccggaccgcttcgttttttccaacggcctaaaccaatccaacactagcccgagtgcgcaaaccgagggaatacggcctccatccctcgcgcctaaagcccgattaatcgcatcgtcgcctttcgctcccgcaaaaagtagcgtcttccgcccgccagacaggaccggactgctccgttttttttcgtccagtaggttggaccggactggacaaggttggaccggtaaaacactagcccgagtacgcaagtcgagggatgccccagcccaggactggaccgctgaaattttttgcgccaaattacccaaactgcctgagggttagtttaggcggtttggtgctacggcaagcacggcctgccctacggtttcactagttggactggacaattcagctttcctgtcagtgtcccgatcccagaaacgagatcgcttagcgcacgcccggcaagattaccgccgatcgttcactctccacattgggccgcatggctgctggaaccattttcgagcccgcgcagcatttcaacccgccaacctctcccgaagctgactccgcgcacgaaaacatgtgaagacattctaagaaaattgcgagactttagcaattctaaaatgaatcgcggcagcgcaacaagtcgtcgtaggttggcctagacgcgattaacgatgactctgcaacaggcataaaaaaagccgccctgtacgagacatgacggctggttgctccgtagagcagtgcctgcgaatttttcattcttgttacgaaaagagtcgcaagcagaaatcagatacacttccccatttatagcagtaggtatggggctgtcaagggatttctatagcggtattatggcgatggttttgacgcgaatcttattcaacaatcaagtgaagcgatatgccatcaaagtccccctccgtttccccgcttctccttggtcttgatatcggcccatcctccctgggatgggcattgttttctgagtcaggcgatcaaccctctctggttgactgtggagtccgaatcttcccggaaggggtcgagcgggatcagcaaggcggcgaaaaatcgaagtcgcaaagtcgccgcgtcgcccgcggcattcgacggcaagtgcgccgccgcgcgcaacgtcttcggcatttaaagcatgcgctcattacgacaggtctttttcccgccgatgtcgttgaccagcaagaagtcctcgccagcaatccgtatgagcttcgctcaagagcgcttagcgaaaagttggagccgtatgaaatcgggcgaatcttgctgcatctggcgaagcgtcgaggttttctctccaatcgcacgaccgatcggagcggcggcaacgagttaaagggcattctggccgagatgacgcagttgcagggagagatcgccgcccatggttgccaaactttagggcaataccttcatcagttgggcgatgacggcgaaacctttgcccagcgactccgcggacgtcacacgctccgcgcgatgtacgaggacgaattcgaaaaaatctgggagcgacaggccagctattatcccgcgttattgaccgaagaactgcggggcggtgaagaaggaaagcagagctacccgcttgttcccacggctcgtcgcaagagcgaatcgttgctcaagcgatttggcctgcatggcctactcttctttcagcgcaagatgtactggcccaaaagcgtcatcgggcgctgcgatctagagccaaaagaaaaacgttgtccgaaagcggatcggcttgcgcagcgatttcgcattttgcaggaggtcaacaatctgcgtttgatttcgcctgcggatcgcaaagagtacacgttcgccgagtttgtaggagccggcgccgataaaaagctcgtcgactatctctgcgaagcgaaggagcgaacatttccgcagattcgtaagaaattcaaattgcccgaaacgatttccttcaactacgagcgaggcgagcgctcgaaattgcaaggacacgaaaccgatgcgcatttcaatggcaagaaaggactcggcaagcggcggtggagcgaaatcgcagaagacgttaaggaccatattattcaaatcgtgttggaagaagatcgggaggatgtcgcgctgcggaagttgacgcaagattgctcgctcaccgtggaagaagcgcacaaggcaatggcgctgcatcttcccgccggctactcgcaatattcgcgcgtcgcgatttctcggttgctgccgcatcttgaattggggaagctcttaatgggcaatgatgcgtcggactcagccatgcatgcggcggggtacctccggcctgacgaacgagaagtccggcaatatgacctgttgccagaacctccggatattcccaatccgctagtacgtcaggcattatacgaagttcgcaaagtgatcaacgcgatcattcgggagtacggcgccttagggacgatccgcgtcgagcttgctcgggaagcgaagaaatcggccgagcaacgcacgcaaattcgaattgccaatgcgaaacgggagcgagagaacgccgcaatcgccaaaactttgcaagagatgtcccctgcgattcgaccaacccggcggaatatccagcgctaccttctctggaaagaccagggaggcgtctgcatctacaccggcaaggtgattagtcaggcccaactcttcgattctggcgaagttgacgtcgatcacatcctcccgcgctggagaagcctggatgactcgatggcgaacaaagtcatcgcccatcgatctgcaaacaatgagaaaggagatcgaactccctgggaatggctcggtcatgacaagccgcgtttcgatgagctccttttgcgcgcccagcggcttccctatggaaaacgccaacgttttattcagaaggaggtggagctaaccaatttcgtagagcgtcaacttcgcgacacgacctacgtgagccgactggttgtccagtatctaaaggggcttggcgttccgattacgacggtaaaggggccgatgaccgcggaactgagacatcattggggattgaatgcgctgctcaacgaagatggttctcagaaaaagaatcgttccgaccatcggcatcatgcaatcgacgccattgtgattgggcttacagacgccaagcgtttgcatgcgctggcgaacgctcgaggcaaagacctgcaacctccctggagcgagtttcgttcggatgtcgcgacggcgttaggtcgcatggcggtttcgcatcgggttcgccgtcggattcaaggggccctgcatgaggagacgatctatggaccgacccaaaaagcggcccaaccaacgtccaccgaccaaaggccatgggccaaagattggattgaggattcgcaaattgtcgtccgccgcaaatccgtttccgatcttaccaatacgaagcatttagcgaagattcgggacgtgacaattcggaaaattctggaagatcatttgcgtcgtcaaaaagtcgatcccaccaagccgggcgtgatccccaaggacgccttcgccggcagcaacgctcctcaaatgccctcgggcgtgccgatcaaaaaagtgcgtctggtggagcgtggagaaacttggcgaaaaatcggaagcggcgaagcctcgaagtttatcaaaccaggcagcaatcatcacatttcttactttgcaatttcccggaaagggcgtgaaagttggaaagcacacgtaactattatgttagatgcggcgtgtattgcgaaagaatcaatcaataatgggaagattgtcaatcgcagtattggtgatcaagggcgatttttgatgtcgttatcgatcggagaaatgttcgaaattaccaataatggcggagagattctgctatgcgttgttcgtaagatcgaccagagtggacggatctattacaagattcatgacgacgcgcgtgaaagtatggatctaaaaaaggacaacttatatatgtcaccgtcgaagatgcagcaattcgacgcgcgaaaggtcactgtgaccccgctagggaaaattcgtaacgccaacgactgaaattattgaattacctcggcttgcaattacaattcgagctaggcgcgatccgcgccttcgcgtcacggacgacccaacttcaacgtaattcctccgaagtttgggttcttatgattaaacgtacggtcgagatttcccaagagccgtttcatttggggttgcggcacaagcaactcactttcaagcgtgagggagctgtcgttcacaccattccctgtgaagaaattggggtagtggtgatcgatcatcccggcacgacgtacacgcacgcggcgctgcgacaattggcggcgtcggacgcggccgtcgttatctgcggcgccaaccatctacccgcggcgatcctgctgcctttggccgatcacagtgaagtcgtctggcgtttggtggaacaaatcgaagctcccaagccgctctgcaaacggctttggaggcaaatcgtgcgtgcgaagattgacgctcaggcctccgttttgcccgacgattgtcctggtcgtcagaaattgaaatctttgattccactcgtgaagcctggtgacgccgctaatgttgaggcgcgtgcagccaagacttattggcagttctggtatccagaggcgggctttcgccgtgatgcggatagcgacggcgttaacgcattgctcaattacggatatgcgatcgctagagccgccattgctcgtgcaattgtttctgcagggttaacgccagcgctggggcttcaccatcggaatcgctcgaatccgttttgcttggcggatgacttgatcgaaccgttccgtccgatggttgacgagcgagtccgagaactccatcgtcaaggttacgactcgttgacgcaggaatgtaagggcgagttgctaaaactgcttgctcgccagaccagtctagatggtgaaaaaggcccgttcatggtccagttgcatcgtatgctcggttccttggtgcgatgcttgcgcaagaaacagacgtcgttagagattcccgtcccatgcgaataaacgggtaccgcgcaatgtggcttttggcgatgtttgacctgccgaccgatacgaaaaaggcaaggaaagattatgcgctcttccgaaaaggtctcctggagaacggttttcatcggttgcaatactcgatctatcttcgcccctgtgcatccaaggaaagcgccgaagttcatcggcgacgaattcgggccttcctgccgccggaaggagaagtagcggtgctatccattactgacaaacaattcgaacgcatggaatttatgctgggaaaactacgcgaatgtcatccgcaaatgcccaatcagctcgaattattttaatcaattacgaacgtaattcattgtgcgacaggtacttagcaagaagggagtgtatctgattcctgcttgggaccaatccgcaactacgaacatggatgggcggatcgcctttttagtgtatctgattcctgcttgggaccaatccgcaactcaatctcttcggggtccgacgccattggtagtgtatctgattcctgcttgggaccaatccgcaaccatgccgatccgatgtcttcatcttcacggagtgtatctgattcctgcttgggaccaatccgcaacctctgcgctgttctggtcgaccgaattcaaaccgatgcaagggccggcatggcgacgccgcctaggctcggctggtcttactggtcgtttttgtcggtctcgtgcagcgcgacgtttccgtcctcatcgatcgagccgtcatgacggctttttcgggcgtggccaaatttgaggactgcgacgaaaaaaccgccgccgaatgcgttgccaagcgttgtccatagcaggaagtgggcgaagtcggcgaatgtcgttcggtctccctgaaaaatgccggctaagacttcgactgtgcccacaatcgagtgatgtaagtgcccgagaccgatcgtcgccgtaatcaaaaatacgatcacaatttgactgatggtgtcgcggccggcgacgacgagccacgacaaaagccccataagccagccggccaacgtggcgcttagcaggatgacccaccagtcgtagcttacgattttctcggcgatctcttcaaagacctgcgggtcgatcacatgcagattgggaccgaccaagacgacaatgccggcgaagatggcggcgcccaataggttggcgatatacacgatgccccacagtcgcatcaccatcttccatgtcgcttgaccagacagcagcggaagaatcgccagggttgtctgctcggtaaataactcggaacgtcccatcaccaccaggataaatccgagcgggtaaacgagcgcagtccaaagctcgacgaccggaggtgatacttggtcggcggccaaggtgcggacgacagcgatcaagaaaaaactgaatccaagatcgagacccgccgagatcgacgaaaggaacaagcgagtcgaagaacgagacagcgcctccatcccctcgtggagttcttcgcggaggatctgattgggagactttttcggctcttcgctgggcaaatcggtgttcaagtggcgctacctgtccagacgtgacagcatttcttacccagctgtagcgttacagccggctgcggcgcgggccggcgtggatcgccttcgcctagtttgctctcccgcgacgctgacgacgtgacggtcttctggaaaagcaagccaattataccagcacaggtcgactgaatggtgcaaatcgcgcgccttttcatcggttcaagtgccgcgctaagaagggccaatttatctgaacgtgcctgcggcaagatgcttgttcagcggccacggcgaatgttctgcgatcagtaaggacagcggagcggcgtttattcggcgaattcgtcgctgcggaacgcgatgcagcaccatcgccatcggccctactagaaacagatgacagacggaggcgccgcttgtaaactgattatcctacagcgctaaaccagagattaaccgattcttacccagccccgggggcatccgcatgtcttcgtcaagcaatggaactacgccgcggcgaagcattcatgtggacggagcccgcttgaaggcggttcgtttgcagttgggtttaacccaagaggcggttgcggcggcgacaggctacaccgatagacttgttcgcaagctcgaaaacggcggccccgttaactatcaaactctcaacgactttatttcctactatagattgatgctttctcgcgttgggacgagttctttggagcccgacattagctttcagacgttgagcatgcagcctgagcccgaacgagaaacgatcgtgaggaattggtttgagcaggcgtacaaccaaagaaacgtcgactacgtcgctgaagtgttccatcccgacgttagcctgatcgcggaaggccaagtgttgcaggggagtgaggtaatcacgcagcgagtcgccgctgttttggccggatttgatccccttcagattgaagtcgagagtttgttcactcaggagaatacggtgatcgcctattggcacgtcaccaaaacgcattccggctccttctttggcatccctcccacgggacggaccatcagcattcgcgggagctcgatggcggcgttccaggggaacaaaatcatcgaggtccgcgaccattgggatgtgcaggacttaattgcaaagctgacttaaccctggggcgatttttcgttcggccgccgtttgctgggtgagatcggaagttcttaagcagggcgcgcgctgccgaacatcattgacccgcccccccgcttctttccgcgaagcctgaaagtggccgaagtttgccgccggatggtgcgggcaactggttgctgacgcaagccggccgggcttggacagactaggcgggccacccagtcgcctggggcggattacggcgattcgttcgtctacccctttgactcggggggaaagagtctttaagctgattcgttccactcaactgtcgaagagtgaccctcgcagaggggaaccggcaacctggtcaggccttaactggagcagccatacccggggtactctggtgcgggggtctctcctcgacagtacaatcggagacatgaagtcagcgccagtgatctgatgcaccctggttggctgtcaccgtggcctgaggcgcgagccgagggaaacggattaagcactttgaagcggattcgaagtcgccgaccacattccctcggctcgcgcctcgggctacgatgggaaatgccctgacaaatcgtcccagtgcgcaacttcaaagctcgcgcctcgggccatggtggatttggcggcagaccgaaattccccctctcaagccggccgctaaacgatgacggaagaaggaatcgaacacgtcgagccatcgcacgccaacgatcaatatgtggtcgtcgcgcgccgttatcgcccgcaatcttttgaagagctggtcggtcaaagccaagtcgcccaagcgctgaaaaacgcgatcgagcgcggccgggtaggccatgcttacctgtttaccggcgctcgcggagtcggcaagacttcatcggcccggattttggcgaaggcgctgaattgtcagcgggggccgtcggcgactccctgtaacgaatgcgacatttgccgcagcgtgacggtcggggaagatgtcgacgtattggagatcgacggcgccagcaatcgcggcatcgaagagattcgccaattacggtcgaacgtcaacattcgcccgagccgcgcccggttcaagatctatatcatcgacgaagtccacatgttcaccaaagaggccttcaacgcgctgttgaagaccttggaagaaccgccggagcatgtgaagttcatcttttgcacgaccgatcccgaaaagatcccgatcaccgtcctatcgcgctgccagcgatttgacttcggcgggattcgaatggacgagatcgtcacgcggttggcctatatcgtcgagaacgaaggggtcaccgccgagccggaagcgctgcgcttgctcgctcgcaaagcgaacgggtcgatgcgcgatagtcaatcgctgctggagcaactgttggcctttggcggccgcgagatcaccgtcgctgacgtcaatcaaatgttgggcgccgccggcagcgagcagatcgcggtgatcatgacggcgctggccgcacgcgatgcggcggcggtgctggcgtattttgatcaagcgctgactcgcgggatcgatccaggtcaattgattgaacagttgctcggcttcttccgcgacatgatgacgctcgcggtgggcgccggtccgacgctcttgcaaactgtcctgccgaccgacgccgagaaaattgaagctgtcgccaaaagctacggactggccaacgtgatggccgcggtgcagatcttggatgatgcgctcgtccgcatgcagcgctcggcccacgcgcggatcttggccgagatggcgctggtgcgcgtttgccagcttgaggacttacaaagtgtcgccgacctggtggagacgatccgctcgggaaagccgttgccggctcggccggccattcaaatcgcggcggcgccgcagccgtcagcagcaccgcaacttccgccgcaggccgcaccacaagcgatgtccacggtccagaccgacgtcgcggctgagcggacggaatcacgcgtgaacagctcggatccggcgtcttctggccctgtcaggcaggctagtccttctgaggtaacaagttatgtcgaagagccggatcctgaactaggattgagcgagccgccgcggacgaatgggattaagttgaccgattcgactgcgaaaaatatctgggaaggaattctgacagatatgtcggatctagtaggggagtatgctcgcccttacaaaacggtagcaacttctggaccaaaccgactggtcgtttcattttccgcagcgtataattcgcaggtcgagttcttgcgacgaccagcggccaaaacccgcttggaaggaatgttgaccgaagcggtcggcaatccggtgacgctggagtttaaagtcttaaatgacgttccagcggctaagacgcaagaaccgccgaaacgaagtgcgccctcctcgggccaaatgattcgaaaggtacagcagaaccagttggttcagcaggcgattgagatgttcggcgcggaagtcaccagcgtccgagcgcccgagtcgggaggatcttagccgcctatctgagctctgctgttctctcaccaatcaaggagaaacacggtgttcaatctcggcaatctcggcggtatggtcaatatggtgcgtcaggcccaagagatggggggcaagatgcaaggtttgcaggaagagctgcggacaaaacgagttaccggatctgctggcggcggcatggtcgaggtcgaaatgaccggaaccggcgaaatgctttcgctccgcatcgatcccgatcttgtcgctcgtggcgaacgcgagatcattgaagacttggttcccgccgcggtgaatcaagccagcgccaaggcgaagcagttgcacgccgagatgatgcagtccctgacgagcggcatgaatgtgccgggcttggacgacgcgctggctcagatgaccgggggcggtaagtagtaattttcgcctaggtgaacggacgccctgtgatggttcaaacgacagattcagtaacgcgtttggtggatgaattcgccaagctgcccggcatcggtcgcaaaagcgccgaacggctcgcgtaccacattctgcgcgtacacgagtcggaagcgctggcgctggccgattcgattcgcacggtaaagcagaacgtccgctattgctcgcaatgtttcaacttggccgagtccgagctttgcacggtttgccaggatacgcgccgcgatcaaacgctgctttgcattgtcgaacagccgcgtgatttgatggcgctggagcagtccggcatgttccccggcttgtatcacgtactgctgggacgcatcgcaccgctcgaaggtatcggtcctgatcaattgacgattgatgcgttggtcgatcgcgtccgagccggcaagtttcgggagatcatcatggcgaccaaccccaccaccgaaggtgacgggacggcgctgcatatctcgaacttattggccgagttgcccgtaacgttaacgcggctggcgcgaggaatcacgtccggcagcgtcttggagtttacgaataaagagattttggccgacgcactttcgggtcgccaaaagctataattcacgttgttcattcatccacttgaaacctagaaattcctatgcgactttcgcttggtctcgaacagaagctggtccagaagcaagttctggcgcccaggatgatccagtcgatggagatcctgcagctgcccgtcatggcgctgcaagaaaagatcgaacaggagatgaacgaaaatccgttgctcgagatccaagaggccgagccggacagtgttcccgacgggatggacgatcaggtcgagaaatccgaccccgattcgcttgcggatacggaaaaagaatttgttgttgatgagaacaaagacaacgccgacgactttgagcggttgctggaactcaacaacgaatatcccgacacgtttgacgatcgcccgcaacgctcgctgaatcagatggaggatgacgcgaatcgcaagcatgacgcgttggcgaacgtcgcgtcgcgcgtcgagacgctgcaagatcatctcgatacgcagttgggcgaattgaacatcgagccagaactgctggagttggcgatgcgaattatctcgtcgcttgactccaacggttacttgtcgacttcgctcgaagacttgctgccgccggactctagcgaagaactggtcgcgcatgctcgcgaagcgttggcgattgtgcaagcgctggagcctgccggcgtcggcgctcgggatttgcgtgaatgcttgctgctgcagctagagccttcgcaaccctacttcgatgaactgcggacgctgatcagcaatcacctggaagatctttgcgaaaatcgtctgccgctgattcagaagaagaccggctattcgatcgacttgatccaggacgcctggtccgagctgcgaaagctgaatccgaaaccgggctccgcctacaaagaagatttcattccgaacgtcatgcctgacctgacgttggagatttcggacgacggcgaatacggcgtgaagacggaagatggcgaagttccgcagctgcggatcagcaactactatcgcaaacgtttgatggaccccacggcgaccgccgaagaaaaagagttcatcaagcgaaagatcaacgccgcccagtggctgatcgactcgatcaatcaacgcaagaacacgctcgcccgcgtcgcccaggcgattgtcgatcaccagcacgactttatcgagaaggggcccgagtttatcgagcccctcaagatgcagcagatcgctgacaaggtcggcgtgcacgtcacgacggtcagtcgcgcggtcgatgacaaatggattcaaactccccgcggcatctttccgctcaaacgattcttcgccggcggcacgaccaacgaagccggggacgaagttacctgggatgcgatccgtctgaagctgcaggagatcatcgacagcgaagacaaagcgaagccccacagtgacgacgagctagtgacgctgctcaaaaacgaagggctgaacgtcgcgcgccgcaccgtcacgaagtatcgcaaaaagatggggatccctagttcgcgacagcggcgcgattggtcgaagaagggctaaacgcagttccggctagacgctgtggttgacgatcggctgggaacgcatcatttccaacaactggtccgcgtattgctcgacctgcgcgatgacctctggggttggattggtgcgcgacaggaacaagcgacggtacaccggcatcagcggcgtcgccgcgagttgggcggcgcgtctcggcgtccagccggcgatcgacgccgtctggcgaatcaaacgcgtaccgacatcgacgcggccaaaggcggcgacgttccagcctgactcgatgattctccaggccaacgccgatcgcagtttgggatcggccagcaagtcggcgcgatcctgcagacgttccgagatcgcttgcaacgtttcggcaaatcccagcgtgctgtgattcgacaggttttgcccatgcacgcgccgctgatagagcggttggtcgacaatcaggatgtcggaccgtgcggagagcgcgagcagaaagtgaaagtcggacgcgacggtaaatccttcccgaacgccgccgatcgatcgccaggcgtcgcggcgaaagcaaagtcccggatagcctgctgcgtacatgccgtgtcgaacgcaatgggtgatcgcttcgccgcttgcaagctgaaagacgtcaccaaccaggcgacgtcgtctccaagtctggtcccgcacaaaacgcccttgagcgacggtcgccgctttgtcaggtgcgtgcagcagattgcccagcgacacaacacagtccacttgcgggttggcggcgtatgcttgcgccgcttgttggagacgatcggcgtgaaacagatcatcttgatcgaggacggcgatccagtcgccggtagctgcgctgatgccgagattggtcggctgcggaggccccccgctattttgtgcggtcgaaagaatctgcaccggcgaaccgtgctcgccgttccacgctttgatctgatcgagcgagtcatccgtcgagcagtcatccacgacgatgatttctgcagcggggtgcgactgcgcgacaatcgattcaagcgtttcaagcacgaacggcgcgccgttataatgcggcacaatcacagaaatcgagattgcagaatcgttcacgagttcctcagccatgccgaaacgatcgattaagattggattgttagcaaagagttaagtcagggtgaagtctggcgcattccagtggcatcctcactcgatatcccatgcgtgcgaatgcggt

SEQ ID NO: 1799 - DNA, 22109 bp, synthetic construct
  variation 1101: note = n is a, c, g, or t
  variation 18058..18075: note = n is a, c, g, or t
  variation 5371: note = n is a, c, g, or t
  variation 990: note = n is a, c, g, or t
  variation 18050..18052: note = n is a, c, g, or t
  variation 1056: note = n is a, c, g, or t
  variation 8368: note = n is a, c, g, or t
  variation 12154: note = n is a, c, g, or t
  variation 1059: note = n is a, c, g, or t
  variation 1228: note = n is a, c, g, or t
  variation 18019..18024: note = n is a, c, g, or t
  variation 1017: note = n is a, c, g, or t
  variation 8418: note = n is a, c, g, or t
  variation 8430: note = n is a, c, g, or t
  variation 12172: note = n is a, c, g, or t
  variation 1078..1079: note = n is a, c, g, or t
  variation 5377: note = n is a, c, g, or t
  variation 13513: note = n is a, c, g, or t
  variation 12759: note = n is a, c, g, or t
  variation 11134: note = n is a, c, g, or t
  variation 1089: note = n is a, c, g, or t
  variation 1124: note = n is a, c, g, or t
  variation 8424: note = n is a, c, g, or t
  variation 12163: note = n is a, c, g, or t
  variation 5392: note = n is a, c, g, or t
  variation 1225..1226: note = n is a, c, g, or t
  variation 1110: note = n is a, c, g, or t
  variation 18965: note = n is a, c, g, or t
  variation 4674: note = n is a, c, g, or t
  variation 8385: note = n is a, c, g, or t
  variation 5374: note = n is a, c, g, or t
  variation 1122: note = n is a, c, g, or t
  variation 1199: note = n is a, c, g, or t
  variation 1235..1238: note = n is a, c, g, or t
  variation 18054..18056: note = n is a, c, g, or t
  variation 18015..18017: note = n is a, c, g, or t
  variation 1023: note = n is a, c, g, or t
  variation 18077..18079: note = n is a, c, g, or t
  variation 8409: note = n is a, c, g, or t
  variation 17991: note = n is a, c, g, or t
  variation 18009..18013: note = n is a, c, g, or t
  variation 18047..18048: note = n is a, c, g, or t
  variation 19104: note = n is a, c, g, or t
  variation 4665: note = n is a, c, g, or t
  variation 999: note = n is a, c, g, or t
  variation 18007: note = n is a, c, g, or t
  variation 1147: note = n is a, c, g, or t
  variation 18002..18003: note = n is a, c, g, or t
  variation 18030..18045: note = n is a, c, g, or t
  variation 8400: note = n is a, c, g, or t
  variation 1025..1026: note = n is a, c, g, or t
  variation 4696: note = n is a, c, g, or t
  variation 14134: note = n is a, c, g, or t
  variation 1004: note = n is a, c, g, or t
  misc_feature 1..22109: note = Synthetic
  variation 1168: note = n is a, c, g, or t
  variation 1170: note = n is a, c, g, or t
  variation 17996..17999: note = n is a, c, g, or t
  variation 1159: note = n is a, c, g, or t
  variation 1128..1129: note = n is a, c, g, or t
  variation 18081..18084: note = n is a, c, g, or t
  variation 8397: note = n is a, c, g, or t
  variation 1119: note = n is a, c, g, or t
  variation 12157..12158: note = n is a, c, g, or t
  source 1..22109: mol_type = other DNA
  variation 1141: note = n is a, c, g, or t
  variation 18026..18028: note = n is a, c, g, or t
  variation 17994: note = n is a, c, g, or t
  variation 1144: note = n is a, c, g, or t
  variation 4672: note = n is a, c, g, or t
  variation 4684: note = n is a, c, g, or t
gaagtgatgcaagggctgatcctgcgatgatgatcaagagcaacgatcgaggatgggcatgcatcaggatgatccctttgcgtttgatttgctgagtgctgcctttgagttggcgatctttgagacccgctgatcagaagcccaatgctcgagcagcgtgtagtatcgcagggcgtcattcgcgcggacaattttttccatgcgttgggtctgctgataaatatcgagtgttgtatcggtgatttgctcacgggcgagctgtttggcgagccaatcatcgatcgggaaggcatgccatcccagcccgagtaagatcacacgcgaagaaacaaacggcgggagcccgtcgatcacattgaaataatggatcacatcgcgtttgttcatctctcgcaatcgattcagcgaaagctcgttttctgaagcgaatacggagttcaatattccaatcaacctttggctgcgttcgaggcttctcgggtagcgcgagggcaaaatcgcggtaagttcttcgggcgtgcaaacacgcagttcgtggaggtcaattagattggccttgatacattcgaccgcacgctgggcatgctcgatcgagctttcccagaccaacatcgagaacacaagctcgctgatcagcgggtcggcagagatgatcgtgtgatccatgagatccgcgcatccgacgccgccaaggctgccgaaggattgttcaagcttgtgcatgaacttgctcatgatgtcagaatctggcgtactcacccgttggtgtcctctttgggttccgtagtctgtggttccgtggtcgtttcagattcttcgtctggtgtcatgtctggcattgatggtgcctgtgaccactttgaggaggatttggcagcctgttcttggcggtcttgttcgaggatcgagaacacttcctgctcggctttttgcccttcgtcatagatgagtttgagggtgggcatctctttgatatggatgcgttccatnacatctcgncgcanccgtttggtcgcngcggtnannccgtgcatcgtgaggctggcgcgttcttcnggnaagatcgagatatacgccnncgcgtttttnagatcatccganacttcgacnttggtcacngtnancaannccacggatgcgnggntcnttgagcccacgngccaagcgntnttggagctcttgttggatattcgatgcgntttgcaggcttcggcgtctcaagcgnncntctccgnnnngggggtagtgatgtggaattaaaacgcacgccgacgggtacatcggcgtgcgatgggggatcctgtgttaatcgtcgagcgtacgcgcgacttcgattgtcttgtagcattcaagcacatcgcccgacttgatgtcgtcgtagccgatgatcttcatgccacattccatgttggcgcgaacctctttggcatcgtccttgaaccgcttgagctgttcgagcttgcggccgttctcgatgaccacgccatcgcgagtaacgcggataagcgcgtcgcgttggacggtgccgtcggtgacgaaacaaccagcgatcgtgccgaccttcgagaccttgaagacctcgcggacctctgcgtgcccgatgacttcttcgcggatgtctggcgagagcaagccctcgacagccttcttgatgtcatcaacgatgtgatagataacctgatagttacgaatctcgacgcccttgttctcggcgagcgctcggcccttcgagttggcgatgacattgaacccgatgatgatggctttggatgcctcagcgagcaagatgtccgattcggtgatcccgccaactgcttggtgaatcacgcggaccttaacttcttcgttgccgaccttctggatttcagacttgagcacatcgaccgagccttggacatcggctttgagcaccacaaggatttccttgagttctgaatcggcgatctgggtgaacatgttgtcgagggtgagcttaggaatcgcgagcagtgcttggcgctcacgctctcggcgttcggcagcagccttctcggctttcttgagtgaacccaagcagtagaacttatcacccgcatctggaagcgagttgatgcccgaaatctggacaggcattggcgggagtgccttcttgagcttgttgccgcgatcatcggtgatgtcacgcacacgcccaaaggcacgacccatgacgatgaaatcaccaatcttgagttcgccctcttggataagaacattggcaacattaccacgcccgccctctggacgagcttcgatgacggtgccttgtgcctgacccgagaagtcgctcttgagttcaaggatctcggcttggagatcaaggatttcgaggaggtcttggataccgatatccttggtcgcactggttttgacaacttcggtgtcgccgccccatgcggttgggttgagcccatgctctgcgagctgcccgtagatccgttggatgttgtcttcggtggcctgttctttatcgatcttgttgagtgcaacgatgatcggtacgcccgcagctttggcgtgcgagattgattcggccgtctgaggcatcacgccgtcgtctgctgcaacaacaagtacaacgatatcagtcacattggcgccacgcgaacgcatcgcggtaaacgcctcatggccaggtgtatcgataaaggtaacgaacttctcggtatcaccaagcgacacaggcacacggaatgcgcttgttgcctgtgtaataccaccggcttctccatcagcgacattggccttgcggattctgtcgagtagtgaggttttgccgtgatccacatgaccaagaatcgtgacgattgggccacgagcttgttcgttttttcgttcgcgtgctttaaactgctccgcgacctgctcttcagcacccttggcttcgatgacttcaagctcgatgtcccagtcgatcatgatctcttgggctttttcggaatcgatgcccgagttgatggtcgccatgacgcccgacataaagagtttcttgacgatgtcggcacccttgacgccggtggctgccgagagatccttaatcgagaacggagctgcgatttcaaccttaccaccgattttggccggggtctgggcagcgtttgctgatgagcgcatccgcatctgctgttgtttgagatacccaccagattgcttaagccgtgcatcgcgctcggccagatcggctgcggtccatccgcgtcctggtccagagtctgggcccgagcgttggccgccgtcgcgtcgacgcgcgttgccgccgccgccgccaccgcgtggtggacgcccttccattggcattccgccaccgccgccaggtccgccgtaaccaccagcgcgtggtggacgacgccgaggtgcctcgacatgttcggcagcttcgatgcgaataaccttcgggccagaaagcttgatctgggtcttcttctcaagctgacgcccgactggtcccgttgctgttgggcgtgtagggacattcatctttggtggtttgcttggacctgtgatctttggctctggggctcgaacaatacgctgttctggctttgtagttttcgcagctggtgctaatcgggcagcaggcgcatctggttccttgagctttggtgcatgagcagagagcccggcaggaacatggaacgccttgatcttcactggagcaggggctgctggtggtggtgtaggagcaggcgcagcgggtgttgctttggttgctttggtcgcggttgccttgacagcagttgccttgggtgctgttgctttggtcgccattggttgagcaggcgttgcctttacagccttcgtggctttggcaggtgctggtggtgggggggcgattgcgatcgcagtatctgcatcgccatcggagtctgtatcagactcgaccttcttggctttggttgttctctttttggtctcgcgaaccttcgagatatcaaccttttccgcttgctccaccgcagtatgcgatgaatttgccgaatcatcgacagtaaaccattcgcggatggtttgctcaagaccgatcgacaccgtcgacatgtggttcttgatcacatctttgggaagaccctctgcgtgacatttttccacaatcgctttggacttgatgcccaggtcttttgcgatttcaaagattcgtgtattggccaactgctgctccaacgcgtgttgcggttcgtttcggtcgtgtcgtattcggtctcattcgttcgtacacaagcatgtacacacatgtttgggcgatgttctttactatcaatcgccgccgaggatatcggctgctctgttctccgatgccttgtcaggttctgctgaacctgtatcggaatcggctggtgcatttgttgcgatcgcaccaaggatcgcagcggctgcaacctctggtgaagagtcgccagtagcgtcgccagaaagaatcgccgaagcggcttgttcttcctgagccttgcgtgcagcagcttcggctttgtcgatctcttgctgagcagcgacttccttggctttggttgcacaaagctcgatggcttgtgttgaaatttcttcgctcagttcgagttcggtcaagagcatttcttcgccgacctcttcgatgtcgaacaccgagatcatgcccaacgctgccaagcgatcgaccatttcgtcggtgangccttcnanctgctggagngtttccgacaanatcgtcaagcccttggtgaactcttcaggggtcaagatatcaacatcccaaccagtcaaacgagcagccaagcggacattttgcccacgcttgccgatcgccagcgagagttgatcatcacgaacaacaaccgtcgcgcgtccaagctcgaagcacaacgagatttcgttgacttctgccggcttgagtgcattggcgatgaggatctgtgatgattcgttccagcggacgatatcgattttttcgccgttgagttcttcaacgatcgttttgattcgtgaaccacgaataccaacgcatgcaccaaccgcgtcgacttttgagtcgatcgaagagaccgccatcttggtgcgatacccaggctcgcgagacattgctttgatctcgatggtgcgttccatgacttcaggaacttcaacttcgaagagcctacggatgaagtctggatgcccgcgagagaggtagattttgacctgtgcgcccatgtccttgacatcaaggatcatcgcgcggacacgatcgccaggcatgaactgctcgcctggaatctgttccgagcggagcatgatggtctccgcacgatcaacctgaacaaccaacgcgccgcggtcgtatcgttgagcgatgccggtcacgagtgtgcctacgcgtgtggaatattcttccataagcgantgncgntcgtcatcgcggaancgttggatcatgacctgcttaaaggtttgggctgcgattcgtccgaaatcagcggggtccatatccatcggctcgttataacggaagagctggatttcgccggtgatcggatcgactgtacactggaactcatctgcatcgagtgtgccaaagaactttcggcaagccgagaccatcgcggtctcgagatccgagatcaacaggctcttatcgacattacgatcgcgtgcgatcgaatcgaggattcgcatcatttctgctgtgttcatggcttgctccggcttctttcgtgcccgcgtctatgcgagcgttttttggatgtttggttgctgagatgttgagttttttgatactgtctgacgagcattttatccgaacttggataagatgcaaaaatacaaatgaccgcgaagcatatatagccgcggtcgaacgcttggggcgagagggggattccctatctgccgctcagatacaggatggacgcagcggttatcgcattgtccgtcccttcctcgcaagcacagctccgaacatgttcgatagccgcttacccatgatggcgcaagaccataagcatgacatactcctatccccgaacaccatgcccgaagattccggtcaagtatagaacaccgagcaatcaagaatcaacccaattgagtggtcaactcgtgattgggcgtggcgtttgcaaagcaggaagttgtatttcagtcttgggtatgcccttggacccgatcgcctcgggcgacggattgagtgatccgaaccgctcggttaccacgatgttgaccgacttgggccaagaacttggattcctgtccgacaagaatcaaagcagggtctttatgtcccttcgaggtgacgagcatatcgccaaccttcatatcgctgagatctttgagcgtgatcgtagtttcggccaatacagcagatacttctatgccggtctggtcgatattctttgtgattcgatcgtgggatgtattgtcgttctcgcttcggctcaccgcaaaccaactctgcgaactcaactcgtccatcaccggctcgatcacattataaggtatacacaggttcatcgtgcccgcgcgagaggccattcgtacctcgagcccaatgaccatcaccacctcgttgggcggaacgatctggacgagttgggggttggactcgtgggcaacgatctcaaacttgagttcgcggacgctttcccacgcttcagagagcgcatcgagacctcggcggagtacattggagatcaaacgctgctcgattgcggtcatcgggcgctggggaatgaataggtcttggttggtgccaccgagaagccgatcgatgatcgggtagataatcaaaggcgaaacctcaaggcacatctgtccctcaagtttatcaggttgaatcaggttatagctggtcgggtttgggagtcctgcaacgaactcgccataggtcatctgctcacatgccgcgacccggacctcgacaatggttcgtaggaacccggataatgaagcaccaaaatttcttgcgaacgcttcgtggagtgtttcgagtgccagcatctggtctttggagacgcgttctgggcgtttgaagtcgtattgtcgaatttctaccgtatcgagatcttttcgggttcgtgaaaagatcttctggacatcatctgtctcttcagcctcatcgccagtatccactgcattgagcaaggcgtcgatttcattttggtccaacatgctcatggcggggcgggttccaatagaaaagtggtggcgggtcgagacagatcaaaatcttcactcgtatagagatacacccgttgatatcggtctgtcgggtataaaatcttgatcttccgacacctgatgagcatgtttctggaacaaatctcatctttgaacagtttgagatggaagaatcaacttcgattcgacctgaatcgttgaaccgataggatagccgtaggcttctttgccaagaggtttgtatccgatagccaacttgagtttactctctgaatggaatcacgctgtatgcgactcactcgacccatcaaatctattcgttcatctattcgttcattaggttctcgccttgggcttctctgtgtgctcatggtgggggtggttgttgggcctgcattggcccaaccgagctttggcagcgggatggtttcctcgccaccgagtgcagacgatgctccggttgttgtgacgatggaatcgtctgcaacagaagctacacagggttccgatcttgtactcgcagtgatcttggatcatgccgagcattatcattccaacctcaacgagccaattgtccccgaagaaatgggcgatttttatccggttccgacgacgctgcgtctcccagaaatcgaaggcgtgacatttggtgcaatccattggccgactccaatctcggttggcgtcgatttcttcatgacgggtaacccgatcagctatcaggtatacaccggcaaagccgtgatctatgtgccagtccacattgacgatgcggcagccttgggtcagcaagaactcgaactgaacctgagctatcaggcctgtgatgaaacgacctgtttgcctccgacgaatgtaaagctggtcgcgacgatcaacatcgttgatgccatcgcatcggccacaacaccctcagctacatttgatgggtacaacgcaggttcatcagatgctcaaggcacagaccaatcttcagcgggcgaagcagtcaaaatcgagcgtcgattccttggaatgtttgtgatccccgataccaactcgttcgcgggcgtgcttgtcctcgcattgagtgcagccatcggcgggttcatcctcaacctgaccccgtgtgtgctgccagtgatcccgatcaaggtgatgacgatttcagcacatgcaggcgagagcaagtcgcgggcgtttatgctctcgatgtggatggcgattggtgtggtgactttctggntcgggatcgggattccngttgcgtttgtntcnaagtttacngatccatcnatcatntttggnatctggtggatcaccggaatcatcggcgtggtgattgtggtgatgagctttgggattatggggttgttccagatcaagctgcctcagaaggtgtatatggtgaatcccaaggcggattcggcatcagggtcattcatcttcggcatcatgaccgcggtgcttggcttgccctgtttcgggttcgttgcgggtgcattgctcgccggtgcagcgactatgccggcgttgttggtattgaccgtgtttgcattcattggcatcggcatggcattgccttatgttgtgctggcgatgttccccaagatgattgagaagctcccacgcaccggcccagcaagcgaactcatcaagcatgtcatgggactgttgatgctcgcagcgggtgcctacttcttgggtacttcagtgatttcgtacggctctggcaactcgtgggtcttcccatggtggggcaaggctgtgcattggtgggcgatcgggctggttggcgtgacgaccggcggttggttgatctaccaaaccttcaagatcaccaaacgggtcgggccacgattgacctattcggtgttggggttgatcttcgcgaccagcggctcattcgtcgcatacaaccagactatgcaccagtatcactacttctggcagccgttcactccagagttcctcgccacctcgctcgatagtggcaaggtcgtggtgcttgacttcaccgccgagtggtgcctgaactgtaaagcactcgaagccaaggtgctctcgcggaatcctgtcaaggcggagcttttgagtgctgatgttgtcccgatggtggccgatctgacaagtaccaccgctccgggatggaagcacctcaacgaaaccctcggacagaccggtatcccgttcttggtggtctatgcgccgggtctcgaagatccgatctggctctcaaatgcgtatacctcggcacaggtgatggatgcgatcaatgacgcccgagaacgaggggcagcgatcagcttgatcgattgaaatggtggttgagcagggttcatcgtccgatcagaaccagtttttcgggctttgcgggcaacaatctggactcattgcaggttcattgccaaagtcatttgacgaatgcccatttggggaatatctttacccccgcagggacatgtctttgactggctttgcgaaacactctatgcgggtgtagctcagtggtagagcgtcacgttgccaacgtgaatgtcgacagttcaaatctgttcacccgcttttataaaacgcccggtaccaaatggtgccgggcgttattcattgctgcactcagataatcgcggtgtttttgcagtgggcataaaagaagtaggcataaaaaaggccgacggcatctttcaatgtggtcggctggtcgctccgtagagcgtggcctgcgaatgttgtcccgaaggactcatcttgttacgacaagactcacaagccggggttgattacactgcgttgagtctacaggattgatcgggtcttgtcaagtgatatgcggtggaataccatcctaaagccaaacattggctgaaggggcaatcacatgcggacgcttgggcttgatattggcaccacttctatcggctggactcttctcgaagatcagggcgatcgcggcaccatcattgcgacaggcgtgcgaatcttccctgaaggggttgatcgggatacgcaaggcggagagaaatcaaagacgcaggctcggcgtgaagcccgtggggctcgccgacaagttgctcggcgggcgcgacgcaaacgctttttgacgcggtacctgcaagcggtggggctcttgccgacggatgagggcgggcttgaaaccgtgattgggatgaacccgtacccgttgcgggccaagggactcattgagccgttgtcggcgtatgagtttgggcgggtcttggtgcatctgaatcaacgccgaggctttttgtcgaaccgcaaaaccgacaaagccaagccaagcgaaaccaaaggcatgctcgtcgagatcggtaccctggccaaacggatcgaagacaccgggtgcgaaacactcggcgagtatctttataagatcggcgcgggcgagctggtgtcgatcgaagacgagccagtcggtattcgtaatcgtcatacccggcgcgatatgtacgagcatgagttcgagatcctcttcgagaggcagcgtgcgcaccacgccgatctgttgaccgacgatgtgcaaagtcgtattcatcggcggatttttttccaacggaaaatgtactggccaagaagcgtcattggcagttgtgatcttgagcgtcgtctcgctcggtgcccggtggccgatcgggctgcccagcggttccgtattgtccaagaggtcaataatctcaagctgatcgatcgctccaccggcgaagaacgccgacttactcccgaagaacgcggcatcttgatcgcatatctttcgatcgccaaacagcgaactttcgatcagatccgcaaaaaacttggattcaccgaagaggtccggttcaactttgagaatgacgacgggacaggccgaaacaaactccagggacatttcaccgacgccactctcagcggcaagaacgccttggggaaggattactggaagttcgatgaccaaatcaaggaccgcattgttggtattttgatcaatgaggatcgcgaagatgttgcgatctcngccctgatcaatgagtgtggactcgatcaagaacaagccgagcgtgcgagcgcggcgcatcttcccgatagttatgcaagttattgtaagtttgcgatcaagaagctgctcccgcatcttgaagaaggcaagttcttaatgggcaacgatgagacggattcggccctgcatgctgcggggtatctgcgtcctgaccagcgggtggttgatcagcagccggtcctgcccgaatcgcccgatcttccgaatccgattgttcgccaggcattggtcgaggttcgaaagacagtgaacgcaatcatccgtgagcattgcaaggatcgagcggaaaaagcgaagattccattcgaccggattcatgtcgagctcgcgcgagattcaaagaactcgtatgagaaacgccgcgagattcgattcgagaatgcgaaacgacgcaagttgcgtgagcatgcaggtgacgaaattgccaatgtcggcgacaaagtaacgcggagtaagattaataaataccttttgtggcaagagcaggactgtacttgtgtgtattccaacaagattatttctcaagatgatttttattcaggggcggttgatgtagatcacattcttccacactggcggagccttgatgattcaatgatgaacaaggtgctggtgttccgcaaagagaacatggacaagggcgacaagacgccgtatgaatggctggccgaatcagagccggagaagtacgacgaggtattacagcgagccaagaaactgccatactcgaagtaccgccggtttattcagaaggaactcgacaccgatcagtttgttgcccgtcaactcaaggatacccagtatatttctaggtgtgtcactcagtaccttcattgcctcggtgctaagatggttatgccccggggttcgatgaccgccgaacttcgtcggcattgggaactcaacaacatcctttccgataatggcgaaaagacccgcgaagaccatcggcatcatgcggtcgatgcgatcacgatngcnntgatnacacagggncgaattcagaagtttgccgagtcgcgtggggaagggaagcaatgcccttgggatgatctccgcactcaagctgagcaatccgtgatggatataagagtctcgcatcgtgtgttgcgtcgactctctggcgcactccacgaagaaactttttatgggccaactcagaaatttgtcggcgatgatccagaacagtgcattgcaccaggaagcgttgggcatggaatcaatcggctccatgccaaagactggaccgaagactcaggcactttcgttcggcggaaggtggttgccgatatcaaaaatgaaaagcatctcggaaaaatccgcgacaaaggaattcgaaagattcttgtcgagcatctacaaaaacaaggcatcgaccccgatgggaagggggactatccaaagggctgctttgaaggcgaaaacgcgccgttcatgtcctcaggcgtgcccatcaagcgtgttcggctcctcgaaaacaaatctacactccgccaagtgagcaatcgtcgtgattatcatttcgcgcaaccaggtaacaaccatcacatcacctatcgagaaacaacaggcaaaaaaggcancaccaagtgggctggcgaagtgaccacgatgtgggatgccgctgttcgaggacgcaccaaagtcaacggcaaatcacttccgctcgttgatcaatctgacaccgaagcgggcaagtttgtgatgagtttgtcgatcggcgaactctttgaagttgatgatcccaaaggggaactcgggcggatcctgtgtgttgtacgaaagatagatcagaccggacggctgcattataaacagcatatagatgctcgggcatctggagacctttcccccctgaatctgtatgtttctccgaagcaaatgtatgaacacagtgctcgaaaggtcactgtcacgcccgtaggacagatccgatgggcaaacgactgactcaatcctgaggcatgccttatagatattgatttatacatttaattgtgtcgatgcttacaacatggcccgacgaacgattgaaatcagcgccgagcgtgcacaccttgctgtcgagcataaccaactcctcatcattcgagatggacaatctcggcgtgagcttgagatgcgtcaacgcatcccgtgcgaagatctcgggcttgttatcgttgatcatcgagaggtgacctatacacacgccgctttagcagcacttgctgatcatggagttgccctggttgtgtgctcgaacgatcatctaccagcagcgattatgcttccgatctcttcgcataccgaacaagtctggcgcatccaagatcagatcgactgctcgaaggtacncaagaagcaactctggacaacactcgtcaaagccaaaattcgctcacaagctgaaaatcttgatccaaactcctctgctcatcgtcgcctgatacaaatgatcaaggaggttaaatccaacgactccaccaatgtcgaagcacaggcggctcgagtctattggcaagccttgtttccacctgagggtgaatggaagttcaaacgatctcccggcgatcgaacagtgcccaactcattcctcgattatggatataccgtgctccgcgccgcagtcgcaagatctctcgtaggtgccggacttatgcccgcgatcggagttcaccacgcgaaccgatccaatgcattctgtctcgcggacgatttgattgaaccattgcgtccaatgatcgatcggcgagttcgtcggcttgttcaatcaggacgacaatacctcgaccaagaaacaaaggccgagttacttcttacgctgacggcttcagtagtcatcacttcgccaaaccaagagccaaccctcggcccgctcgatgccgcacttgttcgatatgcagcgtcgttggccaagtcgtattcaacaggccaagccacgctcttaattcctcaagagtcatcagatgttctggngtagttcatgccatcattcagcgggtatcgattcatgtgggttttagcgatgtttgatctgccaacagacacgaaggttgggcgtagaaactacacccgttttcgtaaggctcttctgaaagatgggtttgcaatgatgcagtattccgtgtatattcgtcattgtgcaagccgagaaaacgcagcaacacatattgcccgtatcgaacgagcaattccacccgatggagagatccgtgtcatcacaatcacagacaaacagtttgagcgtatgcggattttctggggaaaaaagcgaagaaagcccgagtcacctcccgctcaactcgagttgttttgatgccgtcgctgcttatctccttgtgtgcgaggtgcttacagcgggaagagtgtaatcaaccccagcttgaaagcaagtcgcaacgcggtcgatacaggtcggaagcgattacatagtgtaatcaaccccagcttgaaagcaagtcgcaacttgatactgagaccttccttcaaacccaccagtgtaatcaaccccagcttgaaagcaagtcgcaacatggcaccatctatgatgtgacagatggggagtgtaatcaaccccagcttgaaagcaagtcgcaacggggtagtagttcaaaccccgcacaccattagtgtaatcaaccccagcttgaaagcaagtcgcaacacctcgatgcctttgtgcgtggtcatcgtgagtgtaatcaaccccagcttgaaagcaagtcgcaactcctgttgaatctgagccgaccggccccgagtgtaatcaaccccagcttgaaagcaagtcgcaactcgcggtagctttcaacaacgccgccgatgagtgtaatcaaccccagcttgaaagcaagtcgcaagtttgagcttaaattcgtgtgattttggcggtttatggatagaaatgtgtgtgttttgtagatctattggtttggccgataaatagagttgtttttatgtatcagaggtgtttgtttttgtagaattctggtacactttggtatgcttgaaatcaaagagagaggtcatttttttaacaaacagtcgtgcccggggtcttttgttgttgagattgttattcggtgtgaagacgagaagcagatgaatcgtagggttatgattttgactcgcgatcaaattgaaaaaagatttacagaatggcacgacgaaaatagaggcacaacaagtgtatgtgtgcgtattcggtcttcggtgggcaaaccgatgtgctttggtcggaatcctgaagcatgcgacaggaagttggtgaatcagtctcctgatgtcattgatgtcgtcataggtccagtctcaatctcgaaggaaggggcatcgcacaagcacaagcacaagcatcagcatcagcatcagcaagaaggagatggtattggtgccagccagaatcagatatctcacaatccagatgagcagttcgtaattcgagttatgcccaggtttcaaagacgaaacagttcaaatgataaaaaagagaacgggcgtcagttcgggccggaggtcgagagcaatacgccgatcgtttgtgaacagtgcactcgagaaacagtagatatcataaaacaaatcgatgctcaactcaaagaccatgcgacggatctcgaccggaagaataaatcgagattcaattggttgatgtgtgcaattgcattctcgacactcgttgcaacagtcgctgctataggcccgattgccggtatgtttttgggatcggatggatcggatcaggttcaagaagaacaacagattgaacctgtagggttgctcctgaagcttccgattaaaagttttaacggtatgccgatgccaatcacagacagcaccccgccgccgagcgttggcgatgaaatgaagtgtggattgaactcaataccatcggggcaacgagtgatttctgttactgtcgaaggttcgcgcgtatatacccaactcggagtgagtgagaagtggccgctgtccgatgcgggttcactcacgatgatcgcgttgacatttgagccttcggatgacacttgggtggatgagcaggcagaggagacggggctagatgagttgatgcgtgcgattgagaatagcttgtttagtaagatagagttgccggctcctgaggtcgcaggtggtatgcatcttcactgggtagggcagggctttgagtttcgtgagggcgcagtgccgcgcgggccaggaggaggtggagagagttcgtttcatgattgggcaactgtatttgttgatacagtgcaaggagttatggatgacgcgggatattcgcaatgggcttgggtgggacactcgtttacggtaaagccataagtcggtgttttttaattcaatgggactagttaaagaatggagagagtgatgagcagcatacgaatggcgttgtgtttgatgagcttttatgcagtcttcggggcatttggtggcccggttgatctccctaacccgtttggcaatgtatatgcgttggttgttggggttgaagattatcgaaactgcgattggggtgatctggattatgccattgatgacgccgagcagatgagtgagctttttatcaatcagtttggatataaaacgacaatacttcgagacgcaactggcgatgaaattctgtcagccgtcgatcaaatactggcgagcatcgggccagatgatgtttttctattcttttacgctggtcatgggcagagcattcctgcatcgtctttgtctgattatccagtgggctactttgttcctcgcatggaggaagaccttacaaaattagtgctggctgatgttcgcgaggagatcttagagacagatctgtttgatcggccccatcgcatagaagaaacagacgatcaacccggacagagtgaggaagagtattccgaaatggtggaggctgcgaggacgatttggatttcagaagtagtcaaaaaggaacatgatttacggctgattgaaggatcattacggatggatgaacttcgatcaaagctgtttaactcgcgagcaaagcatgtgatcgcactctttgattcatgctttgccgggctttcaactcggagtgggagcggtgtagcaagcaaaatgaagttggaaaatgaggcgctgattcggcactaccaactattgagtgcaaagtctagatttgtttttaccgcgggcacggggggcgagcaagccattgagcatacaagtaaaactcgaggctattctcaaatgcgagagagtaagccattgcccaaaggtggatctgtaaagcacggagtgttcacctatgaactcttatccgtgcttcaacagattccgagcgaagggctgtctgtttctgcggtacatcaagaggttcgcaagcgtgtatctggtgtgatgcaggtctatgggtttccaaagacgatgacgcctcaacttcgtccatattcaatctctggtggtgagtttgtttttgttcgtaagccatcaaatgattggctcttgcgtacgagagatgcggtcgaacatgcgattgcgaatgcgaagaaaggtgggaaagggcgaggggggctcgaagctattgagttggtgttccaaaaggatagtaaaatggctcagaggcaagctgatataaatcgacttgaatccaaagctttcgttgttttagcattccaggcggggcttagcgggcaacaaagtaacatgagcaatgatgctgtctgggttcaacgctttgacgaatctatgggcaaggcttcttctggtgacccagacgcaatggccgcgctgtactatatgtatcaatacggtttgggaacagctaagaataatgcgcaggcaaggcactgggcagnagnannnncanngagngnnnnnannnannnnnntnnngnnnnnnnnnnnnnnnntnnannngnnntnnnnnnnnnnnnnnnnnncnnntnnnntgatcgcaagaaggcgttggagcaagcctcagccaaacgagatgccggccaaaagaccgccgccacagcagcagcggcgggggttcttgcaatcgggagtgatcacaagaagttggggatcgcaagtctcacagtagcagctgcggcgtatgttcaagggttcaaggacaagcctgaggaatcaatcgaaaactcgattgcgaagatgagtttggacatcaagcggcttgggtcgctcattgatgaaattggtgttcgaggcgatattgatctgaaagagttcgacattttaaaagcttctcttcagactcgtcaacgaaatatcaaccagcaggttcgtaacgaaagcagcggggcgagagggcgagagaccgtattgtttttaattggttcaacttcaaaggagctaggagttgcattacaaagggttgcaaagcctgtcgtcagaaagagatatgagccatcaagagaagagttcgcgaagcttgagttggcttatgcgaaattaattgccatcatgccttaccaaatgaacaatgtttcttggtaggatgtgattaagagttcgagagggttgtgattgtgctgagcctctcgatttgtccaactgaaactgaacagaaaaggattgttcatatgaaagtcatcccgtcattcatgcgattcgtaattccaatggcactcatgatgttgctcatcccagtagggtgtgaatccattcctgtcatcggggatatggggagcaactcagatgagcctaagccggagttgatcgcggtggtcaatgttgaagatccagattatggaggcgagattcccatcactgtaacgatgtcctcgaccggatatcgcgatgcgatcggaaaactccgcacccaaanatggaatgaagcaatcgtattgttgaatgagaaaatagagaatgagcggaaaagggagcgtcttgctgaggcatatttcgctcgcggagttgcgtacgaggtgcagggtcagtatgacatggcgctcgattcatacgangaagcgtatgagcgtgccaaccgtgcagaatacaaagacggtatcgatcgagcaaagtcgggcttggagtaataggtaaagtggttttgattccacaatgccgcgacctctttgtatcagaatctattagtagtatttgaactgtcatgaagcatgccggtggccctatttggggtgccggcattttctgtgctcgcttttatgcttgaacgagtcctttgcggattgcccatcgcgagagttctacgcggttgcagcggccagttttggaagaggtaggtgatatcttattgtcgaccatcttcggcgttcagtccggcgaccccttgggtgacgaactgggcaggtgtgatctcatctgctcgatgatcgcatttttcaataatgataaagtttggctccttgtttcttatgaaggaatagggatgactcgtgaagtgtataagaacgagctttacaccaccaaacccagagagcagaggacagggcttgtgttagctgttgctgcgggaattgttcgagaaatgggtgcgaatatcgaagtcgcttcgattattggagttggaacgatgatcgattcgcatttaaaagtgcatttttaggttccaaaatcatcagagtagcgatagaatgcgcaaggacaaataatcgaataaaagaggagttgcgatgattcacggtgcactcaatatcaagaaactgctcgcagccatggcaaggctcgacgcgtccgatctgcatattaaggtcggaatccctccaacctatcgcatcggcggctcgctccgtccaatagatggcgatccggtgaccgaagaagaagcagatcatttgctcgatccgttgctttctgatatccagaagaggaagtttgaagagaccggcgatcttgattttgcttggcatctcgaaggcgccgatgggcagggtggcgatcggtttcgaattaatctgctccgctctggcaaccacacccacgctgcgatccggcgcgtcaaggcagatatcccaagctatgccgatcttcatttgccagatgtttattcgcaaatcgtccatcgtgaacgcgatggactcgtgctcatcgttggcgtgaccgggtcaggaaagtcttcgacgctcgcttcgatgctcgacgaggtcaacgccacgcgaggcgagaacatcatcactatcgaagatcccgtcgaatatcgattcacacccaagcaatcgatcatctcgcagcgtgagattggcattgatgtggtcgatttccatgaagcactccgccatgtcgtgcgccaagatcctgatgttattttcattggcgagatgcgcgatcaagaaacggtactttccgcgatccaagctgccgagaccgggcatttggtctttgcgactttgcatacctcagatacgatgggcgcgttcggacgcatgcttgagttcttcccccaggacgaacgcgcgtttgttcgcaactctttgtcagccacactcaaagcgatttgcgcacaaaggctgatcccggcgaacgaagagatcacaggttcgaaggttgtgcccgcggtcgagattttgttgacatcgccgatggtgcgtgaactcattcgtgaagagcgagattcagatctgccttcggttgttgcatcgagccgcgaggaggggatgatttcgttcacccaacactttgccgagcttgtcgagaaggaatgggtgaccatgtcgaccgccaaggagtatgctccaaaccgtgatatgctcgaatcgattctcaagggcgtcgaggtcaaagccgcatcacttgtcggccgaatcaagggttagccagcttgggcatgatcatcaggatcaatgccaagctgcttcatcttcttatagagtgttgtgcggttgatcccaagcacatcagcggtctgctgacggttccaatcattggcttcgagtgcgcccagcacgaacttacgctcgggttcgagcatcgcgtcgttgagtgtcattggtacccaagcctgatcatcagggtgcgatgtgatccgcatgggttgagcttctgcctcaagcaccaccggaggcaagtcatcaagcccgatggtctgagaatgggtcaacaccgcagcccgttcgacaatgtttgacaactcacgcacattaccagggtacgcatatcggcgaagcacatcgagcgcatcgggggtgaacccggtgaactgacgccccaactcgctcgcttgtaaatcaagaaaatgctcggcgagggtttggatatcgccaacccgttcacgcaaaggcggcatctcgattttgaccacattgatccggtagtacaaatcttggcggaactcgcccgctgcaaccatctcttcgagcggctgattgctcgccaagatcacacgcacatccacctcgatcgtttcgtttgatcccacaggctcgaacttgcgttcttgaagcacacgcagaagcttgagttgcatccccggcgatgcgctgttgatttcgtcgaggaaaagcgtcccgccatcagcagcgagaaacttgccgaccttgtcagcatgtgccccagtaaacgcgcccttgacatgcccgaagagttctgattcgagcagtgtttcggggatcgacccgcacgcgagctcaacatacggctgcgcctggcggttcgatgcctgatggatcgcactcgcgatcatgctcttgcccacacccgactcgccggtcatcaacaccgttgtgcgcgagttcgcaaccgcgtggacggtctcggatattttgagcatccgatgatcgcctccgaccatgttacccagcccgaaggtggtttccaatcgagttcgcatggtcgtgttttcgcgggtgagttcgtgatggcgcagtgctcgttcgagccccagccgaagctcgtcgtcaatgacgggcttagtgaggaaatcgaccgcgcccaatcgcaatgcttgaaccgcggtctcgaccgttccatacccggtgagcatgatgaccgaagtttggcggtgcgatttgat

SEQ ID NO: 1800 - DNA, 21299 bp, synthetic construct
  source 1..21299: mol_type = other DNA
  misc_feature 1..21299: note = Synthetic
gcgtcagttccatctccggttcgctgtccgagatccccgccccgcgtgagatcaaggagttcctcgaccagtatgtgatcgggcagaacctggccaagcgggctctttcagtcgcggtgcacacgcactacaagcgactgctgcacgctgagagcgactgcgccaacgacatcgaactggacaagtcgaacatcctgcttatgggtccgacgggcagcggcaagacgctgctggcccgcacgctggcccgcctgctcaaggtgccgttcgccatcggcgatgcgaccacgctcaccgaggccggctatgtcggcgaagacgtcgagaacctgctgctcaaactgcttcaggcggccgactttgatatcgaggcggcccagcgcggcatcatctacatcgacgaagtcgacaagatcggcaagacgtccaacaacgtctcgatcacgcgcgacgtttcgggcgagggtgtgcagcagagtctgctcaagatgctcgagggcaccgtggccaacgtccctcctcagggcgggcgcaagcaccccgagcagcagtacatccagtttgacacccggcacgtgctgttcatctgcggcggcacgttcgtgggtatcgaggacatcatccggcgtcgtgtcggcaagagccgcatcggttttgcgggcgtgtcgcagcccgaaaacgagcgtgtgaaggaaaccgagtcgctgctctcgcaggtgaccaacgaggacgtggtgggtttcggcatgatccccgaactggtgggccgcctgcccgtcatcgcgccgctcatgcctctctccaacgaggcgctggtccagatcctcaccgagccgaagaacgcgctggtgcgccagtatcagcacctgttcagcctcgaaggggccaagttgacctttaccgacgatgcgctcaaggccttggccgaacgggcctcgaagcgggcgacgggcgctcgcgccctgcgcgcggtcatggaagagttgatgctcgacctgatgtacgagttgcccgaccaggagaacgacggagccgagtacgtggtcgaccgctacgcgatcgaaaacgcccactcgctgtccgacgttcgcgtgcccaagaccaagtcagcctgagcgggctcccgtcggcgggctgaccaggactcaggcacgcagcgcccctcagcggggcgctgtgcttttttccgcgtccagacttagaccgacagttcgctggcgccccagtggcgttgtccggctacgtcgacgccgatcgccaggtgcagatgtacatgtccgccgatcagcggagccagcacgccgtagcggtcgctgaccagatgcaggtggacctccggctgattacccaggcgatggtcgacggcgcagagcaccactgcgtgtcgggcgacgaaggcctcggccagcatgagcgagcgttccatgtccgggctgcacgcgccgtcaacgcccccgctcaccgcgtgcaggcgaccctggcggtcgacaccgaacgcaacgccgggcgcctcaggacagcggagcccgaccggctcgacgccggggagcatcgcgagcagatcgcgcccgctcggcctggcgtcaggcgctggtgcggcgactgccacgggggcaggtttgacgtcctcacgtggcgaggcctgattggacgattcgcgatggttctcgcctgacagtccgttgcggagcatgctgtggtccggagcatcgggcaggtcggatgcaggggctggcgtcgctggccggccgacctgcggcggaaggtggatcgtgccgctcaccgcctcgccgaggaatcggtcggaggtgtcacgaagccgggtcagagcggactgggcggccacctcatcatcggcgatcatcccgatctcgaccaggtgcaaacgccgcggcgacagggcggcgatggacttgatttgtcggtaactggccacgacgtccgactcgcgcgtcgtcgacaacacgacgatcgcgtcaggcgggtcgctcagaccatccagaccggccacgaggcggccgacttcgtcctgtcggggcagcagcaccacgacgcgcgggcagcgacgggccacgtcggagaccgcggtggcgatcgacgcacaacggtcacccagggccaagcgacgcccgtgcacccaggcgacccatccggccccggcatggcgcacacagcccagcgactgcccggcacggcttgcgatactggtgcagaactgctcgaacgccgattcaggttcatcgaggtgcgccgcgacgaccagttccagtcgggatccgccctggtcggtcggaccgcccagatccggatcgacgcggcggaccggctgggcgtcgccgaggaacagatccaccagtgcgtcgcaatccgcttcgcgcactgcttcaagtctggagaatgccgatcgctcgatgcccttgatttcgtgttccatcaaggcctcacgggagtcagaggtgcgacgcctcccacggcggccttattctcgccgatccgcgcacgctttgcaagtcgggctcatgccggcttggacattccgcgcgcccgcaggtgaacctcgtcggcccggtcccccgtgttctcggtgggtgtctccatgatgccgggggagagatccacgatcgtcggccctctttgcgcgatcatgtcatcgattgccgagtgcaatccgcagagttcggccgagtcgacttcgtccggctccagcgagcggtcgatgccggcgtgctcgatcagccactcgcccaggtcgcggtagtcgagcgcaccggggctgtcgggcgcgtagtcgtccacaggctgcccgaacgaactggcctctttgagggcagtgtcaaaccgcacctgcatggggatgacgtactcggggaactgccggcgcaactcgtcgagcagatcccgtgcgagcgggctgtcggggtcgtgcagcgtgggaaccaggcgcgtgcgtacccgcatgcccagacgccgggcaagcgagcgaaccgtggccacctgccgggcagccccctggaggctgaaataactcgtttccacggggatcaggatttccctcgaggccgccagcgcgttgtaggtcagcagcccgatggagggtgggcagtcgatcaggcacacgtcgtacccgctcgggctcgcgtcgcggatgcgatgaatagcccgcgcgagccgatattccttgtcctcggccgacaccagcgggctcttcgggctctccaaggccgccaccttcatgcggctgggcgccaagtccaagttccgcgccacccgccacagcaggcgcgagtagtcgatcggcttgtcctcgggcgtcatcatcgcgtcggcgatgtcgatttcaatgcgtgactcaggcaccgccagcccggcggcgcaatgcccctgcgggtccaggtcgaccagaagagtcttgaagtttcgcttggccaagatcgacgccaggctgatggccgtcgttgtcttcccgcatccgcccttctggttgatgatggcgatgacccgcaacactgcacccctttcctgtgcctggtcccgggaacacgcaccggaggtggcgagagaacgacaccttgttgccacggttatcgggtccgaggcaggaaagtctcaaaaaaggcaacttcaatggacagatatcgactcgatgccccggatcacggccttcggctcaggcgatcgcaccacacgggccttcccccgcccggtcggaagtaccagacgcatcgacccggccagagacttcttgtcggatgccatgcgatcgaggatgcggtccacgggtggaagttgccgcacctcgaccggtaaacctgcttcctccaacaagttgcgcacgcagacggcctcggcgtcgtcgagcagccccagcgccaccgccgtcgagcaggcggcccggagacccagcgccaccgcttccccgtgcaggagcggtgcatgtgccgggtcgccatctggcgagagttgcggcagggtctcgatggcatgggcaaaggtgtgtccgaggttcagcagtgcccgaccgccggactcgtcgagttcgcgctcatctgaaccgaccactgccgccttgaccgccacgttgcgggcgaccagttcggccagggtttccggcacgcgcccgaggatcgggcctatcgcgccgctcgtccagtcccacaggtcgaggttgccccagtcagcactgatcatggcgtgcttgatgcactcggccagaccggcgcggaactggcgagcgggcagagagtccaaggcgtcgacggacgcgatgaccagttcgggctggtggaaactcccgacgtagttcttgagcaggttgccttcgtggagcaggttgacacctgtcttgccgccgaccgaggcgtcgaccatcgccagcaaggtggtggggcactggatgactcggagcccgcgtttgaaggtggccgcgacgaatccggcaacgtcaccgacaatcccgcctcccagagcgacgacgatgtcgcgtcgatcgagtttcgcggaggcggctcgccccaggagcctctcgacctgagccagagacttgttgctctccgaggctttgagaggttcgagcaccggcaccagttcggcctcggtgagcgaaagagagcaggaactgacaagcgcgggcgggagatcggcgtcgtggatcaccaataccttgcgcgctctgcccgccaccgggcggacgagcacaccaagccgggcgagcagccccgcgcccacgatcacgtcgtaggacttcgacgctgcttccaccctgaccatgcgttctttcacggttcttcccggtcgttccactccaccggcaacgcgtcgccccagagcatttccaggtcgtagtacgcgcgggtattcggttcaaagaggtggaccacgacgtcgacgaaatcggccagcagccacagcgatcggtcgtcgcgagtgctctgaagccgtccgacgcgctgattcgtcgccacttcctccacatgctgcagggccgagcccatctgccgctgcgaggtgcccgagccgatgacaatgtagtcggtgacgttgctcaggccgcggacatcgagcacgacgatgtcctcgcacttgtcgtcgcgcagtgatcgggccacgtcgatggcgaaggcccggacggcctggggatcggaaagcgagcctcccgcagtcgcggaggccccctgagcccccggatccgctgcaaccgcccccggaacctgttgttgacgtgtctgttctttcatcgctcaaggttagacacgccggggtcaggatcatcggcctgcggcttgcgaaagaccgtcaggcccggctcgaggtggctgactgtccaatcccggagatcggacaggaggtcgtcaactgtgtccggccgcgttccccagattgccaggcagcccccgcccgccaagcagcggcacagttcggccagggtcgggcggtcgagttggctgatcgggctgacgatggtgtcgaaagcgccgtcgagttcgccgcgcagagattcgactccgccgcgctcggcggcaaggtgtgggacgggatagcggcgccgggcaaagcgaaccgactctccgtcgcgttcgagtgagacaacaccgccggacggtccgaccgcgcgggcgagagcggccgaaccggcgccggtgccggctcccagttcgagcacgcgcatgcccggcctgatgacacgggccagtgcttcgtaggccgggaggcgggggtcgggcatgaggtcggcgtacacgcgggcgtgttggcaacggatgcgcatgcccgcgccgtcgggaaagcgcacgaggtagtccttggagcctgtttccccggtggccagggcccgggccagcggcgtggcgtcgcgctcggtgtatcgcacctgctcgaccaccagtgagttgcgcatgcccagcagatgtcgcagcgcctgcatgaaccggtccagccgccgacgccggcgcagtctgcgtcgcgatcgctcccgcgcctcggcgtcgccgacgcgaatcgcccgtcgcagcgagggttcctgccccggcttcacgtatcggctccggtccacagcggcagaccggcacacggcccgggcgaacgcggcgcggccggcgcagcgctcgaaggagtcagccagatccacggcgtcggcctgtgctggtgtgcgagtgtggcgcgataggtcgagccttggtgcaggcggctgaccagcaccggatcgttgcattcctgcgaaaggtgcaggaagatcacgtgctcgcgcggctgcgcccggcgcagcaccgccagacactcgtcgttgctcaggtgccccgagccgcccatgatgcggcgtttgagaaactcaggccgccccgaggccatctgcatcttcgggcagtagttgctctcgataccaaggacgtcgcagtcgaagacgtgctcgaccaggtcatcgctgggccgcccgacgtcggtggcaaagcccagccggcagcgccggctccgctgttcatcctcgatctcgaagcggtagacgaccacgcccaactggtcgtggtgcagcagtcgcgggtgcacgctcacgcggtcgaacaggcggaacggttcggtgaaggtctcgacgcggtcgcaccacagccccacgcgctgtgcgtgcccgcgatgcgacgagtgcatgtagatcggcgcctgcacgcgccgatgccgcatccacgagacgtgcgcgtggtcggcgtcgaggtgcgtgagcaggatcgcgtcgatctcccacagttcgatgcccagttcgcacaacaaggcgccggtccggcgcgggctcagccccgcgtcgatgagcaccacgcggcgcgtcccgccgtcgggcagcaggaggaccgagcagttgccgcgcgatccgctggccagcacgcacaacgcaccgacggcgtcctccggcatggcttcgaacgaacctgacttacgtgcgtccccggaggtcatggtggttacagagccgtcagcgcgtccatgctgacttcgctgtcgacgctcttccgcggcatgcgacacaggggacgcttggcggtgcggacgaactcagccagttcggcgacggccttgctgtcggccgccatgccgtcgagcagttcaagcagcggcgcgcgggccagcgacttgccgtggaagccgaggcgataggcacggcggatcgcggtgatctccgcgttgtcaaacccgtggcgccgcatgcccacgacgttgatcgacccgatgatgttgcgaacgctcagcgtggcgaacggcggcacatcgcaactggccaccgcgcccccgccgatgaacgcgaaccgcccgacccggcagaactggtgcacggcggaaaggccggacaaggtcaccttgtcgtacaccaccgtgtgcccggccaggcacgagttattgaccatgatcacatcgttgcccaccaccgcgtcgtgcccgacgtgggtgttgaccatcatgaagacgcggttgccgatggtggtggggcgctcgggcttggtggccgcgtggatcgtgacgtgctcgcgcagcgtgcagttctcaccaaccaccacgccgggggtcgggtcgccgggcttgaacttcacgtcctgccccggaaagccgatgcacgtgaacggatagatgatggtgttcgccccgatggtcagcggcccgcgcagatagacgttgcccagcacgcggacgccgtctcccaacgtgacaggcccgtcaatctcgcatcgaggcccgatttccacgccctctcccagttgcacctgggatcccacgtcggccgaaggatgaacgctggtcatggggcaatcgtatgcgtttcccacgcgccgattcagccggcatcacgcagccgcagcagttcggcgaccgccccggggtcaaggtttccgccgctgatgaccacgccgacccggcggaaatcgaccttgccctcccgggtctgcctgatcagtccggccagccccagcgcccccgtcggctcgacgaccagtttgagccgctcgatcagcagcagcgcggccgacgccagttcggcatcgctcacggtcatcatctggtcaacgttgctcagcaccatcgggaacgtgtaccgacccaggtacggcgtccgcgccccgtcggcgatggtgggggggttgtgcaccgtgcagagccgccgcgtgcggaacgaccgcgtcgcgtcgtcgccgagttcgggctcgacgccgatcacgcagcagccgggcgcgagcgccttcaccgcgatcgacacgcccgacagcagcccgccgccgccgcagggcacgaacaccgcatcgagttcgcccgcctgctcgatcaactccagcccgaccgtcccctgcccggcgatcacgtgcggatggtcatagggcgggatgacgctcagcccttcctcggccgcgatcgtccgaccgatctcctcgcgcgatccggaggccgggtcgtactccaccacgccgctgcccgcggcggcttgctccagatacgcctcggtcgcggcccgcttgatggccggcgcgttgctcggcatgacgatcaccgcccgccgaccgagttcggcgccggccagcgcgatcgcctgggcgtgattgccggaggaataggtgagaactcctcgggcttcagacgccaactgccggaccgcgttgtacgccccgcgaaacttgaacgcaccgacgcgctggaagttctcgcacttgagcagcgtccggcacccgaccagcccatcgagccggcgcgagtgatgcagcggcgtgcgatgcgcgatccccgcgatccgcccggcggcggcgcgaatgtcggcgatgctcaccgcgccggccagcgacatgtcgggcagggcgtgctcggcatggatctcgtcgggcatgcccgagtgtatcgggcgggccatcggtgggcggggcaatgcggcaggccgaggcggcagagccatgcagaggccgccgaaccgagtctcggatccggcgattgattcccgattcccgtctgccgcttctctcctgcccatgccccgacccggacgctcgctccggccatccggcccgctgccatccggccctttgccatccggccctttgcaacgaaaaagggcgccgccgaagcggagcccctctgcggttctgctgcgttgctgctgttcctacgccgccagactcagtccgccgctgcctgaggaggaattggcgttcgagccggtgccgaagatgacctggccgggctcgctggccaccgagacgccgccgctgcgctgggcgatgacgcgatagagcgccatggccagcccctgcggcacgtggccgtccatgaaagagcgctcttcgacgacgtcgatgagttgccagttgctggcggccccgtcgatggggaaggtgttgcgttcgatgcggaatgaggttccgcccgcgcggctgccgtcccacttcacctcgatgtgcccgttgttattgagcgacgcgcggacattggtcggcgtctcgggcgcgcccagcgggccgggcttgctcggcggcgggatcgacgcgagcgagtagacgatgttgctgtcggtggcttcggcgtacgccttgatggtcttgaccagccccgcgccaaactccttcaggatgtcggcgttggtgtggtaattgacggtggcgttgcggctggcgacacgtgctgtaaatgcggccgattcggtggtttgtgcggcattgatcaatgtcgccaatgccgtgacctgcgaggtgtccaggccgatgttggccgcgttgctggcccacgaggcggcgcgctgagcgtaccaggcgatcagttcctgccgggtgttcggaacgacggaagccatgtcttacagtcctttccggcgctcgcacgggccgccattcgttgttgtatcggccgtcggagttgttgttgcatccggcggcgtgttgcacactttggaacggccgggtcatcggccggagcgggccgtggtgctttgaaaatggatggtgcgcgcggcttgcgcttggagtttgtggtgctttgaaaatggatggtgcgcgcggcttgcgcttggagttttcccgcacgctttttgggccgtggtgctttgaaaatggatggtgcgcgcggcggcacctcttcggcgaaagttgcgcccccggggagacccgggcacatagccagatggcaaacggccaaagatccagattccgcatccggtcccccgggccccggcctctctggccctctgttctctggaaatctggccttccggccaggtggccaagcggcgaggtgggggaggggcgatgcgggggcggagcgagagatccaggcccggctggagggcttccccagcccgcagcgccagcgagcgagccggtccggggtccgactccggggaaagaagcacagcagccccgtcgtgcggcccagccccacatccgcgagccgggccagcccggttgaagcgctccaaaaccagaaatcggccgccctgctttcgcattgcggccggtcgctccgtagagcgtggccttcgaatccttcttcttgttgccgaaagactcgcgggccaggatcagatacacactcccagtatggcgactcatacggtgcttgtcaagccgcccgaaatccgtcatcataccggtctatgacacaacagaagtcagaaggcctggtcctgggtctggacgtgggatcccagtcgatcggatgggcattgattgattccgattcaggtcgaatcgtggccaccggagtccggatcttccctgagggcgtcgatcgcgaccagacgggcggagagaagtcgaagagccagacccggcgaaccgcccgggggatgaggcgacagatcgcccggcgtcggctgagaaagcgccggctgcgtctggctcttcagcagcgcggcttgctcccgagcggtgaggctgacctgcagagcctgctctcacgcgacccgattgaactgagatgccgtgcgctcgatcaaccgctgacggcgcacgagcttggccgcgtcttgttgcacctggctcggcgccgggggttccaatcgaaccgtaaggagggcaagtctgacagcaaactggtcgaggccatcgacacctttgaacaggagatcaaggactctggctgtcgcacgcttggggagtaccagcaccgccgcttggcggccttcgacccgggtgccgatcgccccgtccgtggaagccgaacccgccgctcgatgtaccgcgaagagttcgacctgatttggaacgcccagcggcagcatcatcccgacatgcttacggaagatcttcgtacgttgctggacaacgccgagtctgacgacgtctggatgcaccagggtctgatcttcggacaaaggcgcatgtactggcccaagtcgatcgtcggacggtgcgagttgattccgcagaggaagcgctgtgagcgggcggatcggcgtgcgcaaagcctccggatgctcgaggaagtcaacaacctccgcctgaccgacatggggacgggcgagcgtcgcaaactcaccgacgcggaacgtagaaagctgctcgccgaactcgccgggtccaaagagctcacgtttgacaagatgcgcgaactgctcgatttcggcgacggcgtgcagttcaaccttgaacgcggggaccgcaagaagctcaaggggcatgaaaccgactacatcatgcgtggcaaagccgtgctggggaaggactgggacaagttcgacgagggcatcaagaacgaggttatccacgtcctcctcaatgtggacgtcgacgcgctggcgaaggtgaagttggagcggcttggcctgaccggaaagcaggcggatgcggcgctgtgggccacggcgcgccttccgcaggggcgggcctcgtattcgatcgaggccgccgaacgtctgctcccgcaccttgagcgcggtctcttgctcatggccaacgacccgacggactcggcgatccacgcggctggattcctgcggccagacgagcgtgtcccgggccagcggaccgagcttggtccgtcgccggacatcgcgaatccaattgtgcgccaagcgctcgtggaggtgcgacgtgtcgtcaatgcgatcgtgcgggaatacggtcggccaaccgccattcatattgaactcgcccgagattccgtaaagtcctttggggagcgtgccaaggcgcagcgcgatcaaagagctcgcgaagccgcacgcgacgaagcgcgggcggtgatcgagcagcatggccttgcgccccgcgagaggctggttcggcgttatctgctgtggcaggagcagggcggcctctgtgtgtacacgggccggcagatcggccttgcgcagctcttcgatgatgcgcaggtcgatgtggaccacattctgccgcgctggcgcagcctcgacgacagcatgatgaacaaggtcgtgtgcttccgcgaagccaatgccgaaaaggccgatcgcacacccgccgagtggttggagagtgacccggagcgttttgccagcgtgctcggcttcgtgaaggcggcgaagttgccctatccgaagcgggaccgcttccttcagaagaacatcatgctcgatgacttcgtagcacggcagttgacggacacggcctacatcagccggcttgtctttcaatatctggcgcagctcgggtgcgacctggtcacaccccgcggtggcatgaccgccgaacttcgccgtgcgtgggggctcaacaacatcctcggcgaaacgggtgaaaagaaccgggcggaccatcgccaccacgcggtggatgccgccgtcatcgccctgaccagtcgctcgcggctcaaggcgctggcggatggccggggcaagcaggtggctccgccgtggcccacgcttcgcgaagaccttgacgcggccgtgaagcggatcaacgtctcctatcgtgtgcagcggaaactcagcggtgccctgcacgaggatacgttctatggacgcacacagcggctcgaatgtggcccggacggcgtggacaccgcggcccggccgcatgcaaagggctggattgaggacaaggagacgtttgtccgccgcaaaccagtcagcgatatcaagaacgcgggccacctggagaaggtgcgtgactcgaccatccgtgcaattctagccgaacatgtgcggcgcatggggggcgatccggagaagggggcgtttccgaagggctgcttcgaaggcgcaaacacgccacgaatgccgaatagggccaacaaggagccgaaggaggggcagcccaatacaggcgttccgatcaagcgggtgcgcatgttggagaactcccggacgatccggcgcgtttccgagcggcggcgggaccagtacgtcaagccgggcaacaaccactccatcgcgtactttgccgtcccgacgccgacgggtgagcgatgggaagccgtggtgaccccgatgatcgatgccgcgcggagagtgcgcggcctgaggttgccgcccgtggctggccagcatccggacaagccggaggctcgcttcctgttcagtctttgcatcggcgagatgttcgagatgaacgacccggatgggaacggcggccgcgtgctctgcactgtgaggaagatggatgcctctggtcgggtcgactacaagacgcatacggatgctcgccccgcaggcgaaatcgttgcggacaatctgtactgctcggcgtcgaagatgcagaggctaggtgcgcggaagctgacggtcgaccctctgggcagaacgcgctgggccaacgactgaggagccgtcggcgtgatcaaacgcctgatcgagatttccgccgaaccagcgcacctggcgctcgagcagggccacctgctggtcattggaaaggacagcgaccgccaccatctgccgatgcggcggcgcattccccttgaagacctgggcgtgctcgccgtagaccacgatgaagtgacctacacccaccgcctgctgggcgccgtcgctcaggccggggcggtcgtcgtggtgtgcggccaggaccatgctccggcggggctgctggtcccgttcagctcgcatgccgagcaggtctggcgtgtggacgaacaggtcaaagccgggaaggtcattcgcaagcaactctggtcgcagatcattcaagccaagatcgaggcccaggccgccaacctggccgacgcccaacaggcggcgggtttgcggggcatggccgggcgggttcgatcgggcgacccggacaacatcgaggcgcaggcggcgcggcggtactgggcggctctgttcaagggcctgcccggcgagcgcttccgacgcacgccgggccagggtgagccgcccaacaacctgctcgactacggttacgccatcctccgagcgggcatggcgcgggcgctggtttcaagcggcctgttcccggcgatcggcctcaagcatgcggcgcgcgggaatgccctgtgtctggctgatgacctgatcgagccgctccggccgatggtcgacgcccgggtgcgccggctcgcgtttgaaggtcggcaggaacttgatcagtcggtgaagggaattctgctcggcgtgctgcacgccacctgctccgatggcggcaggtcaggccccctgatggtgatgctgtcacgctattcgtcgtcgctggccgacagcctggcatcggggagtccggcactgcgtatcccggtcgaggagtttggcatggtcgattctgagggcgcagacgacgggcaaacgtgagccatgccctcgctttctgcgtacaggttcatgtgggttgtgctgatgttcgaccttccgatgcacaccaaggcggaccgccgccgctacgcgatattccgcaagaaactgctcaaggacgggtttgtgaagatgcagttctcggtgtacatccggcactgcgccagccgggagaacgcggaggttcacgagttgcgggtcggccgatgggtgcctcaggaaggggaagtgcggaccatcaccatcacggacaagcagtacgaaaggatgcggcgttttgtcggaaaactgcggacaaaggtcgaggatccgccgtcgcaactcgagtttttctgagtggtccggcccgcaagtccagcggattcatggacttgcgggcctgccagtgtatctgatcctgccccgagagcaatccgcaactgtactcagtcagcgcatcgcgtcccggcgagtgtatctgatcctgccccgagagcaatccgcaacccgatggcggcgatgccgttccagggcgggagtgtatctgatcctgccccgagagcaatccgcaacgacggggcggcagcactgcccctcgatgagagtgtatctgatcctgccccgagagcaatccgcaacgcactggacgactcggccgggggggtagtcagtgtatctgatcctgccccgagagcaatccgcaacagcgcaacgctcactgcgacgcccttgtcgagtgtatctgatcctgccccgagagcaatccgcaacaagaatgtcggacagttcaacctcatctgcagtgtatctgatcctgccccgagagcaatccgcaactccgtggtcgaatgggctgagacccaacccagtgtatctgatcctgccccgagagcaatccgcaactgcgatgacggtttttccgtcggcggcgagagtgtatctgatcctgccccgagagcaatccgcaaccagtccagacgtaggggctgtcatacccacagtgtatctgatcctgccccgagagcaatccgcaactgcacgccgtacaccatgacacgacgggggagtgtatctgatcctgccccgagagcaatccgcaactcggcgggttcggacctctatcgttcgcaagagtgtatctgatcctgccccgagagcaatccgcaacgcaatggtggaagcgttgtgtacggttccaagtgtatctgatcctgccccgagagcaatccgcaacagcgaccgcgtcgtcgaggtcggtgcccgtagtgtatctgatcctgccccgagagcaatccgcaacgattcaccggggcggtcactcacagcctgagtgtatctgatcctgccccgagagcaatccgcaactgcgcacgatcaacacggtcacagcgcggtagtgtatctgatcctgccccgagagcaatccgcaacccgacggccgcgatgccgttccagggcgggagtgtatctgatcctgccccgagagcaatccgcaacaccgccgagggcgccccggtcctgatgtccagtgtatctgatcctgccccgagagcaatccgcaactcggcatgaggaacaaccagaacaaccggaagtgtatctgatcctgccccgagagcaatccgcaaccttgaacggtctttaccgctcaaccagttgagtgtatctgatcctgccccgagagcaatccgcaacctgcgcctgcgtccacgtcgccacgatcggagtgtatctgatcctgccccgagagcaatccgcaacgccgccgcgccgttatgttgtacccaccctagtgtatctgatcctgccccgagagcaatccgcaacatgagcgaccttggcggttggtgtgacgggagtgtatctgatcctgccccgagagcaatccgcaacccaagaggtatcacgccaagcgcggagacgagtgtatctgatcctgccccgagagcaatccgcaacatccactcggatacgaccagcacccggtccagtgtatctgatcctgccccgagagcaatccgcaactttgaacccgtcgagtgtggccgcgaggccagtgtatctgatcctgccccgagagcaatccgcaaccaaactctcgccaaccagatccgcgccgagagtgtatctgatcctgccccgagagcaatccgcaacaacgtcacgacgccggccaagtacctccagagtgtatctgatcctgccccgagagcaatccgcaactccaatccgaaagggttggagagaatttgtagtgtatctgatcctgccccgagagcaatccgcaaccatcggccggttggaaaccggccccacctgactgtctctgatcctgccgtaacccttggtggaggagacgcgatcgtgtggggcagatacaccagatcatgcgatcgtggcccgatctgcggcgatcttggggggagcgtgttggggtgtggcgtgatccggggtcttccgccgtccctcagaccgtcgcagagatcgctcaattgtctccgaagatcgatcaaatgtcttcgcgcatcgatcaaatgtcttcggacatcgatgcgtggtcttcgcgcatcgatcaaatgtcttcggagatcgacgttctgtccccggacatcgatgaacgggcgtcgcacagcgatgaatggtcctcgtgcatccacaccgggggcaggtggcaccgagtcttgtgccgccgagttcggcgttgcgaactcggtgcaaccccggaccggctcgcaccgacgtgccaggacgcacgtcggtggcacttcggtgcgccaggtggcacctcggtgcgggcgggcggcacctcggtgcgggcgggtggcacttcggtgcgccacgcaggcgccacctctgcgcacctcctttcaccgccgcgccagcaggcgggcgagcaggtcgcacgcgaccatggccagcacgatcgtcgggccgggctggacatccaactcgaaggccgcgaccaggccggcaagcgagcagaacaggcccaggctgatcgacaaggtgatgaccgtgcccaggcggctcgacagccgcagcgcggccgcgccgggcagcaccagcaccgccgtcgccagcaccacgccggccagtttcatcgtgatgaccacaaccaccgccagcaccgccagcacgaggctgcgcaccgaggccgtcggcacgccgaaggcctccgccgccggctcgtcgaacatccagaacagcaccgcgtggcgcttccacaccagcagccacagcgccacggcgcccagcaccgcgcccagccacagatcgctccaggcgatggtcgtgatcgagccgaacaggacctgttcgatcgacggcggcggggtcaggccgcgcgccgccgcggcccgctgggcgtggtgatgcagcaggaacccgattgccatcgcaacggacagcacgatgccgatggccgcgtcggtgttgcccgagcgtcggtcggcgatcgcggcgatgagcagggccgaggcgatcgcaaacacgagcaccacgcccatgagcagggcgttcgaggtcgcgccggccgtgcctgcgccgagcaccagggccagtcccacgccgccgaacgccgagtggctgatgccctggccgatgaacgagaggcgtcggacgacgaccagccaactcagcgcgccgccgaggatggcgaccagcacggccgtgagcaccaccggccagaagaacccggccagcccgggctcggtgagatacttcagcgtgaccacgggggcgctcctgattcggcgatccggccaaacggtgatgcggccgtcgggttgcaggtcttgtcgggccgccggcgacgtgatgtttcaccaccgagcggcacgcagtgacacgacgaggcggtgtgatctgagatccggtggcggatgatccggctctctgtgatccggcgattggtgtgcggttgccgacgctcgcctttgctcatgccgagtgcccgatctctcatgccttgccttagtgctcatgcccgcacccgcacgtcccgccggcgcggtcagcgcccgcttctccggccgtcaccggaccgaccaccgcctccacgtcgtggcggaagacctggccgaggatctgcggcgtgagcccggcggccgagccgtggaagtgcatcgtccgcgccaggcaggcgatgcggtccgagccggcgacgacggttcgcagttcgtggctgaccagcagcacggtcagactcagttctttgtgcaggcggttgagcatctcggcgaatcgctgctgcccgcgcacgtcgatgccgaccgtcggctcgtcgaggatcagcagccgcgggcgacgcgacagcgcccgcgcgatcatcgcccgctgcaactgcccgccggacagcgcggcgaccgggcggtcggccagcccgtccagttccagcaggccgatgatgcggtcgatgtgcgcgcacacgtcagcccccggatgcgccaacgggcccagcggcagcatcgcgggcatcgcaatgacctgtcgcaccgacagcggggcgtccagcgccgcctcgatccgctgcggaaggtagccgaccagtccctcggccgtggctcgctcgggcgtcataccgaagatccgcacgctgccgcgatcggtgcggagcagaccgagcacgagtttgagcagcgtcgactttccgccgccgttgggcccgaggatgcccagtttctcgccgacttcgacgcgcagcgtgatgttgctcaggacgtcgtcgggtgatgagacggacacgctgtcaccgcccccgcccccgggcgtgctcgcatagcgataacacaggttctcggtcaggatggccggctggtcgctcatgggcgggcgctcgcctgcgtcagtgtggcgaccagcgcgtccaggttgctgtgcatcatcgcctcccagtcgcccgatcccagcgggtccagcgtaccgatcggcagccccgcctgctcggcgatgcgccgcggcagggcgctgggcgcctgcggctcgaggaacaccgccaccacgccgcggtcccgcaccgtcgccagcgcggccgacaactcggcggcactcggaccggcatgccccgacgtcgcgctgagcgagaactcgtgcatgccatagcgtgcgagcattcgcgcaaaggccgggtgctgggtcagcacgctctgcccggaaaagggcgccagccgctcggcgtacgccgcatccaccgtccggatccgcgccagcatcgcgtcccgccgcgccgcaatgtcggccgccagcgacggctgcgcggcgtggacccgctcgatcagcatcgccgaggccgcctggacgaactcggcgcacagcaccgggtcggtccacacgtgcatgtcggcgtgcgaggcgcgctcgcctgcggcgtggtcgtgctccgcgtgcgcgtcggcgctgaggcctgcgtcgaccagttcggcaaacaccgcgatctgctggtgggcggggcggtcgcgctggaactgctcgagcgccccctcctccatgcccatgccgacggcaaagagcacgtcggccgtgcgggccgtggcgacctgggcgggcgtgagccgatgcccgtgggcgttctgtccgggctccacgagcgtgacgacgccgatcgtctccggcagcagcgggcggatcagcccacggatcggcggaatcgtcgcgacgacgagttccaggcgatcgccacccggagcctcgccacgcccacaccccccgagcgcgaacagcccggcgagcagggtagagataatcgcaacggtcaaacgcgaatgcatttgcaaatagtagccgccggggttcccgggagttcgccacaaggtcaaagcgggcggccgccgcgccctatggaaggaggtccgaccgggagcgagggttctgaccctcgaagccgtcgtcggctgcgaaagagccctcgacgccgctttggccggtcgctcgccgggcacttggcgccgatccgacggcgctgcgtgcccggctcgggcagacagccgcccggcagagggcctagacttctgcccacacggggcggtagctcagctggtagagcgcatcgttcgcaatgatgaggtcgggagttcgatcctcctccgctccatttgaaggaaaggccctgttttacggggctttttcgctttttggggtggaccggaaaagggccgaaaaggggccgggggagaatcggggaagaaagattcgacccgtccgcacactctgggcatgagcacccagcagattcaggccagcggagacccattggagcgccgcaagttcggcgacgccaccttcgccgggtggttgggcgcatacgccaccgtttgggcgaaccacgtcctgacccggcggcaggcggatggtctggccgtcccggactggtgcgagttcgcccagaggaactacacggccatcgtgcggtgttggaacgcttggacaatccaacagcacgtcaaagtagccgttgcggacggtgcccaggttgatcgtcagttggaactccacgggcttctcgcgggcttcttcgccatgactagcaggccgctaagcaagtctgcgtttccggctctttgagtgtacattgccgtgcattccggccagggggttggctggtgctgcaaggaggctcggc

SEQ ID NO: 1801 - DNA, 14548 bp, synthetic construct
  misc_feature 1..14548: note = Synthetic
  source 1..14548: mol_type = other DNA
tctgttcttcggtcggttccgggacatcgcgaataaatcgttccgatgggatcacgacgtagctggtctcggcggcatcgaaggtctgcttggccatgcgggcaacgcgattggtcgagtaacgacctgtgcgtgcgtacgcctcgcgcatgcggagcacaccacggagtttggcgatggccttgcgaaactcctcgatcgagtggaactggccggcgccggcggccgagccctcggtcgattggatcctctggagccactggtcgcggtactggccgaccaactggaaggcgatgctctggaactgcgggttctgctggatcatggcgcgaacattggccaacgccagttgctcggcgatgaatggatagagcgtcaggccgtcctgatccgaacccgtgaacccggcctgctcggcctcgtgggtcaacaggaaccactggatatcgcgatcctgagagttggtatcgagcgaaagaagaaaggatgagaggttgccggtgccaccgagggcatcgatcgaacgcaactcattcgcggcggtgcggagaacgcttgccttgagcggctttccatcgaagtcggcgatggtccggtcgttgagcttcccgagctgctggatggcctgcggcgcgaggaaggcgaccatcagcagcgagccgccgatgacgaggatccacttgttgtacttccggaggaatttgagcattggtccaatcctgaatgaaaggcggccgaccgggagatccgatcggccgcatcgagtgtgcatctccgtgggccggtgccgagtcggcagggcccgatgaaatcagcggtagaattcgatcacgaggttggggttaatgtcgaatgggatctggtccgaaacgggcatggcgacgaccttggcggtcagtttgcccgggttgatgtcgatccagcccggcacctcgtacccggccatggtttccatgtgctcgcggacgagcttctcaatcttgggtttgaagctgatctcatcgccgaccttgatggcaaagctcgggcgatcgacctttttgccgttgacccggacgtggccgtgaacgaccatctgcctggccgcccagatggtgcgggcaaagccgcaccggcgcacggcgttgtcgagccgcgtctcgaggagttgcatgagcagctcgcccgtgttgccgggcctgcgggcggcctcatcgacatagctgcggaactgtttttcgagcacgttgtagtggtagcggagtttctgtttttcgttgaggcgcaggccgtagtcgcgcatccgcctcatgcggtagccgtgcatcccgggcgggttgagctggcgcttggtggtgtgcttggggatgtcggcgatcgggacgccgacgcgccgtgaaagcctgaccttcggaccggtatatcgagccataacgggttcctttcatccgtcaccgatcggcgagcgatcgggtgccgagggctcctcggcgatcgggtcgggatgtcgcggctgcgatccgaccgggtgatccgggcacggtgcccatatccatatgattcaagcccgccggagcccgcgggtcaacacatcccgcgctgcgattgccgggttccgggccgggtcggctagactccgggcgccgagcgatgagccgcgaccgaggggaagcgggtcagtttccagcggagggcgactccttggaccgaaccatacagctccgggttctgccgacggatgggactcgaccggctcagccgaaagaaaaatgcggcatattcgggatctggggcgatccggatgccgccaggaccgcctatctcgccctgtttgcgctccagcatcggggacaggaatccgccggcatcgccgtttccaatggtgaggacctcgaaggccacctcgggatgggcttggtccgggatgtattctcggcttcggatctgaatcgcttggccaggttcggttccgcaggggcgatcgggcacaaccggtattccacagccggcggctcgctgatctgcaacacacaacccctgattgaacgcaccggcgatggtcccgtcgcggtggcgcacaatggcaacctggtcaacgccgaggcgctgcgtcggctcttcgccgagcgcgggcatctctttcacaccaccagcgacaccgaggtgatgatccacttgctcgcatcgcccgatcagcgggagacgcccgacccgctggccgcctcgatgcgccggcttcagggcgccttcagcgtggtgttcctgttcccggatcggatcgaggcggcgcgtgatccgtggggatggaggcctttggttctgggcgagctcgagcgcgatggcaggctgtgcccggtcgtggtcagcgaaacggtcgcgttggatgtgatcggcgcccggttcgtgcgcgaggttgagccgggcgagatcgtgacgctttcggatgccggtgtcgagtcacgccagttcgccgagccggcggaccacctggcgatgtgtattttcgagcatgtctacttcgcctcgccggcaagcacggttttcggacagaacgtgctcggcgcgcgcgaggagatggggcgtacgctggcgcgcgaagccccggtcgatgcggattgggtgatgcccatgccggattccggccgatccgcagccaatggctatgcgcacgagtccggcatcccgtaccgcgaagcaatcgtgccgaatcgctacgtcgggcggacgtttatcaagccgacgcagggcgaacgcgaggcagcggtccggctgaaactcaacatcgtgcgcgagatcgtcgaaggcaaacgcctgatcgtggtggatgattcaatcgtccggggcacgacgacgagattgaagatgttgcagttgcgcgaggccggcgccagggagatccacctgcggatcagtgcgcccccaatccgtcacccgtgtcacttcggcgtggactttgcctgtaaagaacaacttatcgccaacggcaagagcgtcgaagaaatacgggcatttctcggcgtggacagcctgcacttcctttcgctggagggcctgctcggtgtcgcacggcatgatccacaggcgtactgcacaggatgcttcagcggcgagtacagggtcgatgtcgaacacccgcaaaccggcgagatccgatcaaaggaacaggcgaggatgttctgatcctgcatgccacacgagcccctcgcgtaagcgagggcgccactcccaccgcccagatcagaaacaaacccgatacacttcgcccgatggccgacctccccgcgtactttctcacatggaccacctacggctcatggcttcacggcgatccgcgcggctcggttgatgatgcacacaacaaacgacacacaccttggctcccggcgaaccccgaacgcctcaaatctcgcatcgaatcattgaacgaagatatctttctgctcgacgatcattccagaacaatcgtgcacgcagcgatcgagcgtgtctgtaaattgcgaagctggaagccacatgcgatcaatgttcgaaccaaccacgtccacatcgttctctcggcgatctctcacccgcccgagcaagtgatgggtcaactcaagtcgtggagcacgcgcgacctgcgagcatcgggtcacctcggtgatcgaaaccggatctggaccaagatgggaagcacgcgatggctcaagaacgagaacgccctcctcgcggcgatcgattatgtgctcaaccaccaatgattgcgtattaatggcgccctcgcttacgcgaggggctcgcacagctcctcatgcggggggctcgtctggcgcggttttgtgcgcggtgtttgggccctaggatggtgcgatgcctgaactgacgcttgcccattcgccggattctgatgaccttgtgatgtggtggccgatctgcggcatgacgcttgacgatggctccccgatggatgggccgatgggtagtcccgcgatcgacacgggcggctttgtgttcagaccgatggccgaggatgtcgaggtgctcaaccgccgggcgatcgaggtcggcgatctcgacatcaccgcaatcagcgcgcacacctatccgcatatcaaggttcggtaccggatcacggattgcggcgggtcgttcggcgagggctacgggccgaaggttgtggttcgcgagggcgatccccggttcgccgatggtgtcgccggcctactcgaagatggtgtctccatcgcggtgccggggctgaaaacgtcggcgtttttggctctttcgctcctgctgcgagagattgatgcgtcgcggccggtgcgggcggtcgagatgccctttcaggagatcatcgctgcggttcagcggggcgatgttgatgcggggctgctgatccatgaggcgcagctgacgtttgcggatgcgggtctgcgcaaggttgtggatctcggacagtggtggggcggtgaggatgggtcacctttgccgctcgggttgaacgtgatccggcgggatctggatgaccggttcggcgaagggacgtgtcgaaaggtgtcacggatcttgagcgagtcggtgcggtacgcagtggaacacgaatcagagtcgcgtgcgtttctgaagatgcggggcgaaggtcggccggagtggaacgatgaggcgttggtgaacacgtacctgtcgatgtacgtcagcgggttgacgcggtcgatgggctcggctgggattgaagcgctccgtcgactgctgggtgcgggcgccgaggcggggctgtgcccggaccccggcgagattgacgtggtctgatcggggagactgtgatgaaccttgtgcggacggaattcggtattgcggtggatcggcccggggagccgccgttgccactgggtcatatcatcgggatcgggcgcaactactcggaacatgccctcgagatgggcggggtcgctccgacccggccgatgtatttcacgaagaacccggcctcggtctgtctcgatggagagccgatcgtgatcccggcgatgtgtcgggatgaatcgacgggcgggccggaacaggtcgatttcgaggccgaattggcggtgattctcgggcggagtgtgcgcgatgtgccggagtccgaggcgctcgatgcggtgctcggcgtgtgctgcgcaaatgatgtgagcgcccggtggtggcagaaggagggcgcgggcggacagttctgccggggcaagagtttcgacacgttctgcccgctcgggccgagggtggtgccggtgggcgaggtgggcgatcttcaggatctgtcgattcggtgccgggtctcgggcgaggtgatgcagtcatcctcgacgaaactgatgaactttaccgcagcctttctgattgccgagcttagccgatcgacgacgctccgggctgggacggtgatcttgacgggcacgccaagtggtgtgggtcacggccgaaccccgccgaggtatcttcgcgccggcgatgtggtcgaagtcgagatcgaacgcctcggtgtgctgcgcagcccggtcgtggatgggtgacgattcacagttcgatgctcggcacgacgcgctcggcttcggaggcgagctcgaaaaaactctgcggctcgaagttgaaggcaccggcgataagattggtcgggaatgtcccccggagttggttgaactcgcggacattggcgttgtaaaaccgtcggctggcggcgatgcggtcctccgtgagcgacaactctttctgcagggcgagaaagtgcgtgtccgcgcgaagctgcggatacccctcgacaacgacgaagagttgtttgagattgagcatgagctctgtctcatcgacggcctggcttgcgggatcgcccgtgctggagatcgctttgttccgggcttcgacgatggcctgcagcgtgtcgcgttcgtgggccgcgtagcccttgacggtctcgacgaggttgccgatgaggtcgtatcggcgtttgagctcgacatcaatgtccgaccagctctccttgatgtgctggcgcaggcggacgaatcggttgtggatcgccaccacccagatcagcgggaacaggacaagggcggcgatgatgatcaggatgacaagccagggttgcatgggtcaggcgctcacggttcggaggtcttcgaggacaaagtcgggccagaggtcgatgaacttggcggtccattcgagcttggccgggaactcttcgggtttccatcggcggtttccggtgacgatgcagatgatgcccccgcgcatgtcgatcgtctggcgcggcgaggcgaggaggaactccatcatcgcgggcgagatcacgttgtaggcgaagcgtttgtccgatgatttgacgaggaacttcttgctgaactcggcggactcgaagtcgatgtcgtcgaagccgagcgccgagccgatcttgtcgaagaaattctcggggcggatgaacaggtcggggatcatcgggtagggcaggtggaccagcaggtagctcagccgataggtcgtggtggtcgtggttttgccattgctcgatgtgaccttgtagaggtagtcgcccatcttgaccgggtggggtgtgttgttgatcgtgtattgaccggcgagcgtgttgtacgcctgtcggctgtggccgagacgaaagatcgggaaccggcggtaccgctcatcgtgcgaagggtctggaaatggatcgaacgagaatgcgatccgatcggcgagccggcccagcgcctcctcacgtgcgagtctggcctttcgatcagcaatcgagccgaggacaatcaggacgatgaagatcccgacgacgacaatgatgattcccggccccatgtcgctgagtgtactccctgcctgctgtccggttcttcggattttcggtgcataccgttgcagacatggcctcgaagcggaagaaaaaaccgggcaacgagccggagatccacaatcgccgggctcgctatgactacgccatcgagtccacgctcgaggtggggatcaagctgcacggctcggagatcaagagcgtccgcgccggcgaggtctccatcgccgaggcctacgtccgcgcggaggagtcgcctctttcgctccggctgatcgggatgaacatcgggcactacggcccggcggccggtcgcaaccacgccgccacgcgcgaccgcatcctcttggcccacgccaatgagatcaaacgcctggcgcgggcgacgcagagcaagggcatgaccatcgtgccgcttcggctctacttccgcaacgggttcgccaagatcgagctcgggctcggccggggcaagggccgcagcgacaagcgcaccagcatcgccgagcgcgagcagaagcgcgagatggaccgcgccatgtcgaagaaggtcgggtggtgagtgttgttccgcgagtcttttctggaaagaaggggtccggggcgactttggatcttcggggccgcctcgctcatgcgggggctcgcgtgcaggatttcctgcctggcgcgatggtgatgggtgctagatgcccttgtgcttgaactggcgcgccatggcgagcttggtccgggcggcgtttctggccttggtgatcttgtccatctcggcgagtttgtccttggcatcgtgcgggatggcgcgagcctcggcggccttgaactcggcctcgcagtccgcctcgatgaggttctcggcggggacggccttgttggcgagcatggtcagctcgttgtcggcgaacttgaggaagccctcttcgatgtagtaccaccggctgccgcccttggcgccgtcggtgtcggggaagtccagccggagctggcccatgccgagcttggcgacgagcgccgacccgccgtgggtcatgccgatcagcccatcccacgcggggacggaggcgtagttgacctcatcatcgatcagggcggcttcgggggtgatgagtttgcatcggatcgtgctggccacgcgttgctcctccggcttgggccaattccgggcctcggaactggcggatcggatggtaggcaggatgcgctgtgtcggccccggcgataggctaccaccatgcgccgaagggtcctgatactgatcgcgctcgggctcctgctcgccggcgctgtggtgcttcggctgatggtcgggacggaccatttcggccccgcctcgacggagacggtcgcccagcttcgccggctccgggtgctggcgggcatcgcggtgggggtgtcgctggcggtgtcgggggtgatgctccagtcgctgctgcgcaatccgctggcctcgccggacctgctcgggctctcggcgggtgccgggctggcggtgatgctctcggcgtacctcggctaccgggcgaccgggtcggtctcgccctcgatggcggacccgctgccggcgctcatcggctcatgcctggcgctcatgttcgtctacagcctgagccagcgccgaggcttcatcgagcccgtcacgctgatccttgtcggtgtcgtcgtcgggctggtctgcggctcggcgggctcgttcatccgccaactcctgcccgatggaggtttcgcggctggccgactgctgctcgggcggatctctgacgatctgacgtggccgatggtgctcggcgtgctcggcgtgtcgatcctgggtgcgggcatcggcgcatggctcgggccggcgatggatgcctcggcgatgagcgacgatgaggcgcggagcgtgggcgtgccgatccgcggtctgcgattgtcgctgttcctgatttccggcgtgctcaccgcgggctcggtggtgctggcggggccgatcgggttcgtggggttggtggtgccgcacgcggcgaggctgctgctcggcccgtcgcaccgcgtgctcgtgctcggctcggcgctgctcggggcggcgacgatcgtgctggcagactcggcggtgcgcgcgatgccgctgggcaccggccgcctcccgatcggcgtgctgacgtccctgatcggcgggccgattttcctggcgatgctgtactcgatggtccgtcggtcgggctgaatccttccgcggcgcggaccgtccggggcattggacccgtcctcgggacgggcggtggaccggaccggagcctcccaggaccggagctgggctttccgagaccggagcggagccacacacgaccggagctgagccacacaagaccggtgcagagcctctcaagaccggtgttgcgtcattcaggaccggtcttgcgtggcagaaaactggaattgagcggctcaaacaaaactggaattgcatcgcagaatcggcgttgagagccggagaagggcgatggaccctgcgaccaccgattgtggcgggggttggatgttggggggcggttctttcggtggggcgggcgtcccgcccgtcgcctctatcttccttcacgtccccattgcagagggtcagcggatgagcccaccccaaaaagccatgccgccctctttcaagggcgggaacggcggtcgctccgcggagcgttgcctgcgaatctttcgtcttgttacgacaagactcacgaggcggggtcgaatacacgctgtgagtatactgtttctgtgagggctgtcaagttgacccaggtagtaaaaagccaagcctccaccgtgagatgggggcttggcaggcttggaagccggtggtgcattcaaccccaccccgcaagcaagccgcaactaggcagtgaccttgcattgcctgtacggctaggctagactgcgtcgcggtcagaaacaagtgcaatgcaggtcaactgcctatgaaacttgatattgaatttcttcgtccgtacactcagaaaaacccctctcctcgtgacaacgagaagggggcatccattctgggccggatggcattggttgcccggcggattctcaatccgttcgaacggactcaaaacgcctgtgcttcgctaagcacagtgttgtattcgaaatgagttctggggttcgaatccccaccggcccattttatgcaaaaggaactaatttgtccaccacggtctcgaaaggaattggggaatgcgaatccttggtctcgatatcggcacgacgtcaattggctgggctctcgtggatgacgagcaggaagagatactgggcacaggtgttcgcatctttccagagggtgtcgatcgcgatcagcagggcggtgagcaggccaagacccagacgcggcgtgagaagcgagggcagcggagacagatcgcgcggcgtgctcggcgcaagcgtcaactccgggaactgctgggtgaacatggcctgctgccgaccgacccggatgaagcggatgaagtgctgatcgagaacccgtacccgctccggctgcgggcactcgatgagaaactgacactttacgaaatcgggcgcgtgttcgtgcatctcaaccaacggcgagggttcaagtccaaccgcaagacagacaagaaggccaacgaagagaagggcatgctcgccgagatcagcgggctggccaagcggatcgaagagaccggcagccggacgcttggtgaatatcttgcaaggatcggcgctggtgagcttttaccggcagagggtgagatcgagacggtccgcaaccgtcacacacgccgggacatgtacgaagtcgagttcgaagcggtgtggacagcgcaggccaggcaccattcagatctgctcacgaacgatttcaaagagaagattcgccggattatcttttttcagcgtgatctgcgccggcccaagagtgtggtcgggcggtgcgatcttgaaccgaggctcaagcggtgtccgaaagccgagcggatcgcccaacgcttccggatcgtgcaagaggtgaacaatctcaagatcatcgaccggaccaccggtgaggaacgccggctttcgtccgaggaacgcgagacgatcatcggtgagttgtccaagcggaagaaggtttcgttcgattcgatgcgcaagaagctcaagtttaccgatgaggttcggttcaactttgagacggatgatggttctgggcgcgaccatctcaagggacatgaaacggactgtgcgctcgctgcgaaatcgaataagaagaatgccggcgcactcggaaacgactactggaaacttgacgagcgtacccgcgatcggatcgtgacgattttgatcgacgaggatgacgagcagcgagcgctcgaattgctccagcagcggtgcgggctcacggccgagcaggccgaacgggtgctcggcgtggacctgccagtgggatatgcgagcttttcgaaatacgtcatccgcaagctgctgccgcacatggagcgtgggctcttggtgatggggaatgatgagacggattcggcgatgcacgcagcgggtttcctgcgtccggacgagcgagcggtgaacgagacgatttttctcgaccaatcgccggacctgcccaatccgattgtgcgccgggcattggtagaagtgcgcaaggtggtcaatgcgatcacacgcgagctgtgcgatgatcgtgtcaaggctggcaagcgtccgtacgacgcgatccacatcgagctcggacgagaggccaaggcaagcttcgagcagcgcgagaagatgcggtccgagaacgccaaacgacgcaagatgcgagagcaggcggctgaggaaatcgagaagaccggtgaggcagttcggcggaagaaaataaacaagtatctcctctggcaggaacaggaccgaacctgtccgtacacgggcaagccgatcagcctggcgcaactgctttcggatgccgtggatgtggaccatattctgccgcggtggcggagtcttgatgattccatgatgaacaaggtcatggtcttccgcgaagcgaatgctgaaaagggcgataggaccccggctgagtggcttgaagaatcggatcccaagcggtacgccgaggttctgatgcgagcgaaaaagctcccatatccgaagtatcgccgattcatccaaaaagacattcaagtcgacgactttgtggcgcgtcaactcaacgacatgcgatacatcagccggctcgtcacgcaatatcttcggccgctcggcgcggacatcgtgatgccccgcggatcgatgacggccgagctccgcagacgctgggaactcaacaatattctgagtgatgatggagagaaaacccgtgccgaccatcggcaccacgccgtcgacgctgtggcgattgcgctgaccaaccgttcaaggctcaaagcactcgccgacggtcgtggaaaggtgaaaccgccgtggaacgggttgcgtcggcaggctgaggattcgatccttgggatcaatgtttcgcaccgtgtccagcgccggttggccggtgccctgcatgaagaaaccttctatggcccgacgcaaaagcatcgtgaagatgatacccaactggtcgcaccgggttcggtcggtggtggaagggatcggcgccacgccaagggctggcaagaggattccggcgcgttcgttcggcgaaagaatgtcgaggaaatcaagaccgctaagcacctggccaaggtgcgtgatgcgggtattcgcacaatccttgccgatcatctgcggcgtcaaggtgtcgatcccatgggcaaaggcaagtatccgaaggatgccttcaagggcgttaatgcaccggtgatgccatcgggcgtgccgattaaaaaagtgcggatgatcgaggagagtaaaacatttcgtcctgtcagcaatcggcgttggtatcacaacatcaaaccaggcaacaaccaccacatcgtctaccgcgagaaggatgggaagagtgggccaacatggaatggcgaggtcatcaccatgatggaggctgcgaagcggggccgatccggacgaccattggtggatatcacaccggaaacagaaaatggtcgctttgtgatgagtctggccctcggcgaactattcgagatcgatggtgaaaatggacaacgcctactctgcactgtccgaaagctggatcagcggagcaaacgtctcgattataaactgcatacggatgccaggcagtccggtgagatcaacaaggacaatctctacctctcacccaaagctatgcaggcccgaaatgcccgcaaggtcaccgtggacccaatcggccgaatacgacgggccggcgactgacccggcctcttctgagtcaagccgcaccagaaatcgtccgatgcgctccttatggcccgccggacgatcgagatcagccgcgagaaggcgcacctggccgtcgagctcgggcagttgctcatcatccgcgacgatgagcgacgccgcgacctgcccatgcgtcagcgcctgccctgtgaggatctcggcttggttatcgtcgaccaccgggaagtttcatactcgcaccacgcactcgtgacactggcttcctgcggcgccgggctcgtggtctgcggcgagcaccacctccccgtcggcctgatgctgcccatgtcctcgcacaccgagcaggtctggcgggtcaacgaccagatcaactgcggcaaggtcctgcgcaaacagctctggacctcgcttgtccgtgccaagatcagagcccaggccgggaatatatcttcatcatcgccggcatttcgaaagctcgaacggctcgcccggtcggtccgctccggcgatccggacaacaccgaagcgcaggccgcccgtgtctattggcaggccctctttccgccccggggctccaagaggttcagacgcttgccgggcgagcgtgaggcacccaacagcctccttgactatggctacgcggtcctccgggccgcggtcgcccgtgctcttgtcggcgcggggctgctgcccgtgatcggcatccaccacagcaaccggtccaacgccttctgcctcgccgacgacctgatcgagccgctccgaccgatgatcgatcgccgagtccgcaggctgttcgctgagggaagaaccgtgctggatcagccgaccaaggccgaactgctgctggtgctgtcggcgacggtgctgaccggagccggcgaaagccaaacgcgaggcccgcttgatgcagccctgacgcgatacaccgcctcgctggcatcgtcgctggccgaggggaaggcctcgctgctgatcccgacagagccaaccgaagagggcgggccatgcccgagctgagtgggtaccgattcatgtgggttcttgcgatgtttgatctgccgacggacacgaagcaggcccgcaggcactatgcccagttccgcaaagccctgctcaaggacggctttgtcatgatgcagttttccgtgtatattcggcactgtgccagccgggagaacgcagcggtccacatcgagcgggtcgagcgtcacgtcccgccggatggagaggtccgtgtcatcacgatcaccgacaaacagttcgagcggatgcggattttctggggaaaccgccgattgccccccgaatccccgcctgcccagctcgaattattctagctgggcaggctctaactccttgtctggcaagcctttgggcgggaactagtgtattcgaccccaccccgcgagcaagccgcaaccacagtggaatcaaacaccttcgcgc

SEQ ID NO: 1802 - DNA, 4182 bp, synthetic construct
  source 1..4182: mol_type = other DNA
  misc_feature 1..4182: note = Synthetic
tggtgaatggcgagtagcgaagagcgaattgggggcgcggagccataaggggagtgtagggcacgaaggacgcgaaggacacgaaggctgggggagttcgcagggattggcggattctggcggggaaacgcgatgattgataagagatgaaggataagggatgagggatggcggggacgagccacggattacgctgatggacgcagacctggggcgggaaagattccgagcggcgaccggcagggagcgcttgaggggcgacgaggcggtcggcagaacggggacggcaaaaaaagtggccgtcctgcgtgagcatgacggccggtcgctccgtagagcgtggcctgcgaatctttcatcttgttgcggaaagactcccaggccggggtcgattacactatgcgtagtttcgccgatgggggcgttcgtgtcaagacctccggcgacgggacgtgcgaggcggtcctatggcgggtcgtgtactcggactggacgtcggtgcaacatccgtcgggtgggcattggtgcaggaggacgacggccggatcatcgcggccggcgtccgcgtgtttcccgagggcgtggaccgcgaccaacagggcggcgagcaatccaagacggctgcgcgccgcacggcgcgcgggatgcggcgccagctcgcgcgtcgcgcccggcgtaagcgtcagcttcaggaaaccctgatcgcatccggtctcttgcctcgtgagacggcggaactcgcgcgggtcttcgcgctgaatccctacgaactccggtgccggtcgctggacgagcggttagaaccgtatgaggttgggcgggtactcgtgcacctcaatcagcggcgggggttcctttccaatcgcaagaccgataaggcccgcgcggcagacaccaagggcatgctcgccgaaatcagcaagctctctgaggcgatcacggcaaacgggtgtcgcacgctgggcgagtatctcgcgcttgcggcgcgcagcttcgaccgtgtgcggtcagcgcctgagcagcggctgcgtcatcggcacacgcgccgggacatgtacgagcatgagttcgacgcaatttgggtcgcccagggccggtaccacccgctgttgctcaccgacccattgcgggagcgcgtccggcgaatcatcttcttccagcgccggatgtactggcccaagagcgtagtgggtcgctgtgagctcgagccgaaggagaagcgctgcccgcgtgccgaccgggcggcgcagcgcttccgcatgctgtgcgaagtgaacaacctccgcgtgctcgacaccgcgtcgcgcctggagcgcccgttgacagcggaggagcggcaggccgttctcgactatctggcgacgagcaaggagcgcaagttccaggacatgcgcaagcacctggggttcacagaccacgtgcgtttcacgcttgaaggaccggagcgcgacaagctcaagggtcacgagacggatgccgcgctgggaagtccgaaggccctggggaagcgctggaagggactatcggaggaggcgaaggacgccattgtctcggtgctggtccatgaggatcacgaagaggaggccctgcgctgcctcacggggcagagtggattgagcgcgctggaagccgagcacgccctcgcggtcaacctgccggacggctacatccgcttctgtcggcgcgcgatcgaccgcctgcttccccacttggagcgcgggttgcacctgatggccgacgacgtgtccaattccgctctccacgccgccggctatctccgtcccgatgagcgcgaggtgcgtcagcgggacttcctgccatccgcgccggacctgcccaacccaattgtccggcaggccatggtcgaggtgcgtaaggtcgtcaacgcgattattcgggagtacggccgcccggatcgcatccacgtcgaattggtgcgcgaagccaagaggagcttcgacgagcggcgcgagattcgtttcgagaacgcaaagcgccggcgggcccgcgaggacgccgcgcggcgcattgaggaatacggcgataaaccaacgggcgggaagatcgagaagtatttgctctgggaagagcagggtcacgaatgtgtttactcggggcagccgattagcctggcccaattgctctccgatgctgtgaacgtcgaccacatcctcccgcgctggcgcagcctcgatgattcgcgcgccaacaaggtcgtcgcgttgcacgaggaaaacgcggcgaagggggaccgcacgccgcgcgaatggctcgaagacggcgacccccagaaatacgacgcggtcctgcaacgggcgaacaagctgcccgggaacaagcgccgcaagttcattcagaaggacatcgtcctggacgacttcgtaaaccggcagttgaccgacacggcctacatcagccggctggtgagtcagtacctgcgctgtctgggcgcgccgattgtgacgccgcgcgggcagatgaccgcggacctgcgccacttctggggcctggacaagatcctggacccggacgggcgcggggagaagaaccgcgccgaccaccgacaccatgcgattgacgcactcgtcatcgcaatgaccaatccacagcgcctccacgcgctggccaacgagcgagggcacaacgtccgtccaccctgggaaggtttctgggaagatgcccgacgtgtcgtgggggcgatcaacgtttcccatcgcgtacagcgccggctgcacggggcgctccacgaagacacgttctacggggcgacccagaaacggaccggggcccgggtaccatcggagaacgtaacacggccatgggcccggagctggatcgaagacacgcagacctacgtccgtcgaaaagatgtcgccgaactcacggacacgaaacagcttgccaaggttcgcgacgccgcacttcgcgagctcttgcgggagcatctccggcagcgcggcgtcgatccggacaaacccggcagaatacccggggacgccttcaggggcgttgacgccccgcgcatggcgtccggcgtgccggttcgtcgcgtgcggatggtggaggagagcgagactttccgccccgtcagcgcgcaccgcgcgtttcaacacgtcaagccggggagaaatcaccacgtcgtgtaccgcgccatcggagagggcgacgcctcgcgttggcaggcggaagtggtcaccatgtgggaagccgcgcgccgggcgcgggctggcgaacgactggtggaccgtgccgacggacccaatgggcggttcgtgatgtcgctgtcgatcaacgaagccttcgaggttgacagcgccgatggtgggcgcttgttgtgcgttgtgcgtaagctcgaccagcgcagtaagcgcgtcaactacaagctgcacaccgatgctcgcaaggcgggcgagatcaacaaggaaaacctgtacctgtcggccgatggcatgcaccagagacatgcggagaaggtggtactcgacgccctgggtcgtatccggcgagcgagggattgaactcacctccggcgtgccggcggtaagtccgatagcggagttcggcgggcgttatcaaacgcaccatcgaaatctggcagcagcctgtccccttacctgacgacggcgaggttcgcgtactcgcgatcaccgacaagcagtttgagcgcatgcacgttttttgggggaaaatgcacaaaccgaccgagtcggccccccgtcaactcgaacttttctgaccaatttcacctccaagtggcctgctcagcggcatttgcgggggcggcagtgtaatcgaccccggcctgcgagcaagccgcaacgccctcgacagggatgtcgcctggcccctcagtgtaatcgaccccggcctgcgagcaaggcgcaacatcgtcggcgaccactaccaactacctagcagtgtaatcgaccacggcctgcgagcaagccgcaacgttcgtgctcgactggatcggccggcgcttagtgtaatcgaccccggcctgcgagcaagccgcaacaaactttacgactacgactttgatccgccaagtgtaatcgacccgggcctgcgagcaagccgcaactccatccgcgagcgcatcgagctgctcttcagtgtaatcgaccccagcctgcgagcaagccgcaacgcgggcaatcgaccactggttcgcaggagcag

SEQ ID NO: 1803 - DNA, 16569 bp, synthetic construct
  source 1..16569: mol_type = other DNA
  misc_feature 1..16569: note = Synthetic
gaaatcctcgaattcatccagcagaccgaacgcaaacacaacattcagatcgtgaacgtgttccatgccggtgacggcaacattcatcccattctgctgtttgacgaacgggacgccgaacagattcagcgagtcatgctggccagcgaagacatcctgaatcgctgcatcgaactgggtggcagcgtgacgggtgaacacgggatcggtgtggaaaaaatcagcttcatgtcaaagctgttcaccgcgaccgatctggaagtcatgaacgatgtccgcacggttttcaatccggaaggactgtgcagtccgggaaaactgctgcccactgccggcggttgcgggacggaatccggcatccgcatcaatccggccagacgaccggccttctgaacgcctacagacggttttccgctcgacgctgcagcacctgacccagtgccctgcggtacacctcgacatacttcccggcagacctgtcccaggaccagtcacaccgcatcccgttctgcaccagacgattccagaccgtcgaatcctgccacgcagtcagtgcctgatccacggctgcagacaaccccgctgcggagtaattcgcaaagacaaaacctgtcgccgttttcaggctgtccgcagtcccgtcgtaatggatgacagaatctgccagcccgcccacctggcgaacgatcggcactgttccataacgctggctgtacatctgattcagtccgcagggttcaaatcgactgggcatcagaaacagatccgcacccgcttcaatctgatgcgccagcgattcgtcaaatccgatcgtcacgctcacctgacccggataacgctgcgctgtttcctgcagcagatgctcataataccggtcaccggttcccagaaagaccagctgcacctgtcgagccagcaggctgccggcaatggcagcaatcagatccagccccttctgatccaccagccgtgacaccatggcgaacagcggggctgccggattgtccgccaaacccagacgctgctgcagatgagccttgcagcgagccttgccgtcctgccagttgtccaccgaaaagcccgcctgcaggacgggatcagtcgccggattccagacatgcgtatcaattccgttcagaattcccgtcagcgccgacttccgccagcgcaacagcccgtccagaccgcagccgccctcctgagtacagatttcactcgcatacgtgggactgaccgtcgtcagctggtcggcaaatgccagccccgtcttcagcagattcagatggccccaggcttccatatgactggggttgtaaaaacccgggtgcatcccggtcagcggcatgtcagacttcccgaaggcaccctgataagccatgttgtgaatggtcatcaccgacgccgtccgctcgaaaccgcccagcttcgcgtaatgagtattcaggagcgccggaatcagcccggtctgccagtcattgcagtgcagaatgtccggacgcaacaccatccgccgacagatctcaggcaccgcccggctgaaaaaacaaaaccgctcgctgttgtcaccataggcaccggcaacatcaccatacggctgcccgcggtcaaagtaaacaggctgcttcaccagcagcactctggcatcagtctgcggatacagcgcccagtgcaccgaccctgtcatcggtcggccattcatatcaatcgtaaactgcagtccggtatcatgcacctccggcacgcccgctttaccctgccgcaagggggtgtaatcggggatgatcagcgtgacttcatgaccggcatgcgacagagccccggtcagcgcgccggccacatcggccaaaccaccggtcttcgaaaacggcaccgcctcggacgaggccagaacaatccgcagtcgggaattttgctgaatcgacatggaaactcggaagaaaacagtgactactgaaccttgatcagctcgaccacgaaatgcagggtggcattcggaggaatggaacctggcgaaccgcgactgccgtaccccagctcagacggtatccacaactcaatcatcccgcccacccccaccagctgcaaaccctcagtccagccgggaaccacggaactcagaccaaacgactccgtctcaccccggtcataagaactgtcaaactgccgaccactgtccagccagccccggtaatgcacctcaaccgtattgctggccgtcggcttgcgaccgtcagactgccgcagaatgcgatacttcagccccgacgctgtctctgaaaactcagacgacacatccttgtccaccggacccactccggaacgcagcgattcgcgatccagaaaagtcaccggtgctgatccctcacgcgacagctcctgactggcaccctcgccaacaccacgaccacccgactcacagcccgcaacaatcgccaacagcacaacacacaacagcagccgcaccatacgaggctccgtcaaattcaaaaagtggccagtggtcagtggtcagtggtcagtagtcagtagccagtagcctgtggtgcgtggtgcgtggtgcgtggtgcgtggtccgtggtccgtggttagcaaccgctggaaaacgtacggcacccctaagcctcttcactccacccccgcgagtctccaagccaaccaccgagcaccgaacactgagcaccgaacactgaaccctgagaactgagaactgagcactgagcactgagcactgataactgataactgataactgataactgagaactgataactgagcactgataactgacaactaataaatctcgttggcagcagcgatcccggcatcggctggcgaatgatatccctgccgcgcgaggcattgttccaacgcacccagaatcctgagaacatttgcctgcttcgccgtctcacccatcaaaccaattcgccaaaccttgcccttcatcggccccagtccacccccaacctcaatgccgaactcattcagcagctgcgaacggactgccacgtcgtccactccctcaggaatcaacaccgagttcagcatgggcagacagtgctgcgggtcaccggaatactgaatccccatcgcctgcaagccggccttcaaggctcgatggtgcagcaggtgacgcgcaaatcgagccggcagaccttcttccagcaccagccgcagtgcctgatgcagagcatagttcatgttgatcggagccgtgtggtggtaggctcggttgctgccccagtagtttcgcagcaatccaatgtccagataccagctggaaacccgacgactgcgacggtccatggcctccagcgcacgtggcccgaacgtcacaggcgccagtcccggaggacaactgagacatttctgggaaccactgtaggccgcatcaatgcccagacggtcaatttccaccggagcacctgcgagggatgtcacgcagtcaacgatcagcagcgctccgctgtcatgcacaatctgagcaatttcgtccagtggctgccatgcaccggtactggtttccgcatgcacaatgccgacagccttcggccgcacgcgctgaacaacatcacggagctcttccggagtaaacacctggccaaacgggcgttcaatccgagtcacctcggcacccaaacgctcggccacttccgccatccgcccgccaaacactccgttgatgcaggccaccatccgatcgcccggttcaatcagattggccacacaggtttccatcccggcactgcccgtgccactgatggccatcgtcatctgatttgtggtctgaaacacctgccgcagcatcgactgcagctcatccatgatcttcaggaagtaggggtcgaggtgtccgacggtcggagcagccatggcggcgaggacgctgggatgaatttcgctgggtccggggcccatcagagttcgctggggcggagcaatctggtcggcgatcatggcggtctgtcttccgtcaggaatgttgggaatgcaagcggtatcggggttttgtcccgtgagtatactattgagcttgtgccgggcacaaatgcagacagccgcaggttccgcacgggaacccacggctgccagatgttgaaatggtcatgcctgccacaaaagtccggcatgcagcctgatcaatgctgaggcagacatcgaggacaacaccgtagcctggcttcagcctgggcaacttcttgtcatccttgaaatccccggtgtttttcgggggggatggggccgagcaggaatgatgccgaggacaaaaaccgtagcttgggctttagcccgggcaagttacgcccccctccatccccaaaacacggcgtttctccaccaaaggaagtccgtctcacactcccattcgacttttgtcccccgcgtcatgcctgcccgccgcagcgccttaaaaaacgaggtcgttgaagtgccgccggcaggatcggggatcaggccgagaagctgctgccgcagccgcaggacttcacggcattcgggttcttgaaagtgaacccgcgacgggacagatccgtgtagaaatcaatctcggtgccgtccagatacagatcactcttcttgtccaccacaacccccacgccgtggtgctcttcgaacacgtcctgagccgcatcgtaggtgtttgtgaagtcgaatgaatactggaagccgctgcagcccccgcccacgacaccaacacgcacgtacttcagttccgggcgattctgctcagagatgactcgcttgatttcaatcgctgctttttccgtcagaatgaccgtcatggggattctccagatcacagaaacagggctggttgaacaatctgccatcaccccgggccagactggccggcaggtgtgcaggaaatctttgcgtgtagtctacgcaggaccacgaacggcgtgcgaggttcccagggaaaaaaacacgatttcagagaatcggtagtgcaaaaaccgggaatcttcgccagtttccgccggaaataacaggacaattctgtccggatttggctgaatcaacgcgcacggaccgcgcataaaaaaagccgacctcgaaagatcggcaagcagattgaactgcgcgcgaagaaagtctcttcacttactgtgataggaggcaatcgtcgctcggatacactgaaatacatcctagcgtcacttgatttcctgtgcaagtcacttgatgatgctttcgggtatctttcagtaaacacctacgggcagggcttttgatgacgctcaacgctacacaaccggattctacacccatccgatatcgactggggttggatatcggcgccaattcggtcggatgggcggcacttcgaatagaagatgaggaaggcggtggtgagcgtcccagcggcttgctgggagccggtgtgcggatcttcgaagcgggcgtcgaaggttcgattgaacagggcaaggatggatcgcgggccgtcgcgcgtcgccttgcgcggcagcagcggcgtcagacgtggcgacgacagtaccgcaaacatcgtctgttccgtttgctgcagcgctgcgggctgctgccagcggccgcagatacttccgccgccggtcgcgatgccgtgttaaagacactggaccgggaactgactgcgcggtggtgccaagtcggtgacctcgactcacaccagaaactgccgtacctgctgcgatctgcagcggctgaacgttcactggaaccctttgagctgggcagggcactctatcatctggggcagcgacgcggttacaaagcaaatcgtcgcactcccgaggcggacgccgagcagcagggtgcggtcagtggaggcatcagtctgctggacgaagcccgccggcgtgatccggatgatccctcatcactgcgttcgctggcccagactgtagtcgacgagtttcgctttgccgatggtcattttgcgatacgctcagaatcccgagagtcgtcacggcgaggacgagtccgtggtcactacacttcgcgacaaatgtacctgcaggagtttgaggcaattcgccggtttcaggtggcaaacggaggaccgcttgacaacgaaacatgggcacttttggaaaaggttctgttcaggcaaagaccgttgaagtcgcaaagcggtcgtgtgggaggctgcactctcgaaaaaacgcccaatgaccgcaaccggcgtggtggccggcgtcgctgcctgatggctttgcctgagtttcaggagtttcggctgctgcaaagcctgaatcatctgatgatcctagaagaggacggatcatcgcacccgctgatgccgggacagcgtcaggttctttacgatcatctgatgcgcgacggcgatctgaagctgcggacccgcgctactcgcggaaaatcggcggcgccgtcagtaatcagcctgctcggcctggcgaaaaacacacagttctccttgcggtcgccagaggaatcagaggaagacgacattcggctgatcgggcacaggacgaatgccaggattcgcgctgtgctgggtgatgaatgggacgatctggcagagcagcagcaggagaagctgattctgcagatcgtacatgcctcggatcctgcaatgctggctgtgtggttgcagaaacacttcgctttttccggctctgtcgcgcagcagttggccggaatccacctcgaagaccagcatgcatcactgtcacgttgtgctatccgaaaactgctgccgaggctcagggcaggtgaaacctatgcggcagctcgacaggcggagtacccggattcattcaaggctacgacgcccgccgatagcctgccaccggtcacgttgtggaaccggcaaatcaacaatcctgctgtcatccgggctttgacggaggtacggcgggtggtgaattccataatcgggcgtttcggcaagcccgactcaattcacgtggagttggccagagacctgaagcggtcgcgtcaggaacgcacaaaactgtggaaacagaatgaggaaaatcgtcgccagcgtgacaaggcgaagctggaaatcgtcaggcagttggggtacgcgaatcccagtcgagcggacgttgaaaagtggctgctggctgaggagtgcaactggcaatgcccctatacagggcggcacatttctgctgccgcactgaagaactttgacgtcgagcatatttatccgcggcagtacctggatgattcgttcgggaacaaaaccctgtgcgaccccgacttcaaccgtgcccggaaacgcaatcggctgccaagtgaagtgcttgacggagcggacctggccgaagtgctgacgcgagtgcgccatttcaagggaccctatgcagaatcgaaactgcgcagatttcaggcagaatcagtaccggaagactttgtcagtcgacagttgaacgacactcgatacaacagccgactggcagcggaattcctgcaggtattgtacggggggcggaacgacggcaacaggcaacagcggatcgtaacgccgacaggtggtctgacgtggctgattcgtcgaggtttcgggctcgatcgaattctgagtgacggagattacaaagaacgagcggatcatcggcaacacgctgtggacgccatttgcgtggcgttgtcaacacagaaggtcattcagcgattgtcaagtctggccggtcaggtgtcgcgttcggatcaacgtttcaatgcttttctgtcagaattttcaaaggagctgccgtggccggaatttcatgccgacgcggcacaaacggtgcagggtatcatcgtgtcgcatcggccgaatcggacgatctccggcgggctgcacgcggaaacttattactcgaaaccattaccggcgccagcagatgcaaagtctgtgggcaaacgggtcaaatcgagcaagtcgcgggcaaccgagtatcgcgttcgcaagaatctggacagtctgacgaagaaggacattgaaggagacgcgattgtcgatccggctgttcgagcggcagtgcagcgaaagtatcaagagctcgtggctgccgcaacttcggctgcaggtacggatccgaagaaactttggagcaatcgcgcggacattgaccgctttccgcgtctgcttccctccagcaaggcagcgaagcagaatgaggcacagggtggcagtatgatcttcagtgttcgcatcaggacaacggtcaacgcgaggaccatcggcggcggtgtcactctccgtcaagtcacaggtggtaaggatgccaactttgcgtccatgatctacgcaattacgtcggccgacggtaagacggtgcggtgggcacatgaagtgatttcccgctttgaggcgcatcaaaggctgattgacgcacggagcggatataaggcggatgatcgccggcgggtggaagtggctgtccagccgccaatcagcgaaaaaattctgattccccggacggaggaggagatccgaaatgctgaatcgccgcctttcaagctgaagccgggcgagagtctgcagcttgttgccacactaaggaaaaacgacctcatcgaactggacggtgagggggggatacggcagatatacagggtgcagaaactctccgcgacagagttgcaactgtcatgccaccaccagcagggagtagaggggacggatcgcaacacgtggaatcgcattacgtcacttgacagcctgcggcaacgagggttgcgtctggtcaacatctcgccatcgggagaggtcgtttattcgcggtaatagctgcctctggcgttaagacacaagcgtcataaccgcgccgaaacaacacttgtccgggcagaaatcagaattgattgtggcagaacttgcacacagcaggcaggcagccacagacttggggcgttcggtgcgaagtctgtgccacgcgatgcttcaggtctatcacctatgcgcaaccgcattctggaattcagccactcggcagtgcgactcagcattcgtcacgggcagttggtgattcaccggcctgagattgccgacatgctgataccgatgtcggatgtggcggtgatcatcgcagcgcagccgcagatgtcctattctcaggcggtgctcagtgagttattggcgcacggggggatattcctgatctgcaatcagcagcgaatgccggtgggtatgctgctgcccctcggcgggcacggcacccaatcggcgtattttcggcagcaggttgagttgtcccagccgcgccagaaacagctctggaaggctgtggtgcaggcgaagattgccatgcaggccatgttgctggtacgcgaaaccgggaccgactttggactgacgcgactgatttccgctgtccgctcgggtgacagttcgaatgtggaagcgacggctgcggtgcgttattggaaggcgttgttcgggcctgagtttcgccgcgaccgggggagtgaaggattgaacgggctgttgaattatggctatgcggtattgcgagcgatgatggcacgtgcgatttgtgctgcggggttgcatccgaccctggggattcaccattgcaaccagtacaacgcgtggtgcctggcagacgatctcatggagccgtatcgtcctgtggttgatcgggcggtgttgcaactgtctcgcgttgtggagcaggaacctgatgtgcgcggccctgggcgtcagcaggtgttgcaggcgttgctgggtcgagtcgacgttgcggatcagtcgtggacaattttcgatggggtgcagcgtttagcgcaatccctgcggtctgtggtttgcggatttggggttgagttaatttttccggagggatttgtggatgcagcggacagagccgcagatttcggggtacaatgtcatgtggctgatggcgatgtttgatttaccggttgacgatgtggcggaccgtcggcggtacgcacgtttccggcgactattgctgcagagtggtttcagtcgcctgcagtattctgtgtatgcgcgatgttgtgagtctgaggcgacggcggtcacgcagcgttctcagatttcgcaaaagctgcctcctgacgggcaggttcgtctattgatgattacggatcgtcagttcggcaagatggaagtgtatcatggaaaaacgcgagtagagaatgagaagagacctcgccagcttgaacttttctagcgttgcagccgccgcaactcacgcatgcacagtgagttacggcgagccgagtgtatccgagcgacgattccctgcgaaccacagctaatataccgtgcctttggatgtgacctttagtgtatccgagcgacgattccctgcgaaccacagcgagtctgttccgccttcggagccatatcagagtgtatccgagcgacgattccctgcgaaccacagcaatcgctttttcttgctcgcaacgtattttagtgtatccgagcgacgattccctgcgaaccacagcacaggctggattcgggagaaatcaccagcgagtgtatccgagcgacgattccctgcgaaccacagcacggtcggcgaatcaggttctgggagtgagagtgtatccgagcgacgattccctgcgaaccacagcttgattggcgtttgggtggcgcggttgtctagtgtatccgagcgacgattccctgcgaaccacagcgatgcgtcgacggtatgtgccaccatagccagtgtatccgagcgacgattccctgcgaaccacagcttcttgtgtgccggcggtggtggctcccgtagtgtatccgagcgacgattccctgcgaaccacagctgaggctgtgcgagtgcctacacagcaggaagtgtatccgagcgacgattccctgcgaaccacagccaaacaatcagcatcaatacaagtggctggagtgtatccgagcgacgattccctgcgaaccacagctgacagtccaggaagcacaggtcattttttagtgtatccgagcgacgattccctgcgaaccacagcgcatgtcaggatcagacgggaccggctgtgagtgtatccgagcgacgattccctgcgaaccacagcagatggcgcaacacgcgccgggtgaaatccagtgtatccgagcgacgattccctgcgaaccacagccgttgcagtgcagacgcggggcattgtttcagtgtatccgagcgacgattccctgcgaaccacagctcttccgctgttgcgagctgagtcggttcaagtgtatccgagcgacgatttcgtgcgaatcacagcgagccgtcccacacacctcacatcagcagcatccaaaccaatgcaaagccgtccgactacgcctgcacgaaaccccgcaccgggacttcgtggatttccgccggttttccctgtcacccgccccacgcatgtgggatgattccggtgggctggcggatcggtgaggaacgaggaacgagggagcaaggagcaagggagtaaggaacaagggaacaagggagcaaggaacgaggtgtcttcaaaagccacgccgaaaacccttatcgctgttctgtcccattcgtgcgcagcacttcaaaacgcttcgctgtctcccaccccggaaccatcgaggccggggcaagagaattgagaatttagaattgaaaactgacccccgacccccgacccccgaccactgaccactgacaactgacaactgacaactgacaactgacaactgacaacaggatggttttatgatttgccgtgcgcggatgcatctcgttctggctttgctggccctgttcgcactgacgggttgttcggctgggccaacgtccggaatgtcgcttgaaacagcacccgatggtgacatcgagattctgaccatcgacaagaacggtgacatcgctcatcagcccgggcgttttctgcaggccgtgcgacgttccgattccaaattcgtcatcgtcgactgctgggcgtcgtggtgcggcccctgcagagcacttgcgcccatccttgaagatatcaaacgcgaacgcggggatgagatcgaagttgtcaaagtggatgtcgatgccaacccggaaatcgcccgcttcctgaacgcctcggccatccccgatgtccgcatctatcgcgagggtgtgcaggtctatgattttgtcggactcatgcccaaaggcgaaatcgattcgattctgaagtccctgaagtaatcggaagcgtggcgatgcgtctgcgtggttggttgttcgctgctccccgcggacgcttgcgcgctgcactgctgcgactgctggccgtactgattggatgcctgccgctgctggcagcagaactggcctgccacctgctgggactgggcgctgcagtcaccgacagcgatcccttcgtgggctttgccggcagtcgaccgctgtttgaactgtctgccgatcagtctgaatatcgcatttcagcggcccgactgaacttcttccaaccggccagcttcccggcgcgcaaagcccccgggaccactcgcatctttgttctgggcgggtccaccgtacagggacacccgttttccactgagacggcatttccgaggctgctgcagctcagtctggagcgactgaatccggctcgacgctgggaagtgattaattgcggcggagtttcgtatgcgtcgtatcgactgctgccggtactgcaggaagtgctgcagtacgaacccgacatctgtattttctgcgaaggtcagaacgagtttctggaggacgtggcgtatggcacgcggcgcggggtggtggagagtgctggtccgctgctgaatctggtactgcggctgcggtgtgtgcgagcgattctgcagtgggtatccggatctgatgcagccgctcaggcagcgcagcgcccgctgctgccggccgaagtcctgacgcggctcgaccaatccgacggactggctcgtttccaccgcgacgatattcaggccgccgccgtagtgcagcacttccagcatacgctgcagcgaatggtgcgattgtgtggtgaacgcagtgtgccgatgctgttggtgcagccgccggtcaatctggcggactgtccgcccttcaagtctcagtttgtggtggctcctgagcagcagcggaacgtgctggagctgctgcggcgagcgcgagctgaagcggcggtggatcgcagtgtggccgtgcggctggcggagcaggccgtacggctcgatgaccgctgtgcactggcgtggtatgagctggggcagttgcaactgacggctggcgattttgaatctgcgaaggtttcgctgcagcgggcagtggatgaggatgtgtgcccgctgcggatgaccactccgctgcagcgcacgctgcagcaggtggcgtcgcagcagcaagtgccgctgttgaacgcggatgcgctgctggccggtgtgtgtcggggcgggattgtcagcgagcaggtgctggtggatcacgtgcatccgtcgtttcgcggtcatgaagacatcgccgtggcattggcagaactgatgcagtcggagggcctgacggggccggctgcggcagattggcagcaggccgcacgggctggatgtcgagcgttggtgcaggaactggacgacacgtatttcctccgcggccgcagaacactggaagctctccgcaaatgggccgccggacgagcactggaaccggacgggatttagttgttagttgttagttgtcaggtgtcacgaggagcggattgggcggggagctgcgcacacactgatggcaatcaaaacacacaaaatcctcccctcgcccccgcagggggagaggggtcgggtgtgaggtggcaatccacccccttgggagggggaggctcccgccgagcccccctgcgtgctcaaccgtgctgcggctcagcaggagcttcgccctcccgttatggcccacaagccgggcaccagttccacgcaggctgcccgcgtcgtccccgttccctcacggtcgcggctcgtggttgaccgcgtggagcgtggtgcgtgaggcgtggtgcggcattgccaggtggcccacgtgaaatcaggggggcttcacccctcacccccggcccctctccccttccaggggcgaggggtgccaggtgcgcctgccacagaaaggagacacaagaaagctgaaagaagaaaacacaaggatccccgcagtgctcagcagtgcaattgtctcacgcgaagccgcgaacaggacacatccggccctgccgaaaaccgaaaaccgaaaaccgaaaactggcaaccggcaaccggcaagtccgctgtgttgcattccccgggtgctgcttgcgagaatatccggagcatggcgggaacaaacagagcgtggttgaggagggggatcagatgacgggcgggcaatggctgattcggcgatcctggttgtatgtgctggggctgtgctgtctgtcggcggggtcattggtggcgcaggacaccgcatggcagcagccgtttggggcggagtggccacggctggattccgatgccacgggtgagtggtggcagccgtcggtcatcccgcgcggaccgaagaagggtcagcagcagcagccgcagttgatggtgcctcgcaacgaagtgctggcgtttgcactgtatactcatgatcacggaatcctgaagctgacggcccagctgtatccgctgctgccggaggagccgcgggaggtgcagctggaatttcagcgggcgggtcagtggcagcctgcggcggtgtcgcgagtggtgtatccgggctggagtgctcattttcgagttaccggctgggacaatactcagaatgtgccttaccgggtgcgactgggtgaacagagtcgatttgagggtctgattcggcgtgatcctgtggagcgggatgagattcgggtagcggtactgtcctgcaactccagccggactccggggccccgtgaaacgatcgtgcagaatctgctgcgacaggatccggacctgctgttctttgcgggtgaccagtcctaccaccatactcagcacacttttggctggctggagtggggtcggcagtttcgggatgtgctgcgggaccgaccggtggtgacgataccggatgaccatgatgtgggccatccgaatctgtggggtgcaggtggtgtgcggtcgcagaagccgacggggacggatggcgggtactattatccggccgagtatgtccggatggtggagcgttgtcagacgtggcatctgccggatccggcggaccctgagccggtggagcagcaactgggcgtctactttactcgcctgcgaattggcgggattgattttgcgattctggaggatcgcaagttcaagacgggaccggagggggcgattccgcagatggggcctcgtccggatcacatcacggatccggcgtatgatcggggtgcggtggatctgccggggctgcagctgctgggggctcgtcaggaacgatttctgcggcgctggacggaggactggacgggtgtttcgctgaagtgtgtgctgtcgcagacggcgttctgcggtgctgtgcatctgcatggtcagccggacaatcgactgctggccgatctggactgcaatggctggccgcagtcgggtcgtcgggaagcgctgcgtctgttgcggcaggcgagagctgtgcatctgtgtggcgaccagcatctggcggtggtggtgcgtcatgggattgagggtcctggggacggtccgtacgcattcacggctccggcgatcgtgaacacgatctacggccgttggtggcatccgctggaggagcgagcgggcgtgaacccggtgccgggcagtccgctgccgtggacgggggattatgaagacggtctggggaatccgctgacgatgctggcttacgcgaatccgggggatgtgcgtgacgagcggcagcggggcgacggttatggtctggcggtgtttcgtcgttctgcggggcaggtgcggtttgagtgctggcctcgtttcagtgatgtgacacagggagattcgcagcagtttccgggctggccggtgacggtacggatggaggacaacgatggtcgggcggtgcaggggcatttgcctgagctgcgattgaagaatgctgccagtgcggtggtgcaggtgattgaggagtcgacgggcgaagttttgtacacgcagcgtctgtcagggccgcggattcggctgccggtgtacgctgcgggccggtatcgggtacgactgggtcgtgacgttcccggtcaggtggagttgccggggttggaaccagggggggtggcggcttcgccggaagtggaattgtgaggactgaccggagactcagccggactcttttatgatcttcggaactttttgaacttcctcagcacactcgcaggttttgtggtatcttccaggcagttgcggggtcctggtcgcttccggcaaatggcaactgatgaaatttggcggaagtgggggaaatcgaagggttgacaaaggaatccgctgctggttattaaacgccgcaaatgccgcttcccagcatttcaaacagtcaccaggtcaacatcatcagaaggcaccagtcatgttactgacattgaacaaaggccgcttgtcagcggaagaaacgtggatgtcc

SEQ ID NO: 1804 - DNA, 23642 bp, synthetic construct
  source 1..23642: mol_type = other DNA
  variation 14960..17245: note = n is a, c, g, or t
  misc_feature 1..23642: note = Synthetic
gcggcatccccaccaccatcaacggccaggtggtcgagcacgtgaatggcgaagaccgcgtcatcaacggcctgtacgccgtgggcgagtgctcctgcgtgagcgtgcacggcgccaaccgcctgggcaccaactccctgctggacctgctggtgttcggcaaggctgccggcaaccacatcatcaagtacaacagcgagaacaagacgcacaaggatctgccggccaacgccagcgacttcacccgtgcccgtctggacaagctgaacaacaacccgaacggcgagtacgcccaggatatcgccaacgatatccgcaacgccatgcagcagcacgctggtgtgttccgcacgcagaccggcatggatgaaggcgtggccaagatcgccgccatccgcgagcgcgtcgccaatgtcggcctgaaggacaactccatggtgttcaacatggcccgccaggaagccctggaagtggccaacctgatcgaagtggcacaggccaccatggtgtccgccgctgcccgccacgagtgccgcggtgcccacaccgtgtacgactacgagcatccggccgaccaccccaccgccccgctgggccgtgacgacgccaactggatgaagcacaccctgtgggacagcgccaccaacagcctgagctacaagccggtgcgcaccaagcccctgacggttgagaccgtgccgccgcgcgtccgtaccttctgacccggcagccgcgccaaagacaaccgattcggagttatctcatgcaaaaacgtaccttcaaaatctaccgctacgatccggacaaggacgccaagccgtacatgcagaccatcgagctggagctcgaaggccatgagcgcatgctgctggacgccctggtcaagctgaaggccgtggatcccagcctgtccttccgtcgttcctgccgtgaaggcgtgtgcggctcggacgccatgaacatcaacggcaagaacggtctggcctgcctgaccaacctgcgcagcctgaaggacccgatcgtcctgaagccgctgccgggcctgccggtgatccgtgacctgattgtggacatgaccatgttcttcaaccagtaccactcgatcaagccgtacctgatcaacgacacgccgccgccccagaaggagcgcctgcagagccccgaagagcgcgaagagctcaacggcctgtacgagtgcatcctgtgcgccagctgctcgaccagctgccccagcttctggtggaacccggacaagttcgtgggtccggccggcttgctgcaggcctaccgcttcctggccgacagccgtgaccaggctaccagcgagcgtctggacaacctggaagatccctaccgcctgttccgctgctactccatcatgaactgtgtggatgtttgccccaagggcttgaaccccaccaaggctattggcaaaatcaaggagttgatggtgcgtcgtaccgtctgatcggatcacaccgatggacgaactcgacgatcgcctcacgccggtcgaatacagcaagctgcagtggcgctgccgccgcggtttgctggaaaacgacctgttcatccagcgctacctggaccagtacggtagtgccatgacagtcagggaagccagggccatgtatgccctgatggacctgtcggacaacgatttgctggatctgctgctgcgccgcaaggaagccgaagcaccgctggacaccccggacgtgctgaagctgctggagcgcatgcgcactccgctaccccagtaaggtgccggtgtgggttttcctcccaccggccttttttccagttaacgcactttctcaggagacacccatgaaactcgccgataacaaagcgacactgtccttcagcgacaacagccccagcgtcgaactgcccatctaccaaggcaacattggtccggacgtcatcgacatccgcaagctgtatggccagaccggcatgttcacctatgaccccggcttcctgtccaccgcctcctgccagtcgtccatcacctatatcgatggcgacaagggcgagctgctgtaccgtggttacccgatcgagcagctggccgagaactgcgatttcctggatacctgctacctgctgctgaagggtgatctgcccgaccagcaacagcgcggtgacttccacaagacggtgctgaaccacaccatggtgaacgagcagatgcagttcttcctgcgtggcttccgccgcgatgcccaccccatggccgtgctgaccggtctggtgggtgccatgtctgccttctatcacgagagcaccgacatccacaacccggtgcaccgcgacatcgctgccacgcagctgatcgccaagatgccgaccctggtggccatggcctacaagtacggcaagggcgagccctacatgtacccgcagaacaacctgagctatgccggcaacttcctgcgcatgatgttcggcaccccctgcgaagagtacaaggtcaacccggtgatcgagaaggcactggaccgtatcttcatcctgcacgccgaccacgagcagaacgcctccacctccaccgtgcgcctgtgcggctcctccggcaccaacccgtttgccgccatcgccgccggcgtggcctgcctgtggggccctgcccacggtggtgccaacgaagcctgcctgaacatgctggaagacatccagaagatgggtggcgtggccaaggtgggcgagttcatggagcaggtcaaggacaagaactccggcgtgcgcctgatgggctttggccaccgcgtgtacaagaactacgacccgcgcgccaagctgatgcaggaaacctgcgacgaggtgctggccgagctgggtctggaaaacgatccgctgttcgcgctggccaaggcgctggaaaagatcgccctggaagacgactacttcgtgcaacgcaagctgtacccgaacgtggacttctactccggcatcgtgcagcgcgccatcggcatcccggtcaacctgttcaccggcatctttgccctggcccgtaccgtgggctggattgcccagctgaacgagatgatcgccgaccccgagtacaagattggccgtccgcgccagctgtacaccggttctccgcgtcgcgacgtgccggccgacttccagcgcatcgcccgctgatagcccctgccctgccggacggccctgactgtccggctccgcagccacgcccgccctgctcttgtgcacggcgggcgtttttgcgcccggatcgtgaaacagcaggtgaggcatcgcagcaggagatggcagaaagcatcaattgatgggagaatggcttatcccttcttcaaccaagatgcttcaccccctgcatggccgctgaccgttcccttgcccgtcatgttgacctgatgtcgctgcagctgttcgtcagcgtgtgcgaactcggcagcatcggccgtgccgccgaacgggagtttattgccgcctcggcggtgagcaagcgcatgagcgatctggaggcggtgttccagacccccctgctggagcgtcatgcccgcggcgtgacactgacagccgccggcgaaagtctgctgcaccacgcgcgcaccatcatctacggcctggacaagatgcaggccgagctgggcgaatatgccaagggggtacgcggccatgtgcgcgtacatgccagcatttcggccatcgtgcagtttctgccggaagacctgggcagctttgcccaggcccacgagcacatcaagatcgatctggaagagcacctcagcagcgaagtggtgcgtgccgtgcaggaaggtgcggccgacctgggcatctgctatctggcgctggagcagcagggcctgcaaacgcgcgcctatcggcaggaccagctggtgctgatcaccccgcgccggcatccgctggccgggcgccgcgccatcgattttgccgactccctggcctatgaccaggtaggcttgcacagcaacagctccatcaaccggctgatgcgccaggcggcgctgcgggccggccaaagcatccggctgcgcatccgcgtgaccgggctggatgccatgtgccgcatgatcgataacgggctgggcgtgggcgtgatgccgcgccgggcctttgaatggctgcacggggccggcactctggcctgcattccgttgcaggatgactgggctacccgccagttgcagctggtggcacgcgatttctccaccctgccacagccggcccggctgctggtggaccacctgacggccggcccatcccgggccgcagccgcgtaaaatcaatggcatatccaacaaggaagaccatggcacagaccctctacgacaagctctgggacgagcacagcgtccacaccgaagacgacggcaccacggtgctgtacatcgaccgccatctggtgcacgaagtcaccagcccgcaagccttcgaaggcctgcgcgtggccggtcgcaagctgtggcgcatcaactcggtggtggccacggccgaccacaacacccccaccaccggctgggagctcggctatgacggcattaccgatccgaccagcaaggagcaggtcaccacgctggataccaacatccaggaatttggtgccggtgcctatttcccgttcctgagccagcgccagggtatcgtgcacgtgatgggcccggaaaacggtgccaccctgcccggcatgaccgtggtgtgcggcgacagccacaccagcacgcacggcgcctttggcgcgctggcacacggcatcggcaccagcgaggtcgagcatgtgatggccacgcagacgctgctggccaagaaggcgaagaacatgctggtgcaggtggacggcgcgctgcagcccggcgtctcggccaaggacgtggcgctggccatcattggagccatcggcaccgctggcggtaccggctacaccatcgagtttggcggcagcaccatccgcagcctgagcatggaaggccgcatgacgctgtgcaacatggcgatcgaagccggtgcgcgcgccggcatggtcgccgtggacgagaaaaccatcgagtacgtcaagggccgcccgtttgccccgggcaccgatcccgcaaccggcgcctttgtgggcggcgaggaatgggaagccgccgtggcctactggaacacgctgaagtccgacagcggcgcacagtttgaccgcgtggtcgaactggatggcagcgccatcgagccgcaggtgacctggggcaccagcccggaaatggtggtgggcgtgtcgggtcgcgtaccgaacccggcgcaggaaaccgatgccagcaagcgttcggccatggaacgcgcgctggtctacatggacctgcaggccgacaccccgatccagcagattgccatcgacaaggtgttcatcggcagctgcaccaacagccgcatcgaggacatgcgcgccgccgctgccatggtgcagcagctgggcaagaaggtggcgcccaacgtcaagctggccatggtggtaccgggctccggtctggtcaaggcccaggccgaacaggaaggcctgcaccagattttcatcgatgccggctttgagtggcgcgagccgggctgcagcatgtgcctggccatgaacgccgaccgcctggagccgggagagcgctgcgcctccacctccaaccgcaactttgaaggccgtcagggtgctggcggccgcacgcacctcgtcagcccggccatggccgcggcggccgcggtacacggacatttcgtggatgtccgtgcctttgcatgatgggccggcaacggccgattcacgtcactacgaccaggagaatcccatgaaaaaaatcgcttccatctgcgctgtactggctgccatgctgacgctgagcgcctgcaacaccatccagggtgtgggccaggacgtgcgcgctaccggcaacgccatcgaacgcgctgcccagtaagacctccttccctccggctgcggccggagggcctgatttttcaccccacgacatcatgcaaaagttcaccgttcaccagggtctggtggctcctctcgaccgcgaaaacgtcgataccgatgccatcatccccaagcaattcctgaaatcgatccgccgtaccggctttggccccaacctgtttgacgaatggcgctacctggacaagggcgagcccggcatgccggaaggcgaacgccagcccaaccccgatttcgtgctcaaccagccgcgctaccagggcgccagcgtgctgctgacacgcaacaactttggctgcggttccagccgcgagcacgcgccctgggcactggagcaatacggcttccgcgccatcctggcacccagctttgccgacatcttcttcaacaactgcttcaagaacggcctgctgccgatcgtgctgcccgaggccaccatcgaaaccctgttccaggaagtggcagcccagcccggctaccagctgaccgtggatctggagcgccaggtcatcgtcaagcccgatggcagcgagctcccgttcgaggtgcagccgttccgcaaggaatgcctgctcaacggctgggacgacatcggcctgacgctgcgccacgtggacaagatccaggcctatgaagccgagcgcctggcggccaaaccctggctggccggcgcacgcgccctctgagccccctcccctttgcggccctgcccgtgcggcagagcttcctgttgtgatcctttacgagaatatccatgaaaatcgcagttcttcccggtgatggcatcggccatgaaattgttgcagaagccgtcaaggtgctgcaggcgctccagttgccgctggagctggaatatgccgatgtcggcggtaccgcctacgacaagcacggccatccgctgcccgaacacacgctgaagctggcgctggaatcggatgccgtgctgtttggtgccgtgggcgactggaagtacgacaagctggagcgccatctgcgtcccgaacaggccattctgggcctgcgcaaggccatgggcctgtacgccaacttccgcccggccatctgctacaaggagctggtcaatgcgtccagcctgaagcccgaactggtagccggcctggacatcctgctgatccgcgagctgaccggcgatatctattttggccagccgcgcggtcgtcgtaccgccagtgatggccatttccccggtgccgaggaagcctttgacaccatgcgctacagccgcccggagatcgagcgcattgcccataccgccttccaggcggcacaaaagcgcagcaagcgcgtgaccagcgtggacaagaacaacgtgctggaaacctcgcagctgtggaaagacgtggtcgaggacgtggccaggcagtaccccgacgtggcgctggaccacatgctggtggacaacgcggccatgcagctggtcaaggccccaaagaagttcgacgtggtggtgaccggcaacatgtttggcgacatcctgagcgatgaagccgccatgttgacgggctccatcggcatgctgccgtcggccagcctgaacgacaagaaccagggcctgtacgagcccagccacggcagcgcgcccgacattgccggccagggcattgccaacccgctggcgaccatcctgagtgccgccatgatgctgcgcttctcgctgaaccagcccgaagccgctgcccgtatcgaggctgccgtgcagaaggtgctggaacagggcctgcgcaccggcgacatctggagcgaaggcacgaccaaggtgaacacgcagcagatgggtgatgccgtggtggcagcgctgtaagcgttactgccggctcatgccaagcgcgccctggtggcgcgctttttttgtttcagcaatccacctgccgtaccgagaaggtaacggccaacccgcccagcgaggtttccttgtagcggctttgcatgtcgcggccggtttcgcgcatggtggcaatggcctggtccagactgaccatgtgcacccccgttcccagcagcgccatcgaacaggcattgatggccttgactgcccccatggcattgcgctcgatgcagggcacctgcaccagaccggcaatcggatcgcaggtcatgcccagatggtgttccagcgcgatttcggcagcattctcgatgcgcgcattgctggcacccagcgcggctgccaggcctgcagccgccatggcagcggccgaacccacctccccctggcaaccgacttcggcaccggaaatggacgcgttgcgcttgcacagaccgcccacggccgccgctaccaggaaaaagcgctgcaccgcctcggccgcctggccatggcgctcggtgaaatagcgcagtacggccggcagtacgccagctgcgccattggtgggtgccgtgaccacgcggccaccggcggcgttttcctcgttcatggcaatggcccaggcgctgacccagctcatgctggcctcaccggccgccagcggtgcggccatcagctgctcggccatgccgcgggcgcggcgcgggacctgcagcacgccgggcaacacgccttgggcgcgcatgccgcgtgccacgccgtccagcatcagctgctggatgcgctggatgaaatcgatggtgctgtcgtggccatgcagcgccacttcgttggccatcagcagatcgctgatcgggcgctgggcacgttccgccagctccagcagttcctgcatggtggcaaagggatacggcacctcgacttcggcgccccgggccgaaccgacgaagtgctcttcggcatcgaccacgaaaccgccgccgatcgaatacagctcgcgctcggccagcagctggcgctgctcattccacaaccggaagcgcatgccgttggtgtgcagcgggagctcatcgacaaagttgaagagcagatcctgcgccggatcgaacggcaccgtgtactggcccatgagcgcgatgcgctgctgcgtctggatggcctgcacacgcccggggatgctgtcggtatcgacatcatccggaatttcgccacacaggcccatcagcacggcacgatcggtgccgtggcccacgccggtgtgcgccagcgagccaaacagctcgacctggacccgtgccgcctgctgcagcgtgccttcaggcaactccagcagaaaacggcgcgccgcgcgcatcgggccgacggtgtgcgagctgctgggcccgataccgatcttgaacatgtcctgcaggctgatgtacatggtgctgtcctcaggcttgacgagaacgcgtgcccaccacggctgcgcccacgatcaacagtgtagccagccccagcgtgggcgtgaatggctggccactggtccacaacagcagcatggtggacaacagcggcgtcaaaaaggccaacaggcccacggtgcgagcatcagtacgcttgagggcggcatcccagacaaagaaggcacctccgagcgggcccagccccagcaaggccatcagcagccagtcccgcaggctgagctgcacggctggctcgaacagcacatgacacagcagcgacaagccgcccgccagcaggcagaaaccgccaatggcggcggtgcgaaacggcggtacacgctgtgtgagcagggaataactggaccaggtcagggctgctgccagcgccaggccatagcccagccagcgctgcgggaaggcatcgcccgcctggctgctgccagaagccgcaccgccatccagcaaggccagcacagccccggcaaagccgatcagcgccgccgccacatgcacccaacgccagtgcaagccacgcaggtacagcggcgccagcaccacaatgcccagcggccacaggtagttgaccagattggtctgtaggggcggcgcgaagcggaaggcggcaaacagcagcacgtggtagccaaacaggccgatcacccccacggccagggtcgataccggcactttccagtgcgcccagttgccgcgtgacagcggcagcgccaccagactgccgaccagcaggccaatgccggtgagcagaaacggcggcacgtgacgcaggctgacgccgagggcggccagactgctccacagggcgatggcggcgagggcgaagaggatgccgttgcggggggaggtggtggggagggggtgaggcatggcgcggggggatcggagggtgcgttattgtggcatttctgttggaagtgccacatgcggcttcgcacgttcgagctgcatcctggagccgaagatgctcgcacacacaaaactccggatcgccgaaagctagttaccccaagtgttgtccaagatgccctttcctaccacagaaaggcgaacgccctgcatgcagggcgttccatttggtgcatctttcagcttgttagcgtccagagcgcatttcccaatagtcttggtgataactattatacggaattgggaacacatacgcagagttccattaagatgttacaaacaacttctggagtctcttgcatgccggcacctttggctaccccataccgcctcgctttggatcttggttctacctctctcggatgggctatcttacgactggcgcccacgggagacacagattacaagcttaagccaacagccatcatccgagctggcgtcaggattttcagtgacggacggaatccaaaggacggctcttcactggccgtgacgcgccgcgcagcgcgtgcgatgcgccgacgacgtgaccgcctgctgcgtcgcaaagtacgcatgacagaaaagttggttgagcatggattttttccggctgatcaggaagagcgtaaaaagctggaggtactgaatccttacgaattgcgtgcaaaagggctggatcatgccctgacgcccggggaatttgctcgcgccctcttccacatcaatcaacgacgtggcttcaagagcaatcgcaaaacagataagaaagaaaacgatagcagcgcgcttaaagctgccatcaacggtttgcgacaagccatgattgatcaagactgtcgcacagttggagagctgctctaccgccgtcttaccgatacggccctccctgccgaacggcgcactgttcgtgcccgctatcgtgaaaaacgccttgaagtcgatggcaaaaaccgcattgagaaaagctacgacttgtacgtcgatcgccagatgattgcagacgaatttgacgcgctctggaacaagcaatctgcattgaatccagctctcttcaacgaggccactcgctttgacctgcgtgataccctactcttccagaggccgcttcgtcccgtacgccctggtcgttgcacgctgataccggatgaggagcgcgcacccctggcacttcccagtacacagcggtttcgcatttaccaggaggtcaaccatttgcgcctactgagcgaatctgatttacagcaacgcgttttgacacgtatgcagcgggatcaaattgtcgaagccttggagaaaaacacaaaacgcagcttcgatcaactgagaaagcttcttggcttagatggcaccgtccgcttcaacttggaagatgaaaagcgcaaggagctcaaggggaactctacaagctccactctagctaaaaaagagtatttcggatcagcatggtatgagttcgattccaatttgcaggatgaaattgtcatgcagctcctcatggaggaaagtgaagccaggcttgtaaactggctccgagaaacaaccggactcagcgaagaacgcgcactggcgacagccaacacgggcttacctgaaggctatggcagtctgagccgaaaagccctggagcgcatagttcctgcactgatagactgcgatctggtggaagatactgccatacctcgcacctatgacaaagcggtattggctgccggctttgatcaccacagcaagcttggtttcagttttgacttcgatgatgatgaggtcgagcagctcgttgatgttgaaacaggtgagattacacccattttcaagcaacttccctattacggaaaagcgttacaacgccacgtggccttcgaaaaagaaaatccacgtaacgatgaagagcgatatggaaaaattgccaaccctacggtacatatcggcttgaatcaagtacgtatagtcatcaattccttgatccgacgctacggtcgacctacagaaattgtggtagagctggctcgcgaccttaagcagagtcgcgagcaaaaactggaaacacacaagcgtcaagctgaaaatcagcgacgcaacgagcgtatccgcaaagcaatcgccacagttttggactgcaacgaagagcgcgttaagcgcgcagacatccaaaaatggatcttatgggaagagttgagctacgacgttgctgaccgtcgttgtccatacagtggtatccagatcagtgccaacatgctgctgagcgatgaagttgagatcgagcacatcctgccattctcgatgacacttgacgatacgctcaacaataaaactgtatgcatgcgacgcgtcaaccgcgtcaaaggcaacaagactccatggcaggcacgtgacgattttgcacatcagggttggttctatactgatatcgaacatcgtgctagtcgcatgcccaaagccaagcgataccgctttggcgctgacggttacgaacagtggctgcgtgatgacaaaggattcctcgcaagagcactcaacgatacgcgatatttgtctcgaattaccaaagagtatttgtcattgatatgccctggtagcggtgtgcgtgtcataccaggccagatgacagccatgctacgccagaagtttggtctcaatgatgtgctaggcctgcgtggcgagaagaatcgtaatgaccaccggcaccacgcggtggacgcctgcgtcatcggcgttacagatcaggggttactacaacgttttgccaatgctaacgcaacaacacgcagtcaaggcatcacgcggttagtagaggatatgcctaaaccgtggtcaacctattatgatcacgtcgaacgagctgtaagaaacatctgggtcagccacaaacctgatcatggccatgaaggtgcgatgcacaatgatactgcatacggcctccttggcgagggccgtgtatttacgcataaacgcattgatggcatcaaacaacgtattgaagaaaatctcaaagtgctaccctttgctaacgcaaaaataattcatgcaacaaacaagccttggttcaactccccacatcacaaccctgatgccccctacaaaggatacaaaggagatagcaattactgcgtcgaaataaccgaaaacgaaaaaggaaaatgggaaggaaaaatcatatcaacctatgaagcctatcaactagcaaaaaatacaaaaggaaataaatcaaatctattgagcaacctcaataactcatacggcttaaatggaaataagcttatagccagattaatgagaggcgatatggttagaattttacacgaaggagaaaccagaacattacgcattgctttcataaaatcctctgggcaaatgggatttgccgatcacaatgagagcaacgtggacaaacgaaccaggcagaaagaaatgtcctacattttaaaaaccccaggaacattccaaacatcatatgggagaaaaatttttattaaccctgatggagtactgaccgaccccggttcttctttttgaaacttcaacatgattggccgcattttagaaattgcagacgaccgtcgccacttgtttgtcaatcgtggcttcatggtcgttcgcgacagcgaaggcgatcgcaaggagttgggacagattcccctggacgatattgcggccgtcatagccaatgcgcacggcatcacatacaccaacaacctgttggtcgcattggcagaacgtggaacgccattcgtactctgcgcagcaaaccacaatgctgttggtgtcctcataacattggatggccaccacgtgcaatcaaaacgcatagaagcacaaattgcagctagccagcctacgcacaagcgcatgtgggctgcagttgtgaaatccaagctggaacaacaagcctccgcattggaagccactggtgccccttcagcccccttgaccgccttaatcaagaaggtcaagagtggcgatccggccaatgtagagggacaaggagccaagcgttattgggggttgctctttggcgaagggtttcgccgggatcaaagcggcgacggcatcaatgccctactcaactatggctacaccatcgctcgctcagctacggcacgtgcaatagtggctgcaggccttcatccgagcataggtctacaccacagcaatgatgcaaacgcaatgcgtctcgttgatgatttgatggagcccttccgccccgtcattgaccttaaggtctggcagttacaccagcaaggcgagagccacgtcacaccagaaaccaaacgcgctttggtacgtacgctctatgacgatatgcaatctgcggcaggagcgacaccagtcatggtctgcatgcaaaagctagccacatccctggcgcaggtctatctgggcgagagggagaagctggaattacccttacccggcctgccactaacgttggcaggaagcctagagagcgactgagccatgttgacggggtacagactcatgtggatgcttgtgatgtttgatctcccggtgatcgaaaaagctgagcgcaaagccgcatcggactttcgcaagtccttgttggacatgggttttgagatgagtcagctaagcgtctacatgcggttttgcacaagtcctgctcaggttgagacctatgccaaacgcgtcgagtcctgtcttccacagggtggtaagatcaacatcttgcagttcaccgacaaacagtacgaacgcatcttgacctaccatggcaaggccaagcagcccgccaaaaaaacacctgatcagttcgatcttttctgagcttacaagatgcttttcaccccatgcagatgcgaaaaaccccttgaannnnnnnnnnnnnnnnnnnnnnnnnnnnnnnnnnnnnnnnnnnnnnnnnnnnnnnnnnnnnnnnnnnnnnnnnnnnnnnnnnnnnnnnnnnnnnnnnnnnnnnnnnnnnnnnnnnnnnnnnnnnnnnnnnnnnnnnnnnnnnnnnnnnnnnnnnnnnnnnnnnnnnnnnnnnnnnnnnnnnnnnnnnnnnnnnnnnnnnnnnnnnnnnnnnnnnnnnnnnnnnnnnnnnnnnnnnnnnnnnnnnnnnnnnnnnnnnnnnnnnnnnnnnnnnnnnnnnnnnnnnnnnnnnnnnnnnnnnnnnnnnnnnnnnnnnnnnnnnnnnnnnnnnnnnnnnnnnnnnnnnnnnnnnnnnnnnnnnnnnnnnnnnnnnnnnnnnnnnnnnnnnnnnnnnnnnnnnnnnnnnnnnnnnnnnnnnnnnnnnnnnnnnnnnnnnnnnnnnnnnnnnnnnnnnnnnnnnnnnnnnnnnnnnnnnnnnnnnnnnnnnnnnnnnnnnnnnnnnnnnnnnnnnnnnnnnnnnnnnnnnnnnnnnnnnnnnnnnnnnnnnnnnnnnnnnnnnnnnnnnnnnnnnnnnnnnnnnnnnnnnnnnnnnnnnnnnnnnnnnnnnnnnnnnnnnnnnnnnnnnnnnnnnnnnnnnnnnnnnnnnnnnnnnnnnnnnnnnnnnnnnnnnnnnnnnnnnnnnnnnnnnnnnnnnnnnnnnnnnnnnnnnnnnnnnnnnnnnnnnnnnnnnnnnnnnnnnnnnnnnnnnnnnnnnnnnnnnnnnnnnnnnnnnnnnnnnnnnnnnnnnnnnnnnnnnnnnnnnnnnnnnnnnnnnnnnnnnnnnnnnnnnnnnnnnnnnnnnnnnnnnnnnnnnnnnnnnnnnnnnnnnnnnnnnnnnnnnnnnnnnnnnnnnnnnnnnnnnnnnnnnnnnnnnnnnnnnnnnnnnnnnnnnnnnnnnnnnnnnnnnnnnnnnnnnnnnnnnnnnnnnnnnnnnnnnnnnnnnnnnnnnnnnnnnnnnnnnnnnnnnnnnnnnnnnnnnnnnnnnnnnnnnnnnnnnnnnnnnnnnnnnnnnnnnnnnnnnnnnnnnnnnnnnnnnnnnnnnnnnnnnnnnnnnnnnnnnnnnnnnnnnnnnnnnnnnnnnnnnnnnnnnnnnnnnnnnnnnnnnnnnnnnnnnnnnnnnnnnnnnnnnnnnnnnnnnnnnnnnnnnnnnnnnnnnnnnnnnnnnnnnnnnnnnnnnnnnnnnnnnnnnnnnnnnnnnnnnnnnnnnnnnnnnnnnnnnnnnnnnnnnnnnnnnnnnnnnnnnnnnnnnnnnnnnnnnnnnnnnnnnnnnnnnnnnnnnnnnnnnnnnnnnnnnnnnnnnnnnnnnnnnnnnnnnnnnnnnnnnnnnnnnnnnnnnnnnnnnnnnnnnnnnnnnnnnnnnnnnnnnnnnnnnnnnnnnnnnnnnnnnnnnnnnnnnnnnnnnnnnnnnnnnnnnnnnnnnnnnnnnnnnnnnnnnnnnnnnnnnnnnnnnnnnnnnnnnnnnnnnnnnnnnnnnnnnnnnnnnnnnnnnnnnnnnnnnnnnnnnnnnnnnnnnnnnnnnnnnnnnnnnnnnnnnnnnnnnnnnnnnnnnnnnnnnnnnnnnnnnnnnnnnnnnnnnnnnnnnnnnnnnnnnnnnnnnnnnnnnnnnnnnnnnnnnnnnnnnnnnnnnnnnnnnnnnnnnnnnnnnnnnnnnnnnnnnnnnnnnnnnnnnnnnnnnnnnnnnnnnnnnnnnnnnnnnnnnnnnnnnnnnnnnnnnnnnnnnnnnnnnnnnnnnnnnnnnnnnnnnnnnnnnnnnnnnnnnnnnnnnnnnnnnnnnnnnnnnnnnnnnnnnnnnnnnnnnnnnnnnnnnnnnnnnnnnnnnnnnnnnnnnnnnnnnnnnnnnnnnnnnnnnnnnnnnnnnnnnnnnnnnnnnnnnnnnnnnnnnnnnnnnnnnnnnnnnnnnnnnnnnnnnnnnnnnnnnnnnnnnnnnnnnnnnnnnnnnnnnnnnnnnnnnnnnnnnnnnnnnnnnnnnnnnnnnnnnnnnnnnnnnnnnnnnnnnnnnnnnnnnnnnnnnnnnnnnnnnnnnnnnnnnnnnnnnnnnnnnnnnnnnnnnnnnnnnnnnnnnnnnnnnnnnnnnnnnnnnnnnnnnnnnnnnnnnnnnnnnnnnnnnnnnnnnnnnnnnnnnnnnnnnnnnnnnnnnnnnnnnnnnnnnnnnnnnnnnnnnnnnnnnnnnnnnnnnnnnnnnnnnnnnnnnnnnnnnnnnnnnnnnnnnnnnnnnnnnnnnnnnnnnnnnnnnnnnnnnnnnnnnnnnnngcgctattctagcctattgggaaatgcgctttgaccggaacttcggggttcccccgtggataacccggactattctagtctattgcaaaatgcgaccaggttaggctaccattgggataacccatcctgcacaactataaataaatcaaatatctcattatcaatgtctttcgtctcattacgcaatcacctctaccaactcgccatcgagcctttatccaatcctcccccacatccgctaccatccccacatgcccccatcccccaccaccccactcactggcacctgcctctgcaaatccgtccagtacgccatcaccggcccgctacagcaagccctgcactgccactgcagcatgtgccgcaaggcccagggatcggcctttcgtacccgcgccaccgtacgctcagctgatttccgctttgtccagggcgaggatctggtgcgttactacgcctcttccccaggcaacctgcgcggattctgttcggtatgtggctcacccatccataccaagttcaccgatcgccctgatgtcatgggcctgccgctgggtggcctggatgccgatcccggcatccgtccggaaatgcatgtctgcgttgcgcacaaggcaccctggcacaccatcacggatgatttgccacaatggcctgaatttccagacacctgattttccatggactccctctcccaactcctcctaggcagcgccctctccgccaccgcagcccccgcccgccaccgccgcgccgccctgctggccggtgccgccctgggcacgctgccggatctggacggcctcgtcatctccgcgctgacgcaagacccggtactgctgatgacctggcaccgcggcccttcgcattcgctgtttctgctgcccctgctggcctgggccctgtggtggggcttcaagcgcctgaagggccgggttgccgaggcgccacgggcctggttctgggccatcttcctgcccctgttcacccatcccctgctcgatgccttcaccgcctatggcacgcagctgctgtggcccctgccggtgcacccggccatgtggtccagcgtgttcatcatcgatccgctctacacggtatggctgctgctggcctgcgtagcggcctggagcctggcagcacggccactggcgcggcagctgctgatggtcggcctgctggtatcgagcagctacctgacctggtcactggccgccaaggccatggtggatcgcgctgcgcaggccacgctggcccccatgggcctggccgatgcgccccgcttttcggtggcccaaccctttaccaccctgctctaccgcgtggtggtaatgacacccgatggctacctgacaggcgaccgcgccgtgctggtcgacaagggcccgatgcagttccagacccacagttctgatgtagctacgctacagcaactgcaggacataccggccgtgcatcggctgacatggttcaatcgcggctacatgcgtgcccgcgtgcagcatgaccagctgatcctgagcgatttgcgcatgggcatggagccggactacagcttcaactttgccgtggcacgccaggaacaaggccagtggcaagcgctgaacatgccagagcgcctgcgcccggaggcgacaggcgccctgtcacgcgatggcatcacccgcatctggcaccaggtctggcaacgtgccctgcagggcagcacgccctgagcaggtggcctgccagcaccagccgcgaatcagcgcttcttctcggcggacagcaccttgccggtcatggcatcgaccttgacttcgtgcttctgctgttgcgatgtcagcaccttgacttcgtagtagcgctggtcacgcttgtgctccagctccacttccacggccttgccgcccggatacagctgctcggcagtggtggcggcctgcgccggtgtcacgagcaggtccttgaccttgtcggcatcacgcgcatcggcggttttttcgccaaccgacagcaccttgccgcttgcggcatcgacaagcactttgtgcctgctttgtccggacagcagcttcacctcgtacacgatccggccatcttcgcgatccagctccacctcaaccgccttgctgttgggcagatgctgttcggcagcaagcagggcctggctggccgacagcgtcacctgcggggtcggactggcagtgcggccctgggcataggcaaagccgccggcaagcgaagacagccccagcagggtggccagaacggtggcagaaaagaatttacgggacatgatgaactcctgagtggcttgttggggcggtcgtcttgaccgccgacaagttcatcatgcccagccaggcttatggctggcttaaaggccgccacacccggtgacagggtgcaacaagcgcgctctgcccttacagcaggcggaaagccgccatggccaccagcgtgggcggaatcgccgcgaccagcagccagaagaagtgaatggcaccattcgggaagtgctgcttcaggatcgccgcacccgccgggttgggtgcgttggcaatcagcgtcagaccaccacccgtcacggcaccggccaccagcgccagcttgaactcctcgctcaggccttccaccagcgagcccagataggtcagcgcggcgttatcggtaatcgccgtcaggccagtggccacgtagtacaccgaatcggcactcatgctcatcagcagcggctgcagccaccactgttgcaaaccgcccagcaccaccaggcccgccaggaagaaggccaccagcagcgcctcgcgcaggatcagcgggctctggtgacgcgcataggccgtggtaaagcccaggaagaacagcagcagccccatgaacaccaccggatggtgggccgtgaccaccacggcagccaggaacagcacatgcaccagcatcaccaccatgggaacgcgtaccgtcttggcctcggggtccagcttcaggcgcaccagttcacggcgcagcagcagcgtgatggccagcgcgttgacaaacaccgcaatggcggcacgccagccgaaatgcgtcagcatgtaggcgatgtcccagttccacttggcggccaccatcagcaccggcggcgcggcaaaaggcgtcagcacgccgccaatcgagatattgacgaacagcacgcccagcgtggcgtacttgagcatgctgcttaccggctggcggaagatggtgtcacgcagcatcagcgcagccagcgtcatggcagccggctcggtgatgaaggagccgagcagcggcacaaaggacaacagcacaaagtacatggccatggtgcgcggcagcggcatcagccgggccagcgcatgcacgccagccgtggccatgtccaggatcgggcgcgtggctgccaccaccatgatcacgaacacgaacatgggctcggtgaaattgcgcgattccacgtactccagggcctggtccggcccggtcagcgccagcatcacgagcaccatcaccatggcccagaagccgaaaacgacttcgacttcgcccagcagatgccagacgccgccatgacgcggattgcgctgcgccagatcatgaaagaacttggtggagaaggtgtgcagcagcgccagcgcaaaaatgcaggcagcaatgatctgcaccgtggtgggagaaagattttccataggtcgtgattccactgcgaggcggcccgaccttcgctgaacatacctgccagtcacccctctgtgactggcacccaacctgccattctagcccaggtgtctgcagacccggtttcaggcaaaaaacgcataacccaccagcaccgccgccacgatgcccaccagatcggcaaacagcgcacagcccagcgcatggcgcgtatcgcgaatgccgacactgccaaagtacaccgccagcacataaaaggtggtttcggtcgatccctggatgatggcggctacctgcgccgggaacgaggccacaccgtgggtctgcatcacgtccaccatcaggccgcgtgcgcccgagcccgacagcaccttcatcagccccaccggcagcgccggcagaaagtcggtaggcaggcccatggccgtgatcagtaccgcaatgccctgcaacacccagtccatgccaccagctgcgcggaacacggcaatgccacacagcatggccaccaggtagggaatgatctgcaccgccacgccaaagccctctttggcaccttcgacaaaagtctcgtacaccgggatacgccgcagcgctcccgctaccaggaacagcaccaccagccccaggatcacgccgctgccgatcgcccccaccagctgcgaggcacgctcggccggcaaaccggtcagccaccagctcagtccgcccaccagggcgccgaacagcgccaccggcacccagatggcaggcttccagatcggcagacgctggatcagcgccaccagcagcagcgccgacagcagcgaaatcgaggtcaccaccagcgtcggcagaaagatgtcggcggcattgaaaccgctcacgccctgctgcaccgccatggtctggcgaatcgcgatcaccgaggtgggaatcagcgtcagtcccgcagtgttcagcaccagaaacaggatttgcgcattggtggcacgttcgggctgcgggttgagcgattgcagttcctgcatggccttgagccccagcggcgtggcggcattgtccagccccagcatgttggccgacatgttcatcgtcatggcgccctgcgccgggtggccggccggtacgcccggaaacagatggcggaacatgggatccaccccgcgtgccagcacgccgatcaggccggctttttcgcccacgcgcagcagccccagccacaacgccatcatgccggtcaggccgatggcaatctcgaaaccggacttggcggcatcgaacagcgccgtcagcaaacgcgaaaaagcctccaggtcaccatgcagcagctgccacagggcgatcaggaagcctcccaggaaaaagccgagccagacaaggttgagcaccatgcggccagtgtatgcgcaaagcggccccttgccgggccaccagcgtcagccagacgtcacagctggtacgtcaccagacggaaatccggatcatccggatagggcttgacgctgaagcccagcgaacgcatcagcttgagcatgttgctgttgttggtcagcaccaggccgatgatctcgcgcaggcccttgtcacgcgccacgtccatgatggagcgcatcatgcgcgagcccatgcccttgcccgacatgtcatcggcaatcagcagcgagaactcgcagctgctgctgtcggggttggtgacatagcgcaccacgccgaccaggcgctcgtgctcggtcacctcgccctgctcgtcgatctcgcgttcttccagcacggctaccagcgccatctcgcggtcgtaatcgatcagcgagaacttggccagcatgccgggcgacagctcggtcagcgccgagacaaagcggttgtagcggctttcggggctcaggccgcgcaccagctcctgcagcatctggccatcatccgggtggatggcgcggatggtgtagtggccaccgccgcgcagcggccactcctggcggaagtgcgccgggtacggcaggatggacagatgctggtagggccgcgccgtggccagcgtattgcccaccacgatgcgagcatcgactgccacggcaccgttttcgtccacgatgatggggttgatgtccatctcgcgcagctgcggcagttcgcacaccatttcggacacgcgcagcaggatctgctccagcgcctcgtggttcaccggattggcaccgcgccaggcccccagcgtggccgatacgcgggagcgttccatcatgtggcgcgccaggaactggttgagcggcggcagctccatggagcggtcgctgtacagctcgatcatggtgccgcccgccccgaaggcaatcaccgggccaaaggcctcgtcggtcaccacaccgatgtacagctcgcggccacgcacatggctggccatgcgctgcaccgtgatgccgttgatgcgggcctgcggctgcttgcgacgcacgctttcgatcatctcctcgtacacgtcgcgcacgccgatggcgttcaggacgttgagggcgacgccgttgacatcggacttgtgggtgatgtcgggcgaatcgatcttgagcgccaccgggaaacccagttgggcggccagcatcatggcctcgctggcgttgcgcgccagaatggtttgcgtaaccggaatatggaaggccgacagcagcgccttggactccatttcggtcaggatctggcgacgttcggccagcacgccttccagcagcagacgcgccccttccacatcgggcttggc

SEQ ID NO: 1805 - DNA, 23504 bp, synthetic construct
  source 1..23504: mol_type = other DNA
  misc_feature 1..23504: note = Synthetic
aacttccagtgcttggccgggtcgtccaggcgctcctgcaggcgctggcgctgctcgtccttgctgatgtgcagcatgaacttcacgatcaccgtgccggtctcggacagcatgcgttcgaagtcgttgatgtgcgcgaagcgctggcgctgctgcgcgggcgtgatccagccgcccaccacgggcaccagcacgtcctcgtagtggctgcggttgaacaccgtcagctcgcccgcgccgggcacctgctggtggatgcgccacaggtagtcgtgcgcgcgctccagctccgtgggcgccttccagcccacggcgtgcacgcccagggcgctcatgcggccgaacacgccgcgcaccgtgccgtccttgccggccgtatccatgccttgcagcaccaccagtagcttgaagcgcttgtcggcgtacagcaggttctgcagtgcgtccagctccagcgccagctcctccacgcgggccttgtcctgcgccttgtcgccgccggagaagggcttggcgccggggtcgagggccttcaggcggaagtcctggccctgcccgttcagcgggggctgccacggctgccagcgctgcgccagcgtgcggtcggcgatgtcgaaggggaagaggagggaggagggcatggggctattgtggcccgctcgcgtgtggcgccatcagcgccacgaagcgctgcgcgcccaggcccagcggccgctccttggaccagaccacgtccacccacagctccacgccgttggtcaggttggccaggggcagctcggccagcgtgccggcggcgatgcgcggctgcaccagcgcgcgcggctgccagccccagcccaggccggcctcgatcaggcccagcgcggccaggtggttgtcggtgcgccagtggtggcgcgcgaagacgaagcgcgggtcggtctgcgccaggtcgcgcccggccaccacgatctggcgcgtgccggtcaggtgctcctcgcgcagcggcgtgccggcggccagcagcgggtggcgtggggacatgacggctaccagcgtttcgctgcccacttcctggaagccctcgcgcccgtccatgctgggccgctcgaacaccagcgcgagctgcgcgcgcccggcgtgcagcatggccagcgcgtcggcctgcggcgcggccagcacctccacctgcagcagcgggtgctcctgcgccagcgtggccagcgggccgtgccagggggcggcgagcagctcgggggcgatggccagcgtcagccgctcctccagcccctggtgcagcgccagcgcctgcgcgttgagctgctgcagctgcgctgccagcagccgcgcctggggctccagcgcgcgcgccgccggggtggggcggggttcgcggccggcgcggtcgaacaggggcaggtccagctcggcctccaggtgggccatggccatgctgacggccgagggcacgcgcgagagcgcccgcgcggccgcggagaaggagccgtggtcgagcacggccaggaagacctgcgcgctgtcggaggtgaaggccatggcgcaatctatcaaataatctgaaagaagatgacttttttcttcaattttcaacgcatacactgcgcggcatgaatgcaacaacaacacaggccaccggcctgcagggcgccaagcgccgggtggttttcgtggcgctgtacgagctgatcgccatcgccgtctccagcctgctgttcatggccatcggccagggcgcgggcgcttccggcgcgatggcggtggccgcgtccgtcatcgccatcgtctggaacgtgagcttcaacacgctgttcgagaagtgggaggcgcgccagcgtgtcaagggccgctccgtgctgcgccgggtggtgcacgcggtgggcttcgagggcgggctggcgctggtgctgatcccgctgatggcgtggtggttcggcgtgggcctgtgggaggccacgctgatggaggccgggctgctgctgttcttcctggtctacacctacgtgttcaactggtcgttcgaccgcgtcttcggtctgccggcctcggcccaggcggtggccgcggcctcgtaggctcctgtttccatagctgccagcgcttgtctgtcaagcgctggggccgcattcgatgcttgatcagcggggcacgaggaacacggacttttccgacacctgcgccgtgccgtccacctcccgcacctcgaagcgcacggcgtgcgaccctgccggcgccgcgccgtagggcgcgcgcagccgcaccggcacccagcgcgactcggcggggcccacatccacctcgggctccgaggccacccgcacctgcggcaacccctgcgcctcgatgcggtagcgccggggtccctcggtggcgttcatcacctgcaggcggtagatgttctcgatctgcccgccctccaccagccgcgccagggccgcgcggtcgcgcaccacgtccaccttgagcggggtgcgcgtggccaggctggccagcatggcgatgcacagcgccagcagcaccgtgctgtagaccagcacgcgcgggcgcagcacgcggcgcagcatctgtgcgctgctccaggcctggcgcatgccgttctgcgtggcgtagcgcaccaggccgcgggggagatgcaccttgtccatgaccgagttgcacgcatccacgcacatgccgcagccgatgcactcgtactgcagcccgccgcggatgtcgatgcccgtggggcagacctgcacgcacagcccgcagtcgatgcagtcgcccaggccctgcgccggcgccttcttgccgcgcgcgccgcgcggctcgccgcggggggtgtcgtaggtgacgatgagcgtgtccttgtcgaacatcgcgctctggaagcgcgcgtaggggcacatgtacttgcacacctgctcgcgcatgtggcccgcgaaaccataggtggcgaagccgtagaagcccacccagaagatctgccacgtgccctgcagggccagcagctgcggcgcgagctggcggatgggcacgaagtagcccacgaaggtgaagccggtccacagcgccacggcgatccacgccgcctgcttgagcgccttgcgccagagcttgtccaggctccaggggctgcggtccagccgcatgcgggcgctgcggtcgccctcgatgcggcgctcgatccacaggaagatctcggtgtagaccgtctgcgggcaggcgaagccgcaccacaggcgcccggccacggcggtgaacaggaacagcgacagcgccgagatgatgagcaggcccgtgagatagatgaagtcctgcgggtagagcaccagcccgaacaggtagaagcgccgcgcgcccaggtcgaacagcaccatctgccgcccgccccactggaaccacggcaggccgtagaacacgatttgcgtgagccacaccagcgcccagcgccagcgcgtgaacaggccgccgatggcgcgggggtagatcttcttcttggcctcgtacaggtcgatgtagccgtcgtgtgcggcgggcgtggaggtctggggcgtgggcatggcggatcgttgttgttgtggtggggcgtggctcaggcggcgtcgccgtcctcgccgatgagcaggcgcgtggcgctcaggaagcggtgcggcggcacttccaggttggtgggcgcgggcttgttgcggtacacgcggccggcgttgtcgaaggtggagccgtggcaggggcagaagaacccgccgggccagcccgcgcccagcagggtcgcctggggcgcgccctcgggcacctgcgtgggcgagcagcccaggtgcgtgcagatgccgacggccacgaacacctccggccgggtggagcggtgcgcgttgcgcgcatagggcggctgctggtccttggcggaggcggggtcggccaactcgccgtcgtgcccctgcagcgactgcagcatggcgggcgtgcgccgcaccacccagaccggcttgccgcgccactctaccgtcagcatctcgccgggctgcagggcggcgatgtccacctccaccgccgcgcccatggagcgcgcccgctcgctgggcgccaggctggagacgaagggcacggccgccgccacggcggcggcgccgcccgctgcggcggtggcgtggatcagggtgcgccgttgggcgtcgggcggcagggcgggtgcggacatggcggaactccaatgcaaggcggggataggccctgttgcacatcaagacccgtgccagcgcccgccgtgccggagcggcagaaaaaaaccaatgccgacaggcgcttacgcttgcggcgcgcacgaggtttgatgccagtcaagtgccatcgctgccactggcgtcaccctatggcacttccactcccgccgcagcgcccgtgaccaccgccccttccctgcccgacgacgcgcccccggcggcgctgccgtccctgctggcctcctggctggaggcccagcccgagccccacatcctgttcgaccgcgcctaccgcatcgtggccgccaacgccgcctaccgcggccagttcgcccagggagcgcccgtggtgggacgcacctgccacgcggtgtcgcaccactcggccgtgccctgcgaccaggcgggcgaggcctgcccgctcgcgcgctcgctgcacagcggccagcgcgagcgcgtgctgcacctgcaccacacgccgggcggcgaggaatacgtgcagatcgagctggtccccctgcgcggcgcggacggcgagccgcgctacttcgtggagaagatggagccgctgcgcatcgcccagggccgctccggtgcgccgggcatgatcggccgcagcgcgcccttccaggcgctgctggagctgatcgcgcgcgttggcccctcgcaggccagcgtgctgctgctgggcgaatcgggcaccggcaaggagctggccgcccgcgccgtgcacgaggccagcgcccgcgccgcgcgccccctggtggtggtggactgcgccagcctgcccgagacgctgttcgagagcgagctgttcggccacgagcgcggcgccttcaccggtgcgcacgccgcccgcgccgggctggtcgaagccgcgcacggcggcacgctgttcctcgacgaggtgggcgatattcctctcaccatgcaggtcaagctgctgcgcctgctggaaagcggcacctaccgccgcgtgggccagaccgagctgcgccgcgcggacatccgcctcgtcgccgccacccaccgcgacctgcgcgcgctggtggccgaggggcgcttccgcgaagacctgtactaccgcctgagcaccttccccatccggctgcccgcgctgcgcgagcgcgtgcaggacattcccctgctggcggcgtcgctgctggagcgcgtcgctcccggccggcgcctggcgctggcgcccgcggcccagcggcgcctggcccagcaccccttccccggcaacgtgcgcgaactgcgcaacgtgctggagcgcgccgcgctgctgaccgacggccccgtggtcaccgcgcagaccgtcgagcgcgccctcgggttcgacagtcccgcccccgcgcccgccgcccccgccatgcgggccacgctgcgcggcatcgagaacgcggccctgcgcgccgcgctgcagcccggcgcccccacccacgcggccacgcgccgcgagcaggcgcgggcgctgggcgtcagcccccgtacgctgtaccgccgcctgcgcgcgctggagcaggaagaatgtgaaaaaatgatagctggtcgcgcttgatggacaagggctgcaggccgatttggccataatgcggcccagatgcacgcccgccgcctcaccctcgccaccgccgccgccctgctgctggccgcctgcggcacgcccgcgcccacgcacaaaggcgaggtcaagggcgcggacgccagcatgcaggaatgggggcagtccgacatgaaccgcgtggcgaccgtggccatgcgcgagaacctggaaagcctccaccgcctggccgacaagctctaccgccgcaacccggccgagtggcgcaagggcggcgccgccagccgcgaccaggccgtggcgcagctgcgcgccgccatcgcccagcgcagcggctggcccgcgctgcagcagcgccgcgacatcgacgcgctggccctggccctctcgcccgacttcacgggcgaccgcgtggcgggcttcatctacgccgtggccgacatgctcatcaccgcccatggcggcaagaccgagttctacctggtcgacggccaggacgcgcagcacctctacaacgccgcgcgcaacctggaggtcgccgtgtggatgctcgcgcagcgccgtgccgccacgggcgcgccgctgctgctggccgacgagatcagcgccgccgagcgcaacctgagttacgagcgcgagttcggcaagatcatcgcgcgcgtggacctgctggcgcaggtcaccacggagaagtaccgccgcgccgtcatcggctatgtgcaggggctggcgggcggcacgttcatgcagttcctgccggtgcggtagcgttacttgccgcccaggaaggcgaagccctggatctgcgagggcagcaggcccacggccatcaggcgtccgctgtcgtagtacgccacgcccgtggcgatggccccgtggcccagcgcgcaggcgtcgcccgcgaatgcgatgcgcaggtcgaagatgttcttgccgcccgggcgcggcgctgccgagccctgggccgtgcatccctgcatgggctcggtggccacggcgccgttcgcggagatcgacagcgtcaccggcatgttcgccgcgccggtgctcacgcccatgccccggtaggtgcccgccagctgggcgagggacgcgggctgctcgtaggcggcgctgtaggtgcccgagaacgcatcgaagccgaacccgatctggatgtccttctgtgtggcgtaggtgccctcgtaggcgcgcgaggccacggtgttgccggcgaggtcgaactgcgcgccggagccgcgcaggcgcccgtcggccgagatggtggtgccgtgcaccgcgccgtggatcacgccatcgcgggcatacacgccccaggtgtcgccgttgtcgaggatggccagggccacgtcgtagccggtggaggccttgccggcccagaagccctcggcgccggtgaccttgggcgtgggcggcagcacgtagccgtcatcgtcgtcgccaccgccgcagcccgccgccagcgcgagcgccatggccgcgcccgcatatcgtgtccatcgaaacatcgttgtcctcttcttgtcggtgtcggggaaaaggccctgcgcctgatcctgtcgcgcaatgtaacaagatcagccggtaaaatcgccctttcccccaaggagcgttgcagcgggccgtccaccggcccgtcaggcttggggccgtcccccgttcgcaacgacgctcacctgtccccccgaaccatttgcacaggtgagtccgatgtccgctgccctcgtcccccccatgaaactctccggcctggagcccgtcttcatcggcgagggcacgctgttcgtcaacgtgggcgagcgcaccaacgtcaccggctccaaggccttcgcgcgcatgattctcaacgagcagtacgaggaagcgctgtcggtggcgcgccagcaggtggagaacggcgcccaggtcatcgacgtgaacatggacgaggccatgctcgacagcaaggccgccatggtgcgcttcctgaacctcatcgcgtcggagcccgacatcgccaaggtgccggtgatggtggactcgtccaagtgggaggtgatcgaggccgggctgcgctgcatccagggcaagggcatcgtcaactcgatcagcatgaaggagggcatcgagaagttcaagcacgaggcccgcctggtcaagcgctacggcgccgctgccgtcgtcatggccttcgacgagcagggccaggccgacacctacgcgcgcaagatcgagatctgcgagcgcgcctaccgcgtgctggttgatgaggtgggctttgcgcccgaggacatcatcttcgaccccaacatcttcgccgtcgccaccggcatcgaggaacacaacaactacgccgtggagttcatcgaggccacgcgctggatcaagcagaacctgcccggcgccaaggtgagcggcggcgtgtccaacgtgtctttcagcttccgcggcaacgacccggtgcgcgaggccatccacaccgtgttcctctaccacgctatttcagcgggcatggacatgggcatcgtcaatgcgggcatggtcggcgtctacgacgacctcgaccccgagctgcgcgagcgcgtggaagacgtggtgctcaaccgccgacccgacgcggccgagcgcctgctggagatcgccgaggccgccaagggcgccgccaaggacgacagcaagaaattcgaatggcgcggcacgcccgagcaccccaagagcgtgggcgagcggctgtcgcacgcgctggtgcacggcatcaccgacttcatcgtcgaggacaccgaggaggcgtaccaggccatcgtcgtcaagggcggcggccgcccgctgcacgtgatcgagggcccgctgatggacggcatgaacatcgtcggcgacctgttcggcgcgggcaagatgttcctgccccaggtggtcaagagcgcgcgcgtgatgaagcaggccgtggcccacctgatcccctacatcgaggaagagaagcgccagcaggaagccgcgggcctggacgtgtcgagcaagggcaagatcgtcatcgccaccgtcaagggcgacgtgcacgacatcggcaagaacatcgtcaccgtggttctgcagtgcaacaacttcgaggtcatcaacatgggcgtgatggtgccctgccacgagatattggcgcgcgccaaggccgagggggcggacatcatcggcctgtcgggcctcatcacgccgagcctcgaggagatgcagtacgtggccggcgagatggacaaggacgagtacttccgcatcaagaagatccccctcttgatcggcggcgccacctgctcgcgcgtgcacaccgccgtgaagatcgcacccaagtacgaaggccccgtggtctacgtgcccgatgcctcgcgcagcgtgagcgtggcgcagagcctgctcggcgagaacaaggacggctacctggccgaggtgcaggccgactacgaccacgtgcgcgaactgcacgccaagcgcaagaaggtgccgctgtggcccatcgccaaggcgcgcgagaacgccacgcggctggactacgcgccggtggtgccacgcgcgctgggccggcgcgtgttcaggaatttcgacttggcggagctggcccgctacatcgactggggcccgttcttccagacctgggacctggccgggccgtaccccgcgatcctcgacgacgaaatcgtcggcgaggaagcgcgcaaggtgctcgccgacggccaggccatgctcaagaaaatcatcgaaggccgctggctcacggccaacggtgtcatggccctgtaccccgccaaccgcgtgggcgacgacatcgtcttctacgccgacgagtcgcgcaccaccgaactgatgacctggtacggcctgcgccagcagaccgagaagcaggtggacgccgaaggccggctgcgccccagtcgctgcctggccgacttcgtcgcgcccgcaggcacgcccgactacgccggcctcttcgccgtgacggccggcatcggcgccgagaagaaggaaaaggaattccagggcgcgctcgacgactacagcaacatcatgttcaagggcctggctgaccgcctggccgaagccttcgccgaatgcctgcacgagcgcgtgcgcaaggacctgtggggctacgcggccgatgaagacctgagcaacgaagacctcatcaaggaaaagtaccggggcgtgcgccccgcgcctggctaccccgcctgccccgaccacacggccaagatcgacctgttcaaggtactggctgcgggcgagatcggcatgcagctcaccgagagcatggcgatgttcccggcgtccagcgtcagcggcttctacctgggccaccccgacgccacgtacttcaacgtgggccagatcggcgaggaccaagtggaggacatggccgtgcggcgtggcatggaggtggaggaactgcggcggcggctggcgccgaacctctgaatactatataaagcatagctgcctgcgcttgctggacaagcgcgagaggcgaaaaatgcttaaaagacgaaagccccgcatgcggggctttccatttggtgcatctttcagcttgttagcggacagagcgcatatcccagtgaaatatgtggaggcaagtgtatccggatgggttacaaatagcaaatactttggagggagttgctgcatgcctgctatctatcgtctggcgcttgatctggggtctacttcgctggggtgggcagttctccgtctggagcctgcagcgcttgaaccgattgccatcatcaaggcgggtgtgcgcatcttcagcgacggccgcaatcccaaggatggcgcttcgcttgccgtgacccgccgcgccgcccgcgccatgcgccgccgccgcgaccggttgctcaagcgcaaggcgcgcatgcaggacaagctcgtgaagcatggctttttcccgagcgacatggatgagcgcaaggcgctggagcggctcgacccctatgcactgcgcgccaagggcctgcgtgaggcgctcacccctggcgaatttgcacgtgcgctgtttcacatcaatcagcggcgcgggttcaagagcaaccgcaagacggacaagaaggacaacgacagcggagcactgaagaaggccatcagccacctgcgccaacagatggaggccggcggccaccgcacggtgggggaccatctgtggagccgcttgcagcaagggctgggcgtgcgggcacgttatcgcgagacgcccttcaccaatgacgaaggcaagaagcgcatcgacaagagttatgacctctacatcgaccgcgcgatgatcgagcaggagttcgatgcactctgggctgcgcaggccgcgttcaatcccgcgctattccacgaagtcgcccgcgccgacctgaaggacacgctgttgcaccagcggcgcctgcgtcccgtcaagcccggccgctgcacgctgctgcccgaggaagagcgcgctccgctcgctctgccgagcacgcagcgctttcgcatctaccaggaagtgaaccacctgcgcctgctgggcgaggacctgcgtgaggtggcgcttacgctggcgcagcgcgacgccgtggcgaacgcactggaatccaaggccaggctgacgttcgagcagatccgcaagctgctcaagctctccggcagcgtgcagttcaatttggaagacgccaaacggacggaactcaaaggcaacgcgacgagtgcggcgctggcgcgcaaggaactgttcggtgcggcatggggcgggtttggcgaagcgttgcaggacgagatcgtctggcaattggtcaccgaggagggtgagggcgcgctgatcgcctggctgcaggcacacaccggcgtggatgaggcccgcgcgcaggcgattgccgatgcgagcctgcccgagggctacggcagcttgagccgcaaggcgctcgcgcgcatcgtgcccgcgctgcgcgccggcgttgtcacctacgacaaggccgtgcaggcggccgggttcgaccaccacagccaattgggctttgaatacgacgcgggcgaggtggaggattgggtgcatccggacacgggcgaaatccgccccgtgttcaagcaattgccctactacggcaagccgctgcagcggcacgtcgccttcggcagcggcaagccggaagatccggatgaaagacgctacggcaagatcgccaaccccacggtgcacatcggactgaaccaggtgcgcacggtggtcaatgcgctgattcgccgttatggccgccccaccgaggtggtgatcgagctggcgcgcgacctcaagcaatcccgcgagcaaaaggtggaggcgcagcgtaagcaagccgagaaccagcggcgcaatgcgcgcatacgcaaatccatcgcggaagtgctgggcatcggcgaagagcaggtacgcggggctgatattcagaagtggatttgctgggaggagttgagcttcgatgtcgcggaacggcgctgcccctacagcggcgtgcagatcagcgcgcgcatgctgttgagtgacgaggtggaggtcgagcacatcctgcccttctcgaagacgctggatgacagcctgaacaaccgcaccgtcgccatgcgccaggccaatcgcatcaagcgcaaccgcacgccctggacggcgcgagacgatttcgaggcgcagggctggagctacgagggcatcctgcagcgcgctgagcgcatgccattgcgcaagcgctaccgtttcgcacccgatggctacgagcgctggctgggcgatgacaaggactttctggctcgtgcgctcaatgacacgcgctacctctcgcgcgtggcggccgaatacctgcggctggtctgccccggcagcggcacgcgcgtgattccaggccagatgacggcgcggctgcgcgggaagttcggcctgaacggcgtgctgggcccggatggcgagaagaaccgcaacgaccatcggcaccatgccgtggatgcctgcgtgattggtgtgaccgaccaggggctgatgcagcgctttgccaacgccagtgcccaggcccgagaggatggcctcacgcggctggtggacgacatgccgcgaccgtggccgacttatcgcgcccatgtcgagcgggcggtgcgtcatatctgggtgagccaccggcccgaccatgggttcgagggcgcgatgatggaagaaacgtcctatggcatcggcaaggatggctccatcaagcaacggcgcaaggcggatggcagcccggggcgcgagatcaccaacctgatacgtatccatgaggccacgcagccccagcggcacggagcagggccggacgggcaaccgttgccctataagggatacgtggggggcagcaactactgcatcgagatcacgaggaacgacaagggcaaatgggagggcgaggtgatttcgaccttccgggcctatggcatcgttcgcacaagcggattggggcaattgcggcatccccgcgtgggacagaacggccgcgaactggtgatgcggttggtgattggcgatagtgtgcgattggagatcgatggaatcgagcgcacgatgaggatcgtcaagatcagtggcagcaacgggcagattttcatggctcctatccatgaagccaacgtggatgcccgcaacagcgacaagcaggatgcctttgcctacacgtcgaagtacgcgggttccctgcaaaaaaccaaggcgcgcttcgtcaccatctctcccattggcgaggtgcgcgacctcggtttcaaaggctgatctccatgatcggccgcattgtcgaaatcgcggacgaccggcggcatcttttcgtcaatcgcggcttcctggtcgtacgagataccgagggcgagcgcaaggaactgggccaggtgccgctggacgacatcgccgccgttatcgccaatgcccatgggctgtcctataccaacaacctgctcgtagccctggcggaacgtggcgcccctttcgtgctgtgcggccccaatcacaacgcagtcggcatgctgctctccatcgatggacaccacgtgcaggccaagcgcatcgaagcgcagatcgcagccagtttgccggtgcacaaacgtttgtgggcctcggtggtcaagtccaagctggagcagcaagccgcagcattggaggctgcggctgcacccaccgcaccgctgctggccttggtgaacaaggtgaagagcggcgatccggacaatatcgagggacagggtgcacgccgttattgggggctgctgtttggcagtgctttccgccgtgatcaggatggggatggagtgaatgcgctgctcaactatggctacacggtgcttcgttccgccacggcgcgggccgtagtgtccgcgggcttgcatcccagcattggcttgcaccacagcaatgatgccaacgccatgcgtctcgttgacgacttgatggagccatttcggccagtggtggatttgaaagtctggcaactgctggggcagggagaattacatgtcactccggagactaaacgtgcacttgtgcgggtgctgcatgacgacatgcaaaccagtgttggtgtgacgcccgtgatggtgtgcatgcaaaagcttgcggtgtcgcttgcgcaggtgtatctgggcgagcgcaccaagctcgatctacccttgccgggcttgcccttggcgctggcgggcagccttgagccggattgatcaacttcaatgctttccggatacaggctcatgtggatggtggtgatgttcgacctgcccgtggtggaaaaggccgaacggcgcgcggccacgggctttcgtaacacgctgctggatctgggcttcgagatgagccagttcagcgtctacatgcgcttttgcaccagccagacccaggtggacaccctgtgccgcaacgtggaactggccttgccatcaggggggaaagtccatatcttccaattcaccgacaagcagtacgagcgcgccatcaccttccatggtcagcgtcgtcagcctggccaaaaagcacctgaccagttcgaccttttctgagcatgcagcctgtttcctggcttccagaagcgcaaaaccccttgaagaatcaagtggttagcgcgatcagattctagatcactgggatatgcgcactgaccggaacaatgtgcgcgcactgggccgcgtaaccgggattctagatcactgggatatgcgcactgaccggaactggacggcgcggctctcgtgccagcccagcattctagatcactgggatatgcgcactgaccggaacccgcgagtccgctgagcgacggctgtcggtattctagatcactgggatatgcgcactgaccggaacagctgcccgacgtgctcgcgctgcgcatggattctagatcactgggatatgcgcactgaccggaaccaggacatgcagcgcttgcggaacggcttgattctagatcactgggatatgcgcactgaccggaactcccgtgctgatgttgatgtcgaagagatcattctagatcactgggatatgcgcactgaccggaactgatcgtcctgaccggtggtgagccattccattctagatcactgggatatgcgcactgaccggaactccgtgaggaaggcaacgctgttcgtctggattctagatcactgggatatgcgcactgaccggaacagtgcgcggggtcgagacgcatgtgcttgaattctagatcactgggatatgcgcactgaccggaacagatagcgctgggcgaatccggcgcggaaattctagatcactgggatatgcgcactgaccggaacacgacgaaatgcgccagcaccgcgagctggattctagatcactgggatatgcgcactgaccggaacgagatgacgcgcgagtggcagcgcgccgttattctagatcactgggatatgcgcactgaccggaacagcgccatgctgccgttgtaggcgggctggattctagatcactgggatatgcgcactgaccggaactcggagcgctggcctgcgactacggtttcgattctagatcactgggatatgcgcactgaccggaacacacgccgccttcagcagcagattaacttcattctagatcactgggatatgcgcactgaccggaacaaacccgcatgaatgctagatcgcacctgtattctagatcactgggatatgcgcactgaccggaactgctcgtgttgcgggccgcccttgcggccaattctagatcactgggatatgcgcactgaccggaactgggcgcggccgtcttcgtctccgaaggggattctagatcactgggatatgcgcactgaccggaaccgcgcagcccgcgtgaagtccgtcaccacaattctagatcactgggatatgcgcactgaccggaactaggcgcgctggtggaggccattgcggcgcattctagatcactgggatatgcgcactgaccggaaccgcaagccgccatcattgccgcgctttttaattctagatcactgggatatgcgcactgaccggaacccagatgctcccgcctcgataggtttcgtgattctagatcactgggatatgcgcactgaccggaactcggtcggcctgctgttgtggggccagccgattctagatcactgggatatgcgcactgaccggaactgctcgaccgtttcaaggtgtactgatgcaattctagatcactgggatatgcgcactgaccggaacttttccgcgtcgggattcacccgtggttttattctagatcactgggatatgcgcactgaccggaacttgcgtgatctgcccattcagttgggccaaattctagatcactgggatatgcgcactgaccggaactgggtagcctggtgttcatggtggcgcacattctagatcactgggatatgcgcactgaccggaaccttgccgcctatctggaaggcgagtttgtcattctagatcactgggatatgcgcactgaccggaacccgaaggcggtctatgtgtgattcggtgctattctagatcactgggatatgcgcactgaccggaaccatcctgacggccgacgacaccaaggccgaattctagatcactgggatatgcgcactgaccggaactatttgtgccgcagggtgtcggctttgcgagattctagatcactgggatatgcgcactgaccggaaccccctccttgcatttatcagggacgcaagcattctagatcactgggatatgcgcactgaccggaactggcgccctcgttatgccccacaaaggcccattctagatcactgggatatgcgcactgaccggaactacagtactaaaagtcagtcgcgtgaagctattctagatcactgggatatgcgcactgaccggaactgcatgcgccataccctgccgcgtgcgtgaattctagatcactgggatatgcgcactgaccggaactttgcaggtaagcgatgcggccttcgcgaattctagatcactgggatatgcgcactgaccggaaccgcgcgacttgcgcaccgataccaggccgtattctagatcactgggatatgcgcactgaccggaacttgtggagcgctaatacccaccagagcagcattctagatcactgggatatgcgcactgaccggaacccggtcttgctggcgtcgttgtcggccaccattctagatcactgggatatgcgcactgaccggaactacgttgagcgcggccagctcgtccatcttattctagatcactgggatatgcgcactgaccggaacctgatccttcctgcattccttgacggccagattctagatcactgggatatgcgcactgaccggaactgctacaccatgacctaccgcacgcagggcattctagatcactgggatatgcgcactgaccggaacgtcgagctgctgcccctggacgacgagcagattctagatcactgggatatgcgcactgaccggaacaggcgctggccgccatcgacgtagcggccgattctagatcactgggatatgcgcactgaccggaactagggcgccatgccgacgcgtgcgcccatgattctagatcactgggatatgcgcactgaccggaaccaccgcctgacgttcagcacattttggacaattctagatcactgggatatgcgcactgaccggaacgagccgggcgtgcgcaggaagcgcgcctcgattctagatcactgggatatgcgcactgaccggaaccttgacgcccttcgcctgatggtcgacgccattctagatcactgggatatgcgcactgaccggaaccaactctcgcgttcccgctctgaactctatattctagatcactgggatatgcgcactgaccggaaccgtggtgcgggcttggtgagtgatgctgcaattctagatcactgggatatgcgcactgaccggaactaccgagtacgccgttggactcatcaagacattctagatcactgggatatgcgcactgaccggaaccgcctggacattgccctcacgacctgggacattctagatcactgggatatgcgcactgaccggaacagtcagctcttgaataccgcgtgtagagtcattctagatcactgggatatgcgcactgaccggaacctgctagccaaggttatggagcaacggatgattctagatcactgggatatgcgcactgaccggaacttgctgcgcatgacctggataacatgcgctattctagatcactgggatatgcgcactgaccggaacacgaaggcatcaacgcgctcaagatcatcaattctagatcactgggatatgcgcactgaccggaacctgaaggcaggcgacaaccgagtgaagggtgattctagatcactgggatatgcgcactgaccggaacttatcgaggaaagaccgcctattgcccgtgattctagatcactgggatatgcgcactgaccggaacgagaacgcgatgcatgacgccgcgccggacattctagatcactgggatatgcgcactgaccggaaccggtcggcgtcggccatcatggcaactgccattctagatcactgggatatgcgcactgaccggaaccggcgaccatggcgcttgcggccgctgcgcattctagatcactgggatatgcgcactgaccggaactcgagcttgaaacggttacgtccccgccagattctagatcactgggatatgcgcactgaccggaactctgccgaagggatcatgtcgaacaacacgattctagatcactgggatatgcgcactgaccggaacgcacttcgtcaatgccgttgcgcgcgatgtattctagatcactgggatatgcgcactgaccggaactgccaggcccgtcttgaggacgtaccgcgaattctagatcactgggatatgcgcactgaccggaacagaggttacggcgttgtcaatgcgtcaggattctagatcactgggatatgcgcactgaccggaacttgacgttccagcaggcgccgccaagaagcattctagatcactgggatatgcgcactgaccggaacccgcgcttggcgttgaactccgcacgccagattctagatcactgggatatgcgcactgaccggaacggcggagacaagaagctcatcggcgaccgcattctagatcactgggatatgcgcactgaccggaacgcggctacacagcgagcagaccgcacacgcattctagatcactgggatatgcgcactgaccggaaccctggcacgcgagcagcgcatcggccaggcattctagatcactgggatatgcgcactgaccggaacctggcgcagcaccttggatgcgcagatgcaattctagatcactgggatatgcgcactgaccggaacgcgaacgcatacaagaagaccccctatctaattctagatcactgggatatgcgcactgaccggaacggggcagcgtggctcatctttaccgcctgaattctagatcactgggatatgcgcactgaccggaacaagaaagaccgagcctagtggttcgcgcgattctagatcactgggatatgcgcactgaccggaacagatagcgcttggtgaatccggcgcggaaaattctagatcactgggatatgcgcactgaccggaacatgcagtggtgacaccccgctagggcttggattctagatcactgggatatgcgcactgaccggaacacttccaccgcgctggtcctgtccgaggaaattctagatcactgggatatgcgcactgaccggaaccaaggttgcgaacttgcgtttttctgctcgattctagatcactgggatatgcgcactgaccggaacttggctggctgatgcctgccaactcctggaattctagatcactgggatatgcgcactgaccggaactggatggtcccgtccgccacggctccgcgcattctagatcactgggatatgcgcactgaccggaaccggaccatccgcgtcttgcaggcgctgtccattctagatcactgggatatgcgcactgaccggaactctggctcaacgaagtcagcagcgtgccggattctagatcactgggatatgcgcactgaccggaactagaacgcggcgcgggctgcgctgtctgcgattctagatcactgggatatgcgcactgaccggaactaacgcagcagtcaagccatgaaccacggaattctagatcactgggatatgcgcactgaccggaacgtgttccccgagccggaaatcacggaccggattctagatcactgggatatgcgcactgaccggaacttgcgcgcctgagcggtgaacggcgagaggattctagatcactgggatatgcgcactgaccggaacaagcgcgggcgatattcgcaggtgccgatgattctagatcactgggatatgcgcactgaccggaactgtcccaggcatcggggtcggccctattgaattctagatcactgggatatgcgcactgaccggaaccgtggcgcagcgcaatgagcgcgctgctcgattctagatcactgggatatgcgcactgaccggaacacgccgccgcctgtggtggcatcgccgggattctagatcactgggatatgcgcactgaccggaacccggcaccaacgtaagacttaaggatatatattctagatcactgggatatgcgcactgaccggaacctggatgtcggcctccagcaggggcgcgaaattctagatcactgggatatgcgcactgaccggaaccgtggcgcagcgcaatgagcgcgctgctcgattctagatcactgggatatgcgcactgaccggaactccacgaacgcagcgcgccactcgctccagattctagatcactgggatatgcgcactgaccggaacgcatcgacctgatgggcgagctggtgacgcaattctagatcactgggatatgcgcactgaccggaacatgaaccgcgtactcaactggaccggccagattctagatcactgggatatgcgcactgaccggaacagccggctgttcaccgtgctcgggcggcagattctagataactgggatatgcgcactggctggaacgcgtgcatccggtagccgctaccattgtgtttattttgctaaatatatttttacagcaatctcatttcaaatattaatggcatccaccaatgcacgaatagtgatcattatgaatgggtattttctcccgccatctccaactgcatcacgatcatgttcaccagcgtgttcaccgtcggccgcccggtctcgatgacgtagtgcgccgcctggcggtacagcgggtcgcgggtgcggtagaggtcgcgcaggcgggccatggggtcgtccacctgcagcagggggcggctgcggtcgtgcttgacgcgcttgaagatttcctcgggcgaggcgcgcaggtagagcacgtggggaaagccctggcgcaggacgtcgcggttggcctcgcgcagtacggcgccgccgccggtggagagcaccatggggccgggctcggccgccagcgctgccagcagggcggcctcgcggtcgcggaaggcgtcttctccgtgctgctcgaagaactggcggatgctcgtgcccagctgctgctccagccgctggtccaggtccacgaacggcaggcccaggcggcgggcgagctggcggcccaccgtagatttgccggagcccggcatgccgaccagggcgcagcgcgtttgcattcttcggaatcctgtgggatgggggagcgccgagtgtagcggcgcgcggccagcggcgcggctagcggcgtgcgccgacacggcgcccgtgcggcagtggtcacaatcgggcatgccttctttcttgacttccctgcaggagcgcgcgcagcggctgctgcgcccggtgatgccgctggtcacgcccttcgtgcgcgcggtgcagatgtggctcgacgcggagggcctgcgcatgagcgcggccatgtcgttctacggcatgctgagcctggcgccgctgctgctgctgctggtgggcgtgctgggctggtggatcgacaagtcgtacctggagagcaacctgatcggccaggtgcagagcgtgatgggcgagcgcggtgccgaggtggtgcggctggcgctggcgagcgcgcaggcgcccggcgaggggcggctggcttccatcgccggcttcgtcctgctgatgtcgggtgccacgggggtgttcgtggagctgcagtcggccctggagcgcctgtggacgggcggcaaacccgtgcacgaggacaaggcctggtggcgcatggccacgctgcggctgcgcgggctggcctacgtgctggtgatcggcttcctgctgctgacgtcgctggtgctgtccaccgtcatcaacatggtggcgaaatgggccggcgagatgctgccgttcggctcgggcctgctgctgggcgcggtgaacgagacggtgtcgttcggggtgacggtgctgctgttcgtggggctcatgcgcatcggcggcgggccccggccgcccacgcgctgcctggtgttcggcgcggtggtgggcgcggtgctgttcaccgtgggcaagcaggcactggcgctgtacctgtccacggcggcggtcgtgtcggcctatggtgcggcgggctcgctggtggtgctgctgatgtggatctacttctcgtcggcggtgctgctgttcgcggcgagctgcgcacgggcgctgcacgaatcgcgcacggccaaggctgcaccacaggcctgaacgtctcattacgttctttacgggcggcgcggcattgtgccggccatggcgggataggctgcaggcttgctatcgcacgaccagaaccgacccatgcataccaccgcttcctctcccgccgcgggttcctctgcctctctcaaatacctctggattgccgtgggcgcgctcggtgcctgcgtgctggccctggggggcacgctgctggcgcagaagcttccgggcgatgcgccgcaggctgcgcccgcagcaccccaggtgatcgaggaaaaagcgcccccagcgcttgccaggcaagcgccgccagctcctgattcaagagcaaaccgcgtgctgccggtggcgcaggccccggcgccggtctgcgcgagctgcgggcgcgtcgagtcggtgcagccggtcgcgcaggccgcacccgccacgggcgtgggcgcggtggccggcggggtgctgggcggcgtgctcggcaaccagatcggcaagggct

SEQ ID NO: 1806 - DNA, 23372 bp, synthetic construct
  source 1..23372: mol_type = other DNA
  misc_feature 1..23372: note = Synthetic
gcgtccccacgacgcactcggccatctcacccccaccgaataccgcaatcacctcgccggaagttctacttttgaaatgtatgtttgacggggaggcttacggtcgcttgctgatattctgttacgttctgatttttcatgaggacttccaatgcgtctgaatactttggctgttgcgcttgtacttgcggcctctggaactgctgcccatgccggtgaaggcatgtgggtgccgcagcaattgccgcagattgccgagccgctggccaaggccgggctcaagctcgacccgcagcagctggccgacctcaccggcgacccgctgggggcagtggtgtcgttgggcggctgcacggcgggttttgtctcgccgcaggggctggttgccaccaaccaccattgcgcctatggcgcgattcagctcaactccaccgccgagaacaatctcatcgccaatggtttccatgccgcccgccaggcagatgagttgtccgcaggtcccaatgcgcggattttcgtgctggactcaattaccgatgtcaccgatgaggtgcgccgcacgctggcagccgagcgcgatgcggccaaacgcagccgtgttctggatgcgctggaaacccgtctggtggccgaatgcgaagctgagccgggctatcactgccgcctgtacagcttcatgggcggtaatagctaccggctgttccgcaatatcgaaatccgcgacgtgcgtctggcctatgcaccgcccggtggcattggcaaattcggtggcgatgtcgataactggatgtggccgcggcataccggtgatttttccttctaccgcgcctatgtcggcaaggacggcaaaccggcagcgtatagcccggacaatgtgccatatcagcccaagcattggctgaagctggccgacaagccgctgcgcgccggggatttcgtgatggtggccggctaccccgggcgtaccagccgctatgcactggccggggagttcgagcacacccagaatcaggcctatcccgcctccatccgccattttgaccgggtgattgcgctgattgaggaagccggggcgcgggatgccgataccaaggtgaaatacgccaataccctggccgggcttgccaacagcagcaagaacatgaaaggcatgttggaaggcttcaagcgcatcgacgcgctggccgacaagcaggccgaagaagccgcggtactggcctggttgcgcagccagggcgccgcaggtcgtgcggcgctggaggcgcatcgcacactgacgaccaacaatgccgaagccgccgccaatagcgagcgcaatctgctggttggccagattcgccgcaatgccctgcttgccacggcgatgaccctgtaccgactggcgattgaaaacgaaaagcccgaagccgagcggcagccgggttatcagccgcgtgacctggcaggcatcgagggcagcctgcggcagatggagcgccgttatgtgccggccatggatcgcaaaatcagcgaatactggctgggcgaatacctgaagctgccggctgacaagcgttcggcgcagattgatgcctggctgggcggcaatgatgcggcggccatgtcgcgggcgctggatgcgctgtaccagagccgtctgggcgataccgcagagcggctgaaatggctgaaggccgaccgcgccgcttttgaggccagccaagacccggccatccagcttgccgtggcgctgatgccctcggtgctggcacaggaagaaaaagcccgtcgcgtagagggcgaaaccctggcagcaaggccgctgtatctcaaggccgtggccgactatcgcgccagccgcggccaattcgtatatcccgatgccaattccagtctgcgcatcaccttcggcaatgtgcagggctatgccccggccgatggcgttcagtacaccgccttcaccacgcttgaaggcatcctgcccaaagacaccggccaagagccgttcgactcgcccaaggcgctgctcgatgcagtgcgcgccaagcgttatggcggcctggccgatgctgcacttggcagcgtgccggtcaacttcctctctgacctggatgtcaccggcggcaattccggctcgccggtgctgaatgccgaaggtcagctggtggggctgctgtttgacatgaccttcgactcggtggtgtccaactgggtgtttgatgcggccaagacccgcaccatctccatggatgcgcgctatatgcgctgggtgatgcaggaggtctatccggcaccgaatctgttgcaggaaatgggcgttgccagccaagccaagtaaactcgagcacttggcaatcatgctcaggcggcagggttcacgccctgccgtcttctttggagaaaatcagatgttgaaacaaggcgatgtggccacttggcaaggcgcggacggccagtggcgattgctgtggatgctggcgcatgatgcgcacgcgcaattgggcgggatttattcgctggcgcagttcatcctgatgatggatgaagacccgcaggcactgacgcaggacgagctggacagcctgcgccaaaccgagcgtcttgggcatttcccgattggtgccgagcagctgcaggccgcaaacctgaaagtggtcggccacatgttgcccagtgacgacgacatggaaggctaccgggtttggcgtgcggcgttcgagaagggcgaggccggggtgtttaccgtgccgctggaagatatctggacaatgattctggaaagcctggcgcaaggcgctatggatgatgacggcgatgaatgagggtttgcagcactggctggcgcgccttgaagcgcagcatccgcgtgccattgagcttggccttgatcgggtgcgcgaagttgcacagcgcatggcactggacaaaccggctgcacaggtcatcagcgtggccggcaccaatggcaaaggctccaccgtggcattgattgaagccatcgcccgcgcccaggggctgcgggtgggctgttatacctcgccgcatctgctgcgctataacgagcgggtgcgcattgaggggcgtgaagccagtgatgccgagctcatcgctgcgtttgaagcagtggaagcggcgcgcggcgaggtttcgctgacctattttgaggcgggtaccctggctgcgctatggctgtttgcccgcgccgggcttgacctcgtcgtgctggaagtggggctgggcggccgcctggatgcggtgaatatcgtcgatgccgactgcgccgtcatcaccaccgttgaccttgaccatcaggactggctgggtgcggataccgaggcgatcggctttgaaaaagccgggattgcccgcgaaggcaagccgctggtactgggcgatgacgacccgcctgccagtgtgctgcgccatgcctatgccatcggtgccccaagctggcgcatcgccaatgatttttttgcagaaaaactggatgagcgccagtggcgctatcgtgaagtcggctgtgaaatgattttgccgctgccatcgcttagcgccccggtacagttgcgcaatgccgcctgcgccattgccgcattgcgcgcgcttggcctggacttgcaagcgacagcggtggccagtgcgctgcaaacggcgcatctgcctgcacggctgcaagtttttcaagcctgcggtatcccggtctgggtggatgtggcgcataacccgcaggcggcgcgcgcattggctgaagcactggcggccacgcctgaaaaaacactggcggtgtatgcgccgctggccgacaaagatgccgctggcgtggcggtggcgttgcgcgcgcagattgctggctgggtactggcagcaagcacggaggccggtgcgcgcgggcttgggctagaggcgctgcgcgaaaagctgccgcaggatttgccggtgctcgctgcggaaaacacggtggccgccgccatcgacacagcattgcagcttgctggcgggcagggcagggtgctggtattgggcagcttccatgccgctgaacaggcgctcggctgtttgcaggaaaaacaggcagccacggggcgcgcgatataatcgcgctcccccttgtcatgccgcctccggatggacactgccctgaaacagcgcctgattggcgccgccgtactcactggccttgccgtggtttttttgccgatgctgtttgaatcctcaacactgtccgagcgcgaggtgactgatatcccgatggatgtgccgcccgcgcccaaggacggctttgaaacccgcgagctgccgctgacaggcccggccgctgtccccgaaggcggagtgatgggcatgggcgaggcgccgccagcgccggtgaaagtggatgcgcaggcgcaagaaacgccgcctgcgccgccgcccagcccggccacggccgcaggtgactatgcggtgaatttcggcagctatgccagccgtgccgatgctgaccggattgtggctgccctggccggtttgcagctgggcgccgtgattgatccggtcacgctagacggaaaaaatgcctggcgggtatatatcggcccttatgccagccgcgccgatgccgaacaagcgcggattcgcgcactgacacttggcaataatgcgcgcgccacggtggtgatgcgtgatgccgagccagtgccaacggccagccccaggccggtggcagcccccgtacaagctgcacaaaccacgcccgccccggcagccgctgctgaacgtccggccgtgacagaaagcaagcctgcccagcccgcacgcccggcggcgacagaaaacaagcctgccgcacaggccagggcagaagctgtgccccaaccgcgggcaacagcgcctgcgccggcggcgccgaaaccggctgccagcagtaccggctttgccgtgcaactgggggcttttgccaatgccgccgatgcccgggcgctgcgtgatcgcgcccgtgcagcggggttttcggcgattaccgaaaccgtgcgcaccgacaggggcacgctcacgcgcgtgcgtcttgggcctgtggccgaccgtgcagccgccgagcgcatccaggcgcaggcgcgcagcaagctgggggtggacggcatggtgcgcgctcatccctgaaacatctgttatccaccccgttttgcgccagcgctgatggcgcgctttccaatctcacagttttccccggagccaatattccatgtgcggcattatcggtatcgtcagtcccaacgaagtggcagcccgtttgtatgacggcctgactgttttgcagcatcgcggtcaggatgcggccggcatcgccaccagtaacggacagcaattgcgcgtggaaaaaggcaatggcctggtcagtgatgtgttcgacgagaatatgatgtcgttgctcaaaggtggtatcggcatcgcccattgtcgctatcccactgccggcagcgagggcagtgacgaggcgcaaccgttctacgtcaactcgccctacggcattgcgctggcgcataacggcaacctgatcaataccgaagcactgcgtcgcgaggtgtttgaacaagaccgccgcagcgtcaatacccagtccgattccgaagttttgctgaacgtgtttgcacacgagctggcatcgcagccgcggctggacgcggaagcggcattccgggcggtggagggcgtgatgcgccgcgccaagggcggctttgccgtgctgtgcatggtgatggggctggggctggtggccttccgtgaccccaatgcgatccggccattggtgctgggcaagcgcagcacgcccgatggcgatgagtacgcactggcctcggagtcggtggcgctggatctgaccggctttgagcgcgtgcgcgatatcgagccgggcgaagcggtggtgatcagcaatgaccgccagctgcatgcacgcatcgtggccgacaacatcctgccgcggccgtgcattttcgagcatgtgtatttcgcccgtccggattcgatgattgacaatatctcggtacacaaggcgcggatgcgcatgggcgtggcgctgggcgagaaaatcctgcgcgagcgtcctgaccacgacatcgatacggtgattccgattcccgataccagccgcgatgcggcgctggagctggccaatgtgctgggcgtgaaataccgcgaaggtttcatcaagaaccgctatgtggggcgcaccttcatcatgcccgggcagggtgcacgcgccaaatcagtgcgccgcaagctcaacccgattccgctggagttccgcaaccgcgtggtgctgctggtggacgattccatcgtgcgcggcactaccagccatcaaatcgtgcagatggcgcgcgaggccggcgccaaaaaggtgtatctggcctcggccgcgccgccagtgcgctatcccaatatctacggcatcgacatgcccaccgccgaggagctgattgcccatggccgcagtgttgccgaagtggaaaagctcattggttgcgactggctgatttatcaggatctgcaagacctggaaacggccgtggccggccccaaacaccccggcatgaagttcgacacctcgtgtttttccggcgaatacgtcaccggcgttgctgatggctactttgaatcgctcaagtcccagcgctcggacgcggccaaggaaaaacgcagatcctgactattgagcctcttccatcatggtgggatcttgttttgtggatgcctgctttgcctctttttctctcaactcggacagcgttggccgaggcgtataggtgctttgtgcctgcttgatgcaggccttcagtgtgtggctttgcggcgcattttgtgcaagacactgagcatattgttgtccaaggacaacgagtgggtctgactgcccggcacagcggaacatttccccggtcatttttgtcttggccaactggtgcatacgctcacgattgccggcaatggcataagcgtcataatggtcggtagccgttatcaggctcaggacaaaatccagagatacccactttcgcacagggtcgcagggggtgggataagccggagcctcgttcagataatgcatgtgtttctgaatctgggcaaggtgaatatcagccacaccgccacgcgccttgagggtcagccagtgccagcccaatacgcctgcaagtaatcctgttgaaaaaatcaggatatatgacaaaaatttccaggctcttcgcttcatgaggattctcaatatgaccgaaccgtacaacgcatgatgccattatgggatgagcagcttacactctgccgaccgccaccacggctcccgggcatgggtgtccaggtaaaccagccggtttgcggattgtctttgctgacagacagcccatagccatttttattggggagcgagtcccattcctcaagcggcttgccatttatatcctttgcgctgtcacgaagtgtgcgtgcagcaccggggagcatgatgtttatctggaagcaagcagagtcgccattgtcaaaaatgatgcagcctccagagcctcgcccgtacatgtggccgaggatgctccataatgacgttagaaagctttttgatatttcattgtttctatagcctgggttgttcgccacaagcgctgcattaagcatggcatcaacaatgccgattttttgttgggcatctgcaaagcttgaaaaatatccattttcgggtctgattacgacaaaattgcgtgatatcctgatgatggcttcgaactgcaagcgctcaccatgggttggctcccggacttcaatatgcattccagtattaagccgggctgccagcgatggtgtcacattttgatgtgatgtcacggccatggatatagattgggcaacaagcatattgccggagaagcgggggctgctggcagtcctagtgggcgttgaccagggcggggcgcttctggatgacgtctgggatagataatgacgtacttgaatcgagtggactcgaaattgcccacggcataaattgcaggatgcgtggcactgccgtgcatgtttactgcggcctgttgaaattgaagttcgctctggcaggtattgcatacaatccagcgaccttcatcccaagtgcttgcgtatgactttgccgaccagctcgtgaagcaggcaaatagcaagatgaatataattcgcatgactcccccccatctatctgattgtagatggctttcttcttaaaattttttttgtctaatgtcaagtgtttatcaggccgccgcggcggtgcttgccactgccggtgtggaggaaaaaccggccgccgcacgtgccatggcggcggcatttcgtgcagggcagcttgccattgatgaaaacgccccggtacccgacgccatcggtatgccggggcggcctgccaagccacggctggtgcacccgcgtgagctgccacggcgcggctttggctcactggccggacgtgcggccttcattcatgcggtggcgcatatcgagttcaacgccattgatctggcttgcgatgcggtttaccgctttcgcggcctgccgccgcagttctatgccgattgggtgcaggtggccgatgacgaggcgcggcattttgtgatgatgcgtgcgcggctcaacgacctgggttttgattacggcgatttcgatgcccataacggcctgtgggaaatggccgaaaaaaccgcccacgacggcctggcacgcatggcgctggtgccgcgtgtgctggaggcacgcgggctggatgtcactccggggatgatcgaaaaattgaagtccctgggcgatacccaaaccgctgcctgccttgaaatcatcctgcgcgaggaaattgcccatgtcgccgcaggctcgcgctggtatcgctggtattgccagcgtgccggcgtggaaccgcgcagccgcttccgcgagctgctgcaccaatatgccagcggcgtgctgcacggcccattcaatatggaagcacggctgatggccggttttgatgccgacgagctgcaatcgctgtgcgatgccgctgaagcggcttctgcctgagcttagccaaacggcagcagttgcagttgcccgcctgtagcgcgggcataaaagaagccttcgccataccagtcgcccagcacgatgcgctggcggccttggccttcgtcatggatggccgggcggtgggtatggccgtgaatcatgtgggggatgccaaagcgctcgaaactggccgtcacggtggctggactgacatcggtaatcgcctcggcgctgccatgggtttgtagctcgccataacgggcgcggctggcctggcgtgcctgctgggcaaatgccagacgtgcagccagcggctgggcaaggaaatttgcctgccaggccgggttgcggctcatggcgcggaattgctggtaggccgtatcgtcggtgcacagcaagtcgccatgtcccagcaagatgggcatgccttgtaccataatcaccgccgggtcgggcagcaggcgcatccggcaacgtcgggcgtaatcttcgcccagcaggaaatcacggttgccgtggatgaaatacagcgccgtgccacgcgcagcagtttgctgcaatagttcggccacttctgcaccggtagcgctggggtcgtcgtcgcctacccaggcttcgaacaagtcccccaggatataaagcgcgcgggcatgggacgcttcttcatgcagaaaacggcgaaatagcgccgtggtttcggggcgggcatcttccagatgcaggtcggaaatgaagaaagaagtcatagtgttcgattgtgatggttcaagcagagcgtggccgcgaagtagtggctcgaccctgatacgggcaaaaacaaaggcaccgcatgcggtgcctttcatttggtgcatccagcttggaaaccaagcatcggcttgttagcggccagagcacaaatcccagtgaactagaggttgcaaacttaacatgctttggccggaacatccacacacatgccatcttggggtgagcaggagtgatatggaattctataaaaaatttctatccacacagaccccctactattgagtcgtgtgcgactgctgtctatattgggcaggcagtttgggaggagatctggggactgtgcgccaagctggcctcttctttcataaaactcatgcagaaatatttgcaatggggaattgagttcatgtcgaaaagaaaagctgttcattaccgtttggccttggatcttggctcaacttcgttgggttgggctgttctgcgcttggatgccaaagaccgacccagtgccatcctcaaggctggcgtgcgcatcttcagcgatggtcgcaaccccaaggatggcgcctcactggccgtgacccgccgcgccgcccgcgccatgcgccgccggcgcgaccgcctgctcaagcgcaaggcgcgcatgatgaacaaattgatcgcgcatggtttctttccacaggacgtggtcgcgcgcaaggcgcttgaagcgctcaatccctaccagttgcgcgccgagggcttgcagcgtgcgctgacgcccggcgaattcgcccgcgcgctgtttcatatcaaccagcgccgtggctttcagagcaaccgcaagaccgacaagaaagacaacgaaagtggtgcgctgaaaaccgccatttcccaattacggcagactttggccgagagcggttgccaaaccgtgggtgagctgctgtggcaacgcctgcaagccggccaaggcacgcgtgcccgctaccgggaaacgcgcatcgccaccgagacaggcaagggcaagatcgacaaaagctacgacctctatatcgaccgccagatggtggccgatgagttcgatgcgctgtgggccgtgcaggcggccttcaaccccatactgttcaacgagcaagcacgggccgaactgcgcgacaccctgctgcatcaacgcccgttgcgcccggtcaagccggggcgctgcactttgctgccggaagaagagcgcactccgctggccctgcccagcacgcagcgttttcgcatcctgcaagaggtgaatcacctgcgaatcctgcacccggacttgcgtgaagaagcactgacgctggatcagcgcgatgccatcgtggccttgctggaggacaggggaaaagtcacgttccaggccatgcgcagaacactcaacctgggtgatgccgtgcaattcaatttggaagatgccaagcgccgtgaactcaagggcaatgccaccacggcggcactgtcgaaaaaggaactgttcggcgctgcgtggcgcgactttgacgaaaccctgcaggacgacatcgtgctgcgcttggtcaccgaagaaagcgaagccgaactggtgcaatggctgatcgaaaacaccggcgtggatgaggcacgcgccacggccattgccaacaccggcctgcctgaaggctacggcagcctaagccgcaaggcactggcgcgcatcgtgcccgcgctgcgggccgaggtcatcacttatgacaaggccgtgcaggccgccggctttgcccatcacagcgatttgcgattcagtttcgagtacgacagcgccgatgtggagcaggtgggagagcgtatcgacaaaaccaccggcgaaatcctgcctgtgtctgccttcaaacagttgccctactacggcaaggcgctgcaacgtcacgtggcctttggcagtggcaacccgcaagacccagaagaaaaacgctacggcaagatcgctaaccccacggtacatatcggcctgaaccagctgcgccgcgtggtcaacgatttgatccgacgttatggtcggccaaccgaaatcgtggtagaactggcgcgcgagctcaagcaaagccgtgagcaaaagctggaggcgcaacgcaagcaagccgacaaccaaaagcgcaatgcgcgcattcgcgcggaaattgcgcctatcttgggcatcagcgaagagcgggtgaagcatgcagacattcagaaatggatcctgtgggaggagttgagctttgacgtcgccgaccgccgctgcccctacagcggcgtgcagatcagcgcgcgcatgctgctcagcgatgaggtggaaatcgagcacatcctgcccttctctcaaacgctggatgacagcttgaacaacaaaaccgtttccatgcggcaagccaaccgcatcaaaggcaaccgtacgccttggcaggcgcggcaggacttcgaggcgcagggttggtcgtatgaaggcatgctgcaacgcgccgaacgcatgccccgcgccaagcgctaccgcttcgcatccgatggttacgaacgctggttgaaagaagacaaggattttctggctcgcgcactgaatgacacgcgctatctctcgcgcatcgcccgggattacctcacccttgtctgccccggtggtgtgcgggtgattccaggacaaatgacggccttgctgcgcgccaagttcggcttgaatgatgtgcttggcctgcatggcgaaaaaaaccgcaacgaccatcgccatcatgctgtggatgcctgcgtcatcggcgtcaccgatcaagccttgctgcaacgctttgcccaagccagcgccacagcgcgccagcaaggtctagaaaaactcgtggaggatatgcccttgccttggttcacttatcgcacgcatgtggaacgcgccatacagaatatctgggtcagccataagcctgatcatgggcatgaaggggaaatgtttgatgcaacgatctacagcgcatccggtcaaagccggatggccgcaaaagacaggaaagttctaccgttccacgcacgaccggaacatgcacacctgagtcgctatcgtgacaaaaacaacgcgccaaaaccctacaaaggcttgctgagcaatagcaactactgtattgaaattacgcggaacgaagaacgcggctgggaaggaaaagttatttcgacctttgatgcctacaagattgaaagagagctgctgcgcgcctacagaaataagcatggaaaaaatgccaagacactttccttgcttgaccttctcggcgatcatgaatcctccgacggccaacctttggtcatgcgtttatgcaagggggactgcatagctattggtcaaggaaagaaaagagaagtgctgcaagttttgaaaatcaacagctccggctcaatcacctttatcaagcccaacgaaaccaatatcagcgcacgctatcttgcaaaacttgcagcacaaaaagaccagaaggccggcaagctctttgatgaggcggcgttgaatgacgtgttttttcaaaaggctttttccgctggaagtttgttggaagccaaagcccgccgcgtcaccatctcgcccattggcgagttgcgcgacccgggcttcaatggctgagcaaggggcgtgacatgattggccgcattgtcgaaatcgcagacgaccggcgccacctgttcgtcaaccgcggcttcatggtggtacgcgataccgagggtgagcgcaaggagctgggtcaggtgccgctggacgacatcgccgccgtcattgccaatgcccacggcatcagctacaccaacaacctgctggtggctttggccgagcgcggcgcgccctttgtgctgtgcgcggccaaccacaatgccgtgggcatgctgctgacgctggacggccatcacgtgcaggccaagcgcatcgaagcgcaaatcgccgccagcttgcccacgcacaagcggctgtgggcggtcatcgtcaaatccaaactggaacaacaagccgccgcactggaagccgcaggcgtccccaccgcgcccttgactgcattggtgcgcaaggtcaaaagcggtgacccggaaaacgtcgaaggccaaggtgtgcggcgctactggggcttgctgttcggcaaggacttccgccgcgatcagaacgccggcggcctcaacgcccagctcaactacggctacaccatcctgcgctccgccaccgcccgcgccgtggtagctgccggcctacatcccagcattggcctgcaccacagcaatgacggtaatgccatgcgcttggtagatgacctgatggagcctttccgcccggtcatcgatctgaaggtctggcaattgcagtgtgccggcgaagaacaagtcacgcccgaagccaagcgcgccctggtgcacacgctttacgatgacatgcaaagcagtgccggtgcgacgccggtgatggtttgtatgcagaaattggccgtctcgctagctcaggtgtatctgggcgaacgcgacaagctggaactgccgctgccgggtctgccgctcgctttggccaaaggtctggattcaggatgaccccatgccatgctctccggataccgactgatgtggatgctggtaatgttcgatttacccgtgctcagcaaagccgagcgcaaggccgccaacgatttccgcaaatcgttgctcgacatgggtttcgagatgagccagctcagcgtctatctgcgcttttgcaccagccagacccagctggacacttacgctcgccgagtcgaagccatcctgcccagcggcggcaaggtcagcgtgctacagttcaccgacaagcagtacgagcgcattctcaccttccatgggcgatccagacaggccccgcaaaaggctccggatcagtacagtctcttttaaaaaactatgttttcgaccggcaaaaaagcagaaaacccattgaaaaacaatgggttgctgctgagagaattatagctcactgggatttgtgcactggccggaactgtcgagcgtattgacagtccgaataagttattatagctcactgggatttgtgcactggccggaacttgtagccgtcgttcttggtggcttggacgattatagctcactgggatttgtgcactggccggaacacgggatgttgtcccccgtgctgtacaacgattatagctcactgggatttgtgcactggccggaactgtctgccgacagcacagcacggctcacaattatagctcactgggatttgtgcactggccggaactccttggcgggtggtggttaaaggccgcccattatagctcactgggatttgtgcactggccggaacttccggcgagagttcctcatccttctctcgattatagctcactgggatttgtgcactggccggaacacggtgacgcttcgatagtcgcaggatttgattatagctcactgggatttgtgcactggccggaactggcgtaccggaacgtgcgcggagtagcggattatagctcactgggatttgtgcactggccggaaccggataccagcggaagccgtcctcgcgcagattatagctcactgggatttgtgcactggccggaacgtgtattgacccaagcatcccatagtcctcattatagctcactgggatttgtgcactggccggaactctaacaacgctcgttgggcgattaaagtaattatagctcactgggatttgtgcactggccggaactgcagggcatagcgcacggcgttgacgcggattatagctcactgggatttgtgcactggccggaacctcttctgagagtagttgcgcaatctgttattatagctcactgggatttgtgcactggccggaacctcttctgagagtagttgcgcaatctgttattatagctcactgggatttgtgcactggccggaacggggtttcagcacggctcactgcgaatacaattatagctcactgggatttgtgcactggccggaacagaagcaacatgttctagttcaagttttagattatagctcactgtttgtgcactggccggaacccgcaggtattccagggcaccagcggtgaaattatagcttactgggatttgtgtactggctggaagcggttttttggcttggtgctggcttttattattgtttactggtgtttgtgtggtgagtggggtcgggggtattatgggtttttattttgttttgataaattttattttaattaattattgggtttaattggtttctggttttgtttctttggggtggtatatgaactacaatggctttccctgttcagaatgactcgatcatgaccatccgtacccgctttgcgccttctcccactggctatttgcatatcggcggtgcccgtaccgccctgtattgctggctggccgcgcgccgcgccggggggcagttcgtactgcgcatcgaggataccgatcgcgagcgcagcacccaggcggcgattgatgccattttgcaggcgatggattggttggggctttcttatgacgaaggtccgatttatcaaacgcagcgccttgagcgctacaaggaagtggccgagcagctggtagccgagggcaaggcctactacgcctacgaaagccgcgaagaactcgatgccatgcgcgaggcggcgatggccgctggcgaaaagccgcgttatcgcggcaaataccgggatgaaaacgcgccctggcgggatgatcccaaccgggtgattcgcttccgcaacccggacagtggcagcgtggtattcgatgacctggtgaaaggccgtatcgaatggcagaacagcgagctggatgatttggtgattttccgccccgatggctacgccacctacaacttcgcagtggtagtggacgatatggatatgggcatcacccatgtggtgcgcggcgatgaccatgtcaacaatacgccccggcaaatcaacctgtatcaggcgctcggcaaaaccccgccggtatttgcgcatctgccaatgattctggatgaggccggcgccaaactcagcaagcgcactggcgcggccgatgtgatgcagtaccgcgacgccggttatctgccgcatgcgctcctgaactatctggtgcgtctgggctggtcgcatggcgatcaggaaatcttcaccatgaacgagatggtggcgctgtttgacctcaaggatgtcaatgccaaggcctcgcgtctggatgcggccaagcttggctggctcaaccagcaatatctgaaaaacgatgcgcccgaagatgtggctcggcatctgcaatggcatcttcagcaatgtggctacgacctgcagcaaggcccggcgcccaaggatgtggtgatcgccctgcgcgagcgggtgcagaccttgaaggacatggccgagaaggccgcagtctggtaccagccactgagcgaatacgacgaggcggcggtcgccaagcacttggtggaaagcgcgcgtgcgccgctgactgcggtgcgcgagcaattggcagcggtgagcgactggcagcaggaagccgtggcagcggcgctcaaggccaccgcagcaaacctgggacttggcatgggcaagattgccccggcgctgcgggtcgccatcaccggcacccaggtcagcccggatatctcgcataccgtgtatctggcaggtcaggccgaggcgctgcgccggattgatgcggcgcttgccaaaatcccggcttgagtcaccggacagctcgcggcatcatgcctgtatgagccagacgcatttgcactgtacttcgcccgagcaccatgtccacgacgcggcggacttcatcaccgccgttgagcgcgcctgtgcgcagcgcggcctgcggctgacgcccatccgggcgcatgtgctgcgcctgattgccgaagaaactggccagcccatcaaggcatacgacttgctggagaaagtgcgcttgagcgatggccccggcgcggttgcgccgcctacggtgtatcgcgcgctggattttttgatgatgaacggctttgtgcacaagctcgaatccatcaatgcctttgtcgcctgccatcatcccgatagcgcgcaacattcggtgccgttcctgatctgtaaccgttgccaccgcgccgtggaaatggaagatgccgaaatcgtcacggcgctggagtcgcgcgcccgcgcactgggcttcatgccgcagcggcaagtgctggaagtgcacggcctgtgtgagcgctgcgcgggctaaccagagcggccttgcaagataggcggttgctttgagctgatccagcagctccgattttgatgtaatgaaaacggggcgcagattgcgccccgtttgttgttggcgaggcttctgtcagaagaagaagcgtacgcctgcgctgtaaccacggccttgcagcggcgccaagtctttcaggtaagaggtgtgtacacgggcttccttgttgagcaggttgcggccatcgacaaacacttcccagcctttgccgttactggtgtcgccatgccatgccaaatgggcgttgacccaggtgtagccgacggtttcatgttcggtgctggctacgcggtcttgcttgaaggtacgggtggcgcccagggcagcgcggaacaccgggctttcccagcgcagttcggcgccggcgcgcatcggtgcgatgcgcggcaggttgccgccgctgttgagcaaggcacggtggttgtggatatggtcaccatgcacgatgggagcgcggacaatgcggctggcatcattcttcacccgaccacgtacgctgtcggcaaacaggcgcaagtcaaaatggccggttgcgctatcgaccagcgtgaacagggcatcggcttcaaagccgtggaagcgcgcatcatcctgcacccatttcatgaccggaatgccgccatcggtgagctgtgtgccaggacgacgcaggctctcaaggccggaaagatagatatagtcccggtagtcggtgtaatacacgctggcgcccagacgcacgcgaccggtctgccatttgccgcccaattcgatgcggttggcggtttcagctttgagtttgtcatcacccacttcaatcacgccggtggccacatgcacgccgttggcgaacagctcttcgatactcggtgcgcgctgggcgcggtcaagacccagatggaattgcagtgcatcccccgcattccaacgcagtgcagcagagaagtgattggtattgaagcggcggctgtccacgcggccaggcagcagcggctgcgactgggtttctacgcgattgcggtcatgacgtgcgccaagctccagctttactgcgccaaaatcgcgctgccccatccagaaaaagccggtatcgcgcattttgcttggttgcacaaaagcctcgtcgccctgcgctgcaaagctgcggcgcgtagcttgcagaccgaaggcgccttgccagccggcgaagtcctgatgcaccagctccacgcggccttcatggctacggtttttgaacagtgtgccgatatgttcgccttcagattcggtatgggtgtagtcggtatgcgcgtacttgaagcgcagggttttgaagacgccaagatcattcaaaccaccgtgcagctcatggcggcgctggtcgaggtggatggcgaccccgtgctcgtcatgatgatcttcatggtcgtgctcatggccatgtccatgcccgtggtcatgcccgtggccatgatgatggtcatgctcgatatgctgatggcctggcacgccatagcgggtgttgtacaggctggtattgatgccgaaatggccacgttcgccgatatagctcacgccaagaccggcactggcggtgcgggtggcactgttggcgagtttgccccagttgtcggcatcgcgttcttcgccgtgttcttcggcgtgctcggcgctgacggcatgtcccgggattttgatgtcgccggtctcacgcagcaggccatcggcatggaacacccagccgctgccagtgtttgtggtgctgccatcaaggcggaacatgccggtgcgctcatcattgacattgccgccgcgcagctccacgcggccggagaacggtgagtcgcgcagtgcatccgggctgcggccatccaccacattgacggcgccgccaatggcgccgctgccgtacagcagggcagctgggcctttcaatacttcaatacggtcggccataaacggctcgatgctgaccgcgtgatcaacgctgacggtggagacatcgccactgccggtgccgctgctcaatacctgtacgcgcgcgccatcgaggccgcggatgatcggtcggcccacaccggggccaaagtaggagctttgaatgcccggcaggcgctcaaggctagccccaagggtggcggccttttcttcatcaagacgctcgcctgccagcacatccaccggacgtaccaagtcttcggccgtttggtgcagtggcgtagcggtgactttcaccttgtccagaagatcatgcgccgggctgcgatgctcgtcatggctttgggcaaaaccggtagccgggacggccagggcaagcagtagcgcatgggtcaaaagatggcgacgcggggggagggggaggattttcgtcatgctttgttgtagagtagtggttacaaggtagcaaatgttatattgttccctgtccttcgggcaagggttgcgccaaggtcattgatgtgccgtttgccaaatcaggcgtgtaaccggtggatttgcaagggctttatgcgcaagaggcagtaaagggtggggctaccttgacacttatcacttcgaggcttggactgaccaacatggcgcaatcaggaacacgtttgcaaacggctgaccgcatcggttttgccgcatccatgctgtgtgcagtccactgcgctgcattgccgatcctgatggcattgctgccggcgctgggactgggcagtcagggctgggtggatattgaccagggcgtggtggtgttcgccactgtgctggcggccaccaccttgacgaccggctggcgccgccatcgtgcctaccatgcctggggttttttgctgccagcattgttgctgctatggttgggcgccttcgggccgttccatgcgcatggggatgagcaaccctatgcctggctgcactgggggctgatggtgccaggtggggtgttgctggcgttggcgcatttgaccaatatgcgtctgacgcatcgtgccgggatgctggcagttacaaaaaatcagggctgattgtcacttggctttatgctaggcttggcgtttacttttcatccctgcgcggctgcgcaggacaactactatcaggagcaatcatcatgggcaaaggcgaccgcaagaccgccaagggcaagcgttataactgcagctacggcaatgtccgtccgaaggccgtcaataaggctgcgggctctgcagctgccccggtagtcaagaaagccgcaggcaaaaagactgtgaccaagaagaccagcaaggctgcttgattggattgcaggcaaattcgattagccgacgccccgcaaggggcgttgtgcattttaggagagcctgtttgctatcaagcgcgcgaaagaatggagcctggaggctccattcttcacacagccggtttgcggggtgttaccactggaagcccaccttggcatacacataggcaccgttgaagccgaaaggtgaaaggttgctgtaggggaactggccgttggtggagttgccgaaaatgctttcatccgggtactcgttcagcacattgtctgcgcccagggtgaacttccaacccccgtgcttgtagctgacggcgacatcggccagccatttggcggcataggtttggtcaagcgcggggttgttcggcgtggtgctgacgctgccatagcgggtagcggccagtgacagctcccacaggtcatgattccactgcccggcaagcagcagtttgttgcgcgggaagcctttttcaatacggccgcgctctacccggtcaatacgctcaaggttcaggccattgctttccagttgctgcgggttggctgccacgcgcaggatttcggtcttgctgtggttatagcccagggtgaagtccaggctgctttgggcaagctgccagcggtagctgcccaccacgtccacgccgcggctgcgggtgtcgatggcattggtgaaatagcggccgccattgacgccataaatgccctgtgattccagcagggcgcgcacgcccgggccggtcaggttggaggagagcacgatacggtcatcgacatcgatttgataggcgtcgatggtgaggtacaggccgttggccggttgcagtaccagcccgaggctggcggatttggaggtttccggcttcagcggttcggagccgaaggcctgcgcgaccttgcttgaggccgggaaggtgcggacttcaaacggcgtggcgatacccggcagataaatggtgctgatggtctggaagtattgctgcggcagcgacggggcgcggaagccggtggcaagcgtgccacgcagggcaatggccgggccaaattcgtagcgtgccgagagcttgccggaagtgtggttgccgaagtcgctgaagttctcgtaacgcaccgcgccgcccagattgaacttttcggtcaaatccgcttccacgtccagataggcggcatggctgcggcggtcgtaatggcctgaaacctgcggcgagaagccggcaaagccctgtgcaccgccgggtttgccaagatcaggttgcgcataggagccgtattcgcccggtgactggttccatttgtcgtagcgatattccaggccgaaggcgatattcagcggtgaggccaaccccatttcaaagcccttgcggaagtccagattggcgacattctgggtggtttccagcatgccgtcgtaaaactcgcgcggcgaggcggcgccgaggctggcgttcagggtgttgcgggtatggaacagcagctggttatggccgtagttatagctgaagtcccagtcccaatcattgccgaatacgccacgcataccgatgaccgcggagcggtctttggagatgttgttgatgctgggcagatagccatcgggataaatcgagcggatgttctgccgcaggttgcccggcgcgcggaagaaggcgtaggaagtgatatcgcggtggctggccgtgccccagccatacacgctgagattgtcggtgatgtcaaaagcgctgtttaccgataccgcgccaaaatcggcgccggggtcgccaatcacgaaggccttttggccgaccgcaggctggttggggctgggtgcgccggcataggggcgggcgcgatcggtacgctcctgggtgccgatttgcgccgagatatgggcaaagccgcgattctcgcccagggaaagcccggtattgccggccagctggaattgctcgccatcgcctgcatccatcttgccatggctgaagctgacgctgccgccgcgtgctgcgcttttcagcaccacattgaccacgccggcaatggcatcggagccgtactgtgccgatgcgccatcacgcagcacttccacgcggtcgatggcggaaatcgggatggtattgagatccaccggc

SEQ ID NO: 1807 - DNA, 23225 bp, synthetic construct
  source 1..23225: mol_type = other DNA
  misc_feature 1..23225: note = Synthetic
cctacggtgcgcccgccaaggccgccacgctgctcaactacgccggtgtgcgttccgactacatcgagtacacggtcgaccgcaacccgcacaagcagaaccacttcctgccgggcacgcagatccccatctacggccccgagcgcatcctcgagaccaagcccgactacctggtcatcctggcctggaacctgaaggatgaggtgatgaagcagatgagcgccatccgtgaatggggcggccgcttcgtcatcctggtgcccgaagtccagatctacgactgaccgtcggcagggcaggccatgcaaaggcctgcccgccacccgggcatcccgtctccttcccagattgccatctccgtcaccatgacccaagccatcgtcgtcgaatcggccgctgccctggcccgccaggccgaagggcagggcgctgccatgcacgccttctgcacgcagctctatcccatgctgcgcagcatcaccgggcagggcgtgcgtgacaccctggccgccattggccagcacatcccgctcaccgtgaccgaagtgcccaccggcacgaagatcttcgactgggaagtgccggccgagtggcaggtgcggggtgcctggatcaagggaccggacgggaagaagatcgtcgacatcgccgagcacaacctgcacctggtcaactacagcgccccgttccggggcacgctgtcgctggaagagctgcgcccgcacctcttctcgctgcccgaccggccggactggatcccctaccgcacgcagtacttcaagcgggactggggcttctgcctgaccgatcgccagctgcagtcgcttccgccgggcaactacgaagtgtgcgtggacaccgacctggtgcagggctcgctcactttcggagagtgcgtgctgcccggcgagagcgccgaggaagtgctcatctccacccacgtctgccacccctcgctggccaacgacaacctgtcgggcatctccaccgccacctggctggccaagacgctggccgcgctgcccaagcgccgctacacctatcgcttcgtgttcattccggccaccatcggcgccattgcctggctgtcgcagcgacaggacgtgacgaagcacgtagcgcatggcgtggtcatctccggcgtgggcgatgccggcgactaccactacaagcgcagccgccggggcgatgccgagatcgaccgcatcatggcgttggtgctggccgaaagccgcgagaagcaccacctgctgcccttcatgccctacggctacgacgagcggcagttctgctcgcccggcttcaacctgcccatggggtgcttttcgcgttccacctatggcagctacccgcagtaccacacctcggccgacaacctggacttcatccgccccgagcacctggagcgctcgctgggcctgctgctggcggcgttcggcatcgtggagcgcaacctcagcttcaacaacctcagccccttcggtgagccccagctgggccggcgcggcctgtactcgctcatcggcggacacaacgaggggcagaagctgcagctagcactcctgtgggtgctgaatcagtccgatggcagcaacagcctcctggacatcaccgaaaaggccggactgcccttcgatctggtccatcaggccgccgaagcgcttctgcacaaccagctgctggaagtcgttgtaaggtagcctcagatctcgttgtttcgttgcagtcgatgccgtaatgttcagaatacgctccgacttccctatctcctcgccggtcgacatcccatgaacagcacccagaagccgaacgtttccggcatggtggaacgcacctgcttcgacaagtccgcagccctgcgcaagaaggtccacgacaccattccgggtggcgcacacacctacgccaagggcgatgaccagtatcccgagcgctcgcccggtttcatcgagcgcggcaagggctgccacatctgggacgtggacggcaacgaattcatcgaatacggcatgggcctgcgcgccgtcaccctcggccacgcctatccgtccgtcatcgaggcggcctaccggcagatgcagctgggcaacaacttcaaccgcccggcccccatcgagctggaatgcgcccagatgctgcagtcgctggtgtccagcgccgagatggtcaagttcgccaaggacggctccacggtgctgaccgccgcgctgaagctggcccgcgcctacaccggccgtgacctggtggccatctgcagcaacagccccttcttctcgtacaacgactggttcatcggcaccactgccatggacggcggcgtctcgcgcgttgaagtcgaactcaccgtcaagttcaactacaacgacatcgacagcctgcagaagctcttcgagcagtacccgaaccgcatcgccatggtgctgctggagccggcccgtaccgaagagcccaaggacggcttcctgcagaaggtcatcgacctggcccacagtaatggcgccctggtcacgctggacgagaccatcagcggcttccgcttccaccaggggggcgcccagacgttgtatggcgtcacgcccgacatgtcgtgcttcggcaaggcactggccaatggcttctcgctgtcggcactcaccggcaagcgtgaagtgatggaactgggcggcctcttccacaacaaggagcgcgtcttcctgctctccaccacccacggtgcggaaggccccagcctggcggctgccatcgaaaccatgcgcatctatcgtgatgagccggtcatcgagcacctctaccatgtgggcgagcgcctgcgcgccggcatcgagcaggtcacggccgacttgggcgtcagcgaatacctgtcggtggctggccgcggatgcaacctgctgtattccacgcacgaccacgagcacaagccctcgcagccgttccgcacgctgttcatgcaggaactcatccgctggggcgtgctggcgcccagcttcatcgtcagctactcgcacagcgaggccgacatcgactacaccatcgaggccttcagccgggccgccaaggtctacaagaaggccctggaagctggcagcaccgatggcctgctcatcggcgcccccaccaaggtggtctaccgccgctacaactgatgtccgcgcccatgcgtcattttgatgacgcatgaacgacccaaaaggcccggcctgccatgcagtgccgggcctttcgtttcaaggggggagctgtcaggccgtggccggctccagatacatcttctggatgtccggcggcagatgttccagcgtggtgccctgcagatagtcgttgatcggcgagcccgtgcagcgcgagtccacgttgggtgcaccgtcacgcgcacgcagatccttgcggttcaccacccggaaatcgatcgagaagcgcgtctcgcccgtctggttcggaatggacgaatgcaggtgtgccgcggcaaacagcagcatgccgcccggcggtgtcaccaccgtcacattcggttccagcttgatgtcttcctgcagcttgggctgcggccgcgtgtccttgttcacgtgcgtgaccgcattgaaacgctgcctggcattccattcctggtagttgtagatctcggaattgttcggcgtctcgcgcgcgaaccactccggatggaaggtcatggcgttgccgccgttcacctcgaagatcggaatccaccagttgatctggcacatcggcgccgaataccaggtgtcgcggtgagcatggaaggcataggcgatgccgctggtgaggtaattgtggctggtggacgtgcgcatgcgcggcacgtcgaaataggtctcttccagatcacagccgatgtactccatcatcttcgggatgatgcgcttgcattccggatgatggatgaaggccggcttgagcttcgagagaatctcggcgaatttctcgaccggatagtggtcctgcgccgtgcgcgggtccagaccagggaaggcctcggcaatcagcttgcgggccagctcgatcagcgccagcgaatgctcattggcggaatacacgaacaggtcgccgtcgtagatcatcttgcggcggctgtcgtcgtcgatcttccggtcaaagtagacagtggtcatggggcatgttgttgcaattcacacgatgcccaaattctatgagtgaggtcttcggtgtttattgttacgccatgtacagcctcatcgggggcaaggcagtacttgaatatcttccgttaacctgttgaagaaaaagcgtctatttcggttccatgtcttgcgcaagcagggccaacctatgcccgtaagcgaaaacgggtatcaagccggaaacctttggcagggcagggaacctgccaagaaaaaggggcggtatgcccgccccctttctgctcacgcaatggtcgtcctgatgcttaccaggacttccagggcgccttgcccgaagcccacagctcttccagaacgtgcttgtcgcgcagcgtgtccatcggctgccagaagccggtgtgacgccaggcgtgcagctggccatcggcggacagcgaacgcatcggctcctgctcgaacaccgaatcgtcaccgtggatacggtccagcaccttgcggtccagcacgaagaagccaccgttgatccaggcgccgtcgccctgcggcttttccatgaacgaatcgatcagcgtctgatccgcctgcaggctgaacgcaccgaagcggcccgggggctgaacggccgtcaccgtcgcttccttgccgtgcttgcggtggaactcgatggtggcggtgatgtcgacgttgctcacgccgtcgccatacgtgcaaaggaaggtatcgcccttcacatacttggcggcgcgcttgatgcggccacccgtcatcgaatcctgacccgtctcgaccagcgtcaccgaccagggctcggactcgttgcggtggatctgcatctcgttcgtgcccaggttgaacgtcacgtccgcacgcgagatggcgtattcgtggaagtactgcttgatgatgtggctcttgtagccgcagcagatcacgaagtcattgatgccgtgcgaggcatagatcttcatgatgtgccagagaatgggctgcccgccgatctcgaccatcggcttggggcgtaccgcgctttcttcgctgatccgggtgccgaagccgccggcaagaatgaccgcttgcatggtgagcgtagtcctcgtttgtcgatgcaactgacatagtcgcctgacgccgcaagggcgtcaaccggaagcgacacctatccgccggaatgcagccagaaagcgatgaaatgcgtactcagtccagaagtgccgtggcaaattcgcgcgcgctgaatgcctgcaggtcttccacgccttcgcccacgccgatgaaatacaccggcagcgggttgtcgcgccgcgtgtgcgccagggccgcaatggcgccacccttggccgtcccgtccagcttcgtcaccaccagacccgtcagctgcaccgcctcgtcaaaggcctgcacctgcgccagcatgttctggccggtattgccgtccagcaccagcagcacctcgtgcggcgcaccgtccatcgccttgccgatcacccgacggatcttcttcagctcgtccatcaggtgacgctgcgtgggcagccggccggccgtgtccaccatcaccacgtccaccttgcgcgcctgcccggccttgatcgcatcgaaagccaccgcagccggatcgccgccctcgttggcaatcacgtgcacctggttgcgctcaccccagcgcgccagctgctcgcgcgccgccgcccggaacgtgtcgcctgctgccagcagaaccgactgatcgatctggtgcagatggcgcgccagcttgccgatcgacgtcgtcttgccggccccgttcaccccggtgatcatcatcaccagcggatcggcccggtccacgtcgatgggcttctccagcggcgacagaagctccgtcaggatgtcgatcagcgccgtcttcagcgtcgccgcatcgttgatccggtcgcgctgggcccgctcgcgcagctcatccagcagccacgtcgtcgtgccatagcccgtgtcactggccagcagcgccgtctccagctcctcgtacagcgtctcgtcaatccggttgcggctgaagatgctgcccagctgcgagcgcgtgcgcgccagccccccgcgcagccgcgcgaaccagccagcccgcgccggccgcaccgcctccggcatcgcctgcgtgggcggcacgatctcgctctcgccataggtcatgggctcgccggtagctggggcacctgcatcctcggacgccgccggagcggacggttcttccggtgcggacgccaccgcctccggtgcagacaccgctgctcccggtgtgggtgccttcatggccggtgcggacaccacggcttctgacgcagatgcttccgccaccggctcggcttgcacctggggcaccacggcctcgaccaaggcagcggcgtccttcgcggcaaccgtttccttcagagcaggggctgcctcgaccggcgtgctctgcggccgtggtgcttcggagacctcgaccgatggcacatgtggcacacccgccaccggcgcctcggccctcggcgtcggcatggcattcggacctgcttgcggcaaggccgaagaaacctcggtgggtgccgccgctggctccgcaacggtgagatccccggcagtaccaacgccagatgtttccgccgctacagcctgtccggcctcgggctgcggctgggcaacgccctgcggctgcagcacttcgggtgcctgtgtgctgcccgccggctcaccgccttcggctgacgccccggccggctctgcagcagcctcttcagtggccgcaaactcggccgcagcggcctgggctgcggctgcatcttccttctctttcttcttgcgacggaaaaaaccgaacatgtcgtgcgtcctgtatgagtctgctgcagtgtgggttgctgcaattctagagcctgtccgcctccgccagcctgccggatatcggcacccagggacaaagcgggcccagggggcagagccggtaaactaacggcttccttccgagtacccctccatgtcctcccgcattcgcatcatcggcggccaatggaagcgccgcctgctgcccgtgcccgactcgccgggcctgcggcccacccccgaccgcgtgcgcgagaccctgttcaactggctgggccaggacctttccggctggcattgcctggacctcttcgccggctccggtgccctgggcttcgaggccgcctcgcgcggggccgcccgcgtgctgatggtcgaacagaaccccgccatcgcccgtggcctgaacgccagcgtccagcagcttggggcagggggctgcatcgaagtcatccgcgccgacgccgcccgctggcttgaccagcggccgcccctgctgcaggatttgagcctgctggacccccccttccgggccggctggctgccgcgcatcctgccggccgtcctgccctggctggcgccccacggcctcgtctacgtcgaagccgatcacgccatcaccgacgactggctggcccagcagggctgcaacagcctggccgtcatccgcgccggcaaggccggacaggtccattatcagctgcttacctccgaaccatgtccctcgtcgtctaccccggaaccttcgacccgctgaccctgggccaccaggacgtcgtgaaccgcgtcgccgcccatcacgaatccgtcgtcgtcgccatctccgacagccgctccaacaccctgttcaccatggccgagcgcgtcgacatggccaaggccatcctggtggggctgcccaacgtgcgcgtcatgtccttctccgggcttgtcaccgactttgcccgcgacatcggcgccagcctcatcgtgcgcggcctgcgtgacgccagcgacttcgactacgagcgccgcatggccagcctcaaccgcatcctgcagcccaccatcgacacccacttcatcatccccgacgaccgctaccagtccatcaccggaaccctggtgcgggaaatcgccatgatgggcggcgacgtgcgcgccttcgtcaatcccgtggtgctagccgccctgcaggaaaaatacctcaagcgccagcaggaaccgcgcaaggagagccgctgacatggccctcatcatcaccgacgagtgcatcaactgcgactgctgcgaacccgaatgccccaacgaagccatctccatggggcccgagtactacatcatcgaccccaaccgctgcaccgaatgcgtcggccacttcgatgaaccccagtgcgcccagatctgccccgtcgagtgcatccccatcaacttcgacctcaacgagagccgcgaacagctccacgccaaatacctgcgcctgcaggaagaaaaagaggcgctcaaaggcaccgtcctgaccggcgccgatggccagcccggacggatgtctgccgacaacccggtcagcggttgatcagcgtgctcttgccaaacaggctctccaccagatccaccaccagctctgccgtctgattgcggatatccagcgccggattcagctccacgatatccagcgacgccagccggcccgtgtccgcaatcatctccatgcacagctgcgcctcgcggtacgtcggcccgccgcgcaccgccgtccccgtccccggcgcaatttccggatccagaaaatccacatcgaagctcacgtgcagatgcgtgtccgcatccacatccgccagcgcccggtgcatcacctcgcgcatgcccagctcatcgatcgcacgcatgtcgaacgcccgcagccccagctgacggatcatccgcttctcgtgctcatccaccgagcgcagccccacctgacagaaatgctctgctgacagcgccggcgtctgtcccgaaagcccgatcagcggctgcggccccagacccagcagattggccaccggaatcccgtgaatattgccactgggagaaatatccggcgtattgcagtccgaatgcgcatccagccacagcacccgcagcttgcgtcccgacgcgcggcaatgacgcgccaccgcactgagcgaacctgccgccagatgatgatcaccccccagcatgatcggcgtgcgaccttcctgcaactgcgccagcaccgcatcgtgcaccgcctgcgtccagaaaaccgcctccggcagattgcgcagccccgccgccttcggatcacgcccgccgcgcggattcaccggccccgccagattgcccgtatccaccacatccacccccagcgcccgcagcgccgccggcagctgcgccacccgcaacgtatccggccccatcgccgcccccagacggctggctcccacgtccgtgggggcaccgatgagtgcaacccggtgggtggttggaggggtgagggaggaatcggtggtgggggtgaggggcgtggacatgaggccttcctgggtttcagagacggaagggaacatagcacggatgggggcgtaagcgttccggttggatggcttgggggcgataagcgttctgatgggagcgctaactcctgttgagcgcatggccgctctcagtgtggcctgagcgaaaggcgactacagacgtagcggtggcgggagggcaaaggggctggcggcgactcttgcacgcatcggcagagtccaggccctcatggggcgccgtgcgcggaggagggggcgggaaacatgtaaagcgttgcccgaaaaagacgaaagccccatgtaggggctttccattttgtgcatctagctaaaaagcatcagcttgttagcggacagagcacatctcccagtgatcggagtgaggtcatcataacagagcgccgggaaatgacaatatccgggagcgagcggtggcttctggccgacgaacggtgggtgtgttggtttgccccaaaccctctattgccgttggtagcctgccggaatacattcgtctgaaatatgtggatgggcgccagaacagacgcccgtaagagacaggatgtgagcggcatcatgaaatatcgtctgggtatcgatctgggtagtacctctctgggatgggcagtcttccggctgaatgatgaagggctcccggtagccttgatcaaggcaggtgtccggatatttcacgacgggcgcgaagccgccaagagcggaggtgtgggtgcgccgctggcggtgaagcggcgcattgcgcgcggattgcgccggcggcgtgatcggatgctcaagcgcaagaagcgcctgatgaaccagctcatcgcgtttggtttcttcccggaagacaaggaagcgcgcaagcggctggaaacgctctatcccaatccctatgcgcttcgcgcggctggagttgagcgggcgctgaagccggaggagtttgcacgagcgctgttccacctgaaccagcgccgagggttcaagagcaaccgcaagctggacaaggagcccgatgcgggggctggtgctgacgttgtcaagaagtcctcggaagagtccgccatgaaagcgggcatcagcgatctgcgcaagacgctgaaggaacgccattacaccgcagggcagctgttcaatgaacgcttggggcagggggagcaggtccggaaccgttcggttctggtcaccaaggggggcaaggagcagctcgaaagtacctacgagatgtccattgaccgccagatggttgcagacgagtttgatgccatctggaagacacaggcaggattcaacccaaccctgttcaatgacaaggctcgggatgccctgcgtgacacactgctcttccagcgcccgctgaagccgatccggcccggtcgctgcacgctgatgcctgaagaggagcgtgccccgcttgccctgcccagcagccagcgattccgcatctaccaggaggtgaacaacctgcggatctcggatgaccagatgaacgagcgggcgttgactctggaagagcgggacaaggttgtggccttgctggaaggacagggtgaaagcaagttcaccaacctgcgcaagctgctgaagctttcgggaacgacgcacttcaacttggaagacggaaagcgcgatcgtctgaaaggcaacgctgtcagcattgcactgtcaaaaccgaacgcctttggtgatgcgtgggcctcgttcgatgagcatctgcaggacgagattgtctggaagctggtggatgaggacagcgagaaggttcttgtggactggcttgtggccaccacgaaggtggatgctgagcgtgccagggccattgcccgggtgcggctgcctgaaggctatggaaacctgagccgcaaggcgctggagcgtgtcgtacctgaactgcgtaagggtgttgtcacgtacagtgatgccgtccaggcggccgggtttgaacatcacagcaagctggggtttgactacgctgaaagtgatgtcgaggcgtacatcgacccgctgaccggagaacagcttgtcgacccggaaaccggggagataaaggtcgtcttcaagtcgcttccctactatggaaagcccttgcggcggcatgttgctttcggcacggataacccgaaggaccccgaggaagttcgatacggcaagattgccaaccccacggtgcatattggcctcaaccaggttcgccaggtggtgaatggactgatccgcttctatggacgccctgcagaggttgttgtcgagctggccagggacctgaagcagagcaagaaagagcgcgaagaagagcagcgggagcagaagcggaaccaggaccgcaacgagcggattgccaaggacatcgctgccatcctgaagattgatcccagtgaggtcaagaagcgggacatcgtcaaatggaagctgtgggaggaactgggtacggatgcagctgacaggtgttgtccctatagtggtcagcagatcagcgccagcatgctgctgtcggaccaggtcgagatcgagcacatcctgccgttttcccggaccctggatgacagcatgcacaacaagacagttgccctcaccaaggtcaaccgcgtcaaggcgaaccggactccgtatgaagcgcgagaggacttcgagcgccaaggttggaagtacgacgacatcctgatgcgcgtgaacggttttccccgtcatctgcaaagaaaggccaagcgcttcgcgccagatgggtatgagcaatggaagggtaaagagcaggacttcattgcccgtgcgctgaatgacacccgctacatgtcccgcattgccaagcagtatctggaactggtatgccccagaggtgttcgggtcatcccgggcggtgtaaccgccaagattcgtcatcaccttgggttgaatgacatcctgggagaagatgggctgaaaaaccgaaatgaccatcgtcaccatgccgtggacgcctgcgtcatcggagtggttgattattccttcatgcagcgtctggcaacggccagtgcaagggctcatgaacagggcatggatcggctgatcagcggttttgaacctccctggccaacctaccgggatcatgttgtgcgagccatcgacaacatccttgtcagtcacaagccggaccatggctaccagaaggccatgctggaggatacggcgcatggcattcgcaaggacgggaccatcaacccgagtcgaagctcaaacaaggcaaacatcagctttttgaaccctatctcagaacctgggcaagagcgtcgacatggggttgatgcggacgggaagtctttgccttacaaggggtatgtggggggaagtaactattgcattgagatctttaaggatgagaaggggaggtgggcgggtgaggttatttcaacctttgatgcttatcagatcgtccgaaagggtggagggttgaagcaaggggtctcgttgcttagaaacaaggcgtgtgcgcagaacggcaggcctttggtcatgcgactgatgattgatgatacggtgaagatggatgttaatgagttcgaacctaggactgtatttcgtgtcgtgactattttttcaaatggacaggtttttatggcacccattaatgaggctaacgtggatgccagaaaccgggacaagactgatccattcaagtacatatcgaagatggccggatcattcaaaaagtccaaagcacgacaagtgacaatttctccaattgggcgcctttcagaccccggcttcaaggaataagcagcatgatcggccgtatcgtcgagatagctgatgaccgacggcatctgtcggtcagaagaggcttcttggcggtgcatgttacgggggaggagcggcgcctggcggggcaggtgccgctggatgacattggggcgctgatagctaatgcacatggcatcagctacaccaacaacctgctcgttgcgttggcagagcgtggctgtccttttgtgttgtgcggagccaatcacaacgcagttggcatgctgttgcctgtcgaggggcaccacgttcaggccaagcgcatggaggctcagatcttggccggtctcccaacccaaaagcggctatgggcggccatcgtcaaagccaagctgcagcagcaggcggcggtgctggaggcactgggtgctccttatgcaccgctggattcactggttcggaaagtgcgcagtggggaccccgacaacatggaggctcaaggcgccaggcgttactgggggttgttgtttggtgatgacttcaggcgggatcagaccgctggtggtatcaacgcactgctgaactatggttataccgtactgcgcgccactaccgctcgtgccgtagtggcggctgggctgcatcccagtattggcttgcatcacagtaacgatgccaatgccatgcgtctggttgatgatctgatggagccgttccggcccatggtggacttccaggtcaagcaactggtccagcagggaaagacggaggtcaatgacgagaccaagcgatcgcttgcactggtgatgtttcaggacatgcagacggctgctggcgctacgccagtcatggtgtgtacccagaaacttgccgtctcattggctcaggtctatctgggagaacgtcagggcttggagctgccgcttcgtagcctgccgctggacttctctgccatgcgttcaaacggcggttgacatgctctcggggtacaggttgatgtggctgctggtgatgtttgatcttcctgtagtgttgaaggcggagcgcaaggcggcgaccgagttcagaaacaagctcctcgacatggggttcgagatgagccagttcagcgtctacatgcgattctgtagcagtcagaccgttgtggagacctattgccggcgtgttcaggagtgtcttccagatggcggcaaggtcagtatcctgcagctgaccgataaacaatacgagagaatactgaccttccatcgggggagcgttcagcccgcaggaaaagccccagatcagtttgcattattttaagttttagtggttttggatgttgcttggtggatgaatatgtgtcgcagtggtgagacaatgtcctgctgctcctgcctctttgagacccgtttcatgtcggcttcaggcaacaaaaaacccgagaactcggctttcaaaagacgctcggaaccagcccaagacgttctggagaaagctgaaattttcgggtctttttcaggaatattcctgaagtttcaacgggttagcgcggttggattctagatcactgggagatgtgcgctgtccggaactgctcggcgtaggccgcccccagcgcctgcattctagatcactgggagatgtgcgctgtccggaaccggattgtttgatggctgaaatcaaggtagattctagatcactgggagatgtgcgctgtccggaacggggcatgaccaactggcagatgatcatcgattctagatcactgggagatgtgcgctgtccggaacgcacacgcggaaaatggggcacatcgatcaattctagatcactgggagatgtgcgctgtccggaacttccgtttcagcacatacgagcggcaatcgattctagatcactgggagatgtgcgctgtccggaactcggctacatcgatcattcgcgcttgcgcaattctagatcactgggagatgtgcgctgtccggaacgtctgcaatcgctccaaagtcggcggcaaaattctagatcactgggagatgtgcgctgtccggaacctgaagttgccggcgacgctgaagctgccgattctagatcactgggagatgtgcgctgtccggaaccgctcgaattctgcgcctttcgcagcattgattctagatcactgggagatgtgcgctgtccggaacaaattggaatcccagccgatgacgcaaaacattctagatcactgggagatgtgcgctgtccggaacccatttccaaagtgccttttggcgcaacgtattctagatcactgggagatgtgcgctgtccggaacggcggggaaatgcgtgctgtgtcgatttgattctagatcactgggagatgtgcgctgtccggaacgccgaacgcgggacgatggaaaaccagtgtattctagatcactgggagatgtgcgctgtccggaacaatgaacaaaacgcggtagttgcagattctattctagatcactgggagatgtgcgctgtccggaaccaccgctgcgaaacacgacagaacggcccaattctagatcactgggagatgtgcgctgtccggaacttgaaagcttcgggccaaatagccgtcaacattctagatcactgggagatgtgcgctgtccggaaccttgtggccatggccgcgctggcagacgggattctagatcactgggagatgtgcgctgtccggaacagatgcgggtctttctcggaaagcggaagtattctagatcactgggagatgtgcgctgtccggaacacctagcttgttacccttccacctattccaattctagatcactgggagatgtgcgctgtccggaacggccaacgtcgccaccggaaagatcgcccgattctagatcactgggagatgtgcgctgtccggaacaacagggttctggggccggtcaacaggacaattctagatcactgggagttgtgtgctatccggaacgctgacaagcataccaagacaccagccgagattctagatcattgggagacacgtacttcttggggagtagggaatatgttcttcacaggagtgattcattatccaaataacgctccaccctacctcaccccctcaaacctcaaataaaactcccgcacgctcaggttctccggcgtgggttcgccgctgatgctggtcaggtagtcggcggcgtagcgccgggtggcggcgtcgaagctgccattcagggggacggggtagccctggcggcgcagcacgcgctgcatttccatgaccttgtcggtgatggtcagtgcggggccccggctgtgggcagggacggtgtcatcggttttgtcctgcggcttgcgtgttgcgcgcgctgggagctggctgtcctccgggctctctgactgccagagccccttgatccatttgccggtcgtggacaggttcggcagggcctctttggcgctgtcgacccagtgctggccttgctggcgcgctgcgtccagggtgggttgcagtttctggtgggtgccggtcacccaggtggggaggtgctgtttggcctggttggccagtatctgggtgggtgacaggctggccagatagctggcgacaaggtggtagacgcccagcgccacggcggcggtgattgtcaggctcatgatgaagtgtcgggggcgtttgctccggaagcgcttctgggccaggttggccggtgcaggggcggtttgggcggtggggctgacctggcccgggcgcggaaacagttggttgcctagttgttcttccatctggcaccaggggcaggtgctggattcgcgggggtagtggtggcgacgatctgtgcggcagcggcgcaggttcttctcgaagtgctccagcgccgtcacccattgtagggcgtcggggcgcggggcgctgccctgggcggtgaaggcgcgggcaaaaaggtcggccagtgtgcctgaaaattccgtcaggacgggcaggccgggtgggggctgcatgccggtggggcgctccggaatgtgcgggtagagacgtttctggatgcgctcgcccatgggcggggcttcgccggtgtcggggacgccgtcaaaggggtggcgtcccatcatcagtacctggaagaggatgacggccaggccgaaggcgtcgtgctgctgggtgcgcaccacgccgtgaaaggagtggccctgcagttcgggtggggtgtagtccggcacgcccacggcgcacaggaacggctgtccaccatggctgaactggaagctgtcggcatccaccagggcgacggtggcgtcgtctgccaccagcatgccggaggggttgatgtcaccgatgacgcagccggtgtggtggatggaggcaacagcgcgcgcgatgttggtggcggtgcgcgccagaaagcgatagtcgatgtccggaaaatgctgcttgcgcgcgccgggggcgtacaggtcgtgcagggggcgacggtcgcgcacggccttcatcagaaaaccggcaaaagcgccgtcctgggtgcgaaccacgtccacgggaaaggccgcaaagggcgactgtttggccaggccggcatccaccatggcagcaatcttgttggccagttggggcttgtcgggtgccttgtagagtttcaccgcatggttgcgccggttggcggcagcgtacacgctgccttcaccgccccggcccagccgttcacccagcttcagtcgacgcccactgcccagacgcagcttcagtccgtaggcagggtctttctcatgatcggcacgggaggtcatgggctatggggtgtctctgggaggggtggtgttctgtgccgggaaagagcatctggcaaggcttcaggacccgggggctatcagtcaggtggctgcgtgatggcgtctgtcttattcggtggcttatgttctgtgttgggcggatggttctgggtgcagtacggccatcaccagcgtcttgtcatcgtccgtgcggctgttgacggcctcgctgtccaggtaggctttcagctggctggacagggtgtgtgccttgccgggttctttgggcagcggggcggccatggtggagaagaaccgtgcaaacggggtctgcgtggccatgtccagcaccatgcgctcaatgccatcggaaaacagcgccagcgcgtctatgggctgtcgggtgatgtgcgtgcgcaggggcgtgggcggctcgtcggtgacaaagcgcgtggtggacgcgtattcgccatggtccggccaggaaagcgcctgccaggttccaccgtcggccaggcgtgccacgatgccgccatcaccaatgtgggccaccagcgtttcctgtccgttggacagggccagaaccagcgtgcaggcaaagtcgcgtgcagaaagcccgcgtctttctgcggccgcacgaatgcgctggcgtgctttgtcggtccatgtccgcacggtttctgccgagggcagggcggatgcagtcagccggggttcttgcagggatgatgtgttgggttccgatgcagtcgccaggtggcggcgtgcagcttggcgcagggtacggcaggtgatgatggccccctgccgtccgtggctggcgctgccggcgccatcacatgtaacggccacgaaccattctgcatgattggcgtggctgtcgctgttgacgggaacaacggcgcaggcctgggcatcctgcagcggcagatcgtgcttcaggtgcgaagtccctgtgctggaggccgctatccaggaccagtgtttcatggtcatcaggctggcgtgcgggggctgggcaatcgagtgggtcaggcgatgctgccccagcctttcgggccggtggggttttccagcggcacggcgtcgccggggttggagcgtgagacggaactcagcgagctggacagccaggcaaatagctcacggaaggccaggcccttcagtttcaggggatcgcgcacggccagctgacgcagctggtccatgtcggcatcgtccacgcccacggcatagaaggcgaattccttgcgtgcttcgccgctggcaatggcctgcgcagcctgccgccagctgtcggtgggggcaccgtcggtaatgaggaagatccacggacggtagtaggtgatgccgctctggcggtacagcgccttgcgctggcgcagtagctcgatgccttcctcgatggcctgacccatgggggtgaggccctgtgcctgcagccggggggcctggaactggctggcgctggtgaagtcctgcgcgaccagcacggggccgaaggtgacgatggccacttccacgcgcttggcactgaggctgtcggacttcagctcttcctcgaaggcctgcaggccggcgttgagttcctcgatcttgccgcccgccatggagccggagacatccagcagcagcaggcaggggcagcgcggctcggggttgtcggcaaactcggcagcggcgaaaggattggcgtcggcgtgcatgggcgaggtcctcgtggataaggatcaatggattctagcggccgtctcgccgcggcagccgccgcgcgacatggctgcgaggggcggaggcggaactatttccgcccggccgccattctgatcactggcagttgaagttttctgcgctgttctcgtcgccttcaccgcgataggtggccacctgcgggtacgggcacagcggctgagtcttgccggggaaggcgcgaccctgcgcgatgatgctggccggggcctcacccttctcggcccagttctccagggcggtgagcgggtcgaaatcgtccagggcattgccctcgccgcagtgggtcatgccgggcaccatgaagaggcgggcgaagtcctgggtgcccggggtgtcgtgctgcagctgccggtaccagtcgcgcagatcgttggccgagaagacggggtcggagacgccctcgaagatgatcatcttgccgccgcgtgccttgaaggtggtcaggtcggtggcgacggcgtcgttgacggcgccggtctgcagggtgagcggcaggatggtgtcgaagttcaccttgaaggtgtcgaactcggcctggtagggcgtcatgaagtagtgcggcagcgacatggcgcccagcacgatgttgcgggcgttgggggtggcggtctgggagtcacccagtttccagccgcgccagttgccgctgttgatgccggcatcccacggccagctggcatagaggggctcgcccttgctggtgcgtgcgccgccaaagacggcttccagcagggccaccttctccttgccgatgtccttttccaccatacggggcttgaagtcgcagcgttcccaggcgttgaccaggccgtccttcaggccgtccagggcgtcgcagcgttccagcacgccggccaccacggcatccatgtccttctgggtgagggcgttggcaaagatccgctcgccctgttcattgacgggggctgccttcaggaactgctggttgtcccatgactgggcgatggcggcacgcgacagccggaagcccgggttgccggctaccacgccgtcgaactgcagcgggtagcgcatggcggccatcatggcctcgcgtccgccgttggagcagcccatgaagtagctgcgcttcggggcgctgtggtacatggcctggatgagctggcgggtggtggccaccaccttgccggtggaggcgtaggccaggtccagccgggcctgctggtccttgccgaagagggtgtcacggccctggtggccgccgtccatgctcaccacggcatagccgcgcagcagcgccggctgggccgagctgccgcgagtggggatgcggcccagggcgtcggccacgaagccattggtgccgccgccgccctggaacaggaacttgtggttccagcgggcaggcaggcgcagctcgaactgggtgccgtagtggcggccgtcggcgccggtgcggggctcgatctcgccgcgcaccacgcagtgctcttcggcctgcagtgtctggcccgaggcgccggtgaaggccgagttggggtcctgggccagaccgccgcgctgcacccacttcacgcgctggatgaccacatcgggcagttccacctccttcaggtcgctgcagcggctctgggcgtcggcggcatcgtcggcgggctcggtggcagcctgggcgctggcggcccagagcaggctgccggcagaaagactgctggcaagcagcggcagcagggcaggaaggcggtgcagtttcatggcatgggttccgaaaggggcccgaaaggcagcatcggggaggcagccatccggcatgggcgttccggccagaccttcccggggaatgtcagagacagcaaactattttaacgaattggcctgcagggaggccgggggagaaggccacccgggagagacatccgactaggggcctccggcaggcccctgggtcgggttcagccggccttgtagaccagcacggccgcggtcaggtcttccagggcactgcccacggccttgaagacagtgatggcctggtcgctgctgcgacccgggtgctggccacggcacagggcctgcaggtcggcgcggatgtcgctggcgctgaagcggccggtgtcgaaggccttgagcaggtcgccggacttggtgggggcttcgtcggtatccacgaagacctcgttgccgatgaagcagtcggcggcggcttcgaccatgttgggcttgaagctgcccaccaggtccaggtgggtgccggggcgcagccagctgccctggatgaggggctcttccgagagggtggcgcagctgatgatgtcggcctggcgggcggcggcttccagcgatgccggggtgccgtccagcgggtggacattgggcacgccctgcttgcgcagggtctcggccagcacggcagcacgcaccggacgggggttccagatgtcgatgtgctcgatgtcgcgcacggcgcgcatggccgcaggcagcagtgccgcaatgcggcctgcgcccaccacgagcagtcgcctggcatccttgcgtgccagaaggtcggcgcccagcgcagcggcgccggcggtgcggcgcgcggtgatggcgtcaccgtcgatgagggccagcggcacgccggtggtggcgctgtacagcacgtaggtggcgtgcaggccgggcagtccctgcgcgccgttcccggggaagatgttgatggtcttcacaccgaagaagccctgttcgttccaggcgggcatgatgagcgtggtgccctgcacgccctggctctcgatggcgtgggtgtggcgcagcggcacggtggcgccctgggcaaaagcctcgcgcagtgcggggatcagcgtgcgaaagggcagggcagcccggcattgttcggcgtcgaactgtttcatggtggtgggaatgggatgtggatcggatcagccggggacgtcgtgcccgaccctggtgcacgaaggcggtcgcggccctgtggatccccggcgggcgcaggaagggttcagaggaagcgttgcaccgaatagggcgacggatcggtgaacggctgctggccggtcatcagctcggccagcaggcggccgctgacggggcccagcgtgagaccgtggtgggcatggcccacgtcgaaccacaggccgcgatggtgcggtgccggtccgatgatggggcgcatgtcgggcgtgcaggggcgccgtcccatccagggctcgctttccacttcctcgcccaggggccagaactgtcgggcgatgtgggtggcctgacgggcctggctgtcgttgggcggcgcgtcgggcagggccagttccacgccggtggtcaggcgcacgccgtcgttcatctcggccagcacgaagcccgagtcccggtcgcagaccgggaaggacggagccgggtgcgcgtcgtcgatgcggaaatgcaggtggtagccgcgctttggacgcagcggcagccggtagccgaagcgttcggccagggtgcccgtgtcggcgcccagtgccagcacgacgtcgctggcatgcagttcggtgccgtcaggcagcggcaggcgccagccctgctcggtctgctgcagcgc

SEQ ID NO: 1808 - DNA, 23207 bp, synthetic construct
  source 1..23207: mol_type = other DNA
  misc_feature 1..23207: note = Synthetic
cagccagcagttcgccgcacagcagcgccagcgtcagcccgcgtgcccccatggcactgcaaacccatagcccgggcaaggcggccgcatcgaccgggccgacgatcggcaaacggtcgggcgcggtgcagcgcacggcggcccaggattgggcggcccgcgccgacgcagcaagcccggcgtcggcacgggccgccgcgaaggcggactccagtgggggcgccatccggggcagcagggtttgcaatcgggcccagtggctggcatgggcggcctgcacatcggcgggcgcaggcggcatctgctccacgccgcgctcaaaggtggcgcccatcacccaggcgcaggggccttgcgcgtcgtcccccaacggaaagcggggaaccagatggccatggccgttcaccggaaagggcagcagcggcgcagccgggtccccatgcaggccccaggacacctgaccgcgcaccggctgcaagggccagcgatgttccagcagttccaggctgccggcgccggcagcgatgaccaccgtgggcgcttgggccagcacccggccttgcgcgtccagtgcctgccatgccgtggggccagcgcccggcgcttggacgcgccgcagccgcgccacccggcaagcgccctgccagcgaatgccgggctgggccagcaaggccgccaccaggcgtgccgggcgtatccagccggcctgcgggtgccagcagacgctggcattggcgggcaggccggattgggccagcgcgccgagcgctgcatgcgcagcgctttggcgcccatcggcgccaggcccgtcgctccagcgggcaggcaggccggggctggcgtcggcgcggtgctccagcacaccgcagtggctccagtccaggccctcgcgcaatcgccagcgggcctgctccagcgtgctgcgcacgccgctgcgcgacaggcgcgagagcaggttgtcgtcggctgacacatggggcgcaaagatgcccgccggcaggcccgaggcgcctgcggcaggcgctgcggcctgatccagcacgcgcagttgccagccgcgccgcgccaggctggccgcagtggcggcgccggcaatgccgccaccgatcaccatgcactcgccgggtgttgccggcgctgccgcgggtcgcatggtgcgcggctgccaatgcggttggtagacggcatgcagcatgtcgcgctgcgcgtcgctgccgggcgcggggtgcagcgtgaaaccgcattgcaccagcgcatcccgcacggtgctgcaccggctggccagccgggtgccgcgccggcagcaagccgccacggccttcagacccggcaggcccggcagacccgcaggggcggggtggcgttgggggcgccagtcctgcggcaagtcatgcaggtagaccgagtccaccgtcagctgctggcgttgctggcgcagttgcgcctgccagtcgcccaggcacagcgtgagcagcacatggccgtcgtcgaagcgcaggcggtgcaggcccggcagcaggccccaccactggcgcgaaagctcctgcgccagcggcgcaagcccgggccgggcgctgccggcccgcagcaggtcagcggcgctgacgggttgggcctcggtcgccacgaagtgcagcagcacaggccggtgtggatcggcgcgccaagcggcccaggtcgccaggaagttcaggccaaagccgaacccggtctccagaatgcgccattgcggcagcccggcccaggccgcaggcagaccgcaaccatgcagaaaatccggcacttcaccgcgctgcgtcacatgtcattgcgtgccgggaaaaacggttcggggccgcaccatttttcgccgcgccccacggcgctacgcgctgggcgggacgtagcccgccgcagcgtctgcgccactgccaaaaaaatggttttccatctgacgggccaggtattggcgcgcacgggcgtcggccaggttcaggcggttttcattgaccagcatggtctggtgcttgagccagcccgcccaagcctgtttgctcacgttggcccagatgcgttggcccagttctccggggtagggaggaaagtccaggccctcggcctccttgccgagcttgatgcattgaacggtacgtgccatggggctccttgcggcgagtgaaggggttcactcagatgattttgatataaacaactgaaatttcagtcattccagttttgaagagggccttgcagaatgcgtttcgtcgctgcttcacagcgcttcatgcatctgaaaagggcctttccaatgaattaccgccgcgactttatcaagtttcccctggctgccgcgctgacgggcagcatggccttgacggcatggccggcgtttgcgcagtccgtgacgctgctcaatgtctcgtatgacccgacgcgcgagctgtatgtcgaattcaaccaggcgtttgccaagtactggaaggccaagaccgggcaggacgtgattgtcaagcaatcgcacggcggctccggcaagcaggcgcgctccatcatcgatgggctgggggccgatgtggccacgctggcgctggccggcgacaccgacgcgctgcacaaccatggcaactggattccgaaggactggcaaaagcgtttgccgcacaacagctcgccctacacatcgaccatcgtgctggtggtgcgccagggcaacccgaagggcatcgaggactgggatgacctggtgcggcccggcatcgcggtgatcacgcccaatcccaagacctcggggggcgcgcgctggaactaccttgcggcctgggagtttgcccggcgcaagctcggcagcgacgcgcaggccaaggagtttgtcgccaagctgtatcgcaatgtgccggtgctcgacaccggcgcccgtggttcgaccatcagttttgcccagcgcaaccagggcgatgtgctgattgcctgggaaaacgaggcctatctgctgggccaggaattcggcccccggttcgacgtgattgcgccatccatctccatcctggcagagccggccgtgaccgtggtcgacaagaatgtagaccaaaagggcacgcgggccgtggccgaggaatatctgcggtttctctacaccgagcaaggccagaacatcgtgggcaagcatttttaccgtccggcagtttctgaaaaggccaaggccaagtacgcccggcagtttgccgatctgaacctgttcacgatcgatgccgctttcggtggctgggacaaggccgcccgggagcattttgccgacggtgcgagcttcgaccagatctacaccagcaagtaggcatcgatccgccgcagcggttcagccggagcagctgcggcacagacgagtggatggcctgcggcgcagggatggtgcgagccaggccgcatcaggccagggccagatcggtgtccatcagggtctggctgccggcgcggacgcggtgcagcagcgtcgcggtctcggggaacagccgggcgaaataaaagcgtgcggtctgcagcttggccgggtagaacggatcggcattgccggccgccatctggcgcagcgcgacctgggccatgcgggcgaaaaagtagccaaacaccagatggccggtgatgcgcaggtagtcgactgcggcagcgcccacttcgtcggggttttgcaggccgcgcaaaccgatctcggtggtcagtggggtcagttgctcgcccagttcgaccaggggggtgatgaactcggccatgctccggtttgtgcccgcctcttgcgccagttggcccagtagctggccgaacttcttgagcgtggcgccgttgttgcccagcaccttgcggcccagcaggtccagcgcctggatggtgttggtgccttcgtagatcatgttgatgcgcgcgtcgcgcacatgctgctccatgcccgattccttgatgtagccgtggccgccaaagacctgctggcacagcgtcgtggcttcatagccgttgtcggtgatgaaggctttgacgatcggtgtcagcagcgccagcatttcgctgctggcctggcgcactttttcgtcggggtgctgctgctccttgtccagcagcagtgcgcagtagctcgacagggcgcggccgccctcggcgtaggccttggccgtgagcagcatcctgcgcacatcggggtgcacgatgatcggatcggccggcagatcccgcgcccgggggccggccaggctgcgcatctgcaggcgctccttggcgtaggccagcgcgttctggtaggccacttcggtcaggcccagcgactggttgcccacacccagacgggcggcgttcatcatcacgaacatcgcggccaggcccttgtggggctggcccaccaggctgccgctggcgccgtcgagcatgatctgcgccgtggcattgccatggatgcccatcttgtgctccaggccggcgcagtcgatcgcgttgcgctcgcccaggctgccgtcggcgtgcacgatgaacttggggcagacgaacaggctgatgcccttgctgcccgcaggcgcatcgggcaggcgggccagcaccaggtggacgatgttgccggccatgtcatgctcgccggccgagatgaagatcttgctgccggtgatcttgtaactgccgtcggcctggggttcggccttggtgcgcagcaggcccaggtcggtgccgcaatgggcctcggtcaggcacatggtgccggtccaggcgccactggtgagcttgggcaggtagattttcttttgctccggcgtgccatgcgcatgcaggcaggcataggcgccatgcgagaggccggggtacatggtccaggcctggttggctgcgttcagcatctcgtagaagcactggttgagcaccagcggcaggccctggccgccgtaagccgggtcgcaggacagcgccgcccagccgccctcgacatattgggcgtaggcctgcttgaagcctgttggcgtggtcactgcatgggtggacgggttgtgttggcagccttgtgcatcgccaccggtgttcagcgggaaggtcacttcggctgcgaaccggccgccggctgcgagcacggcgtcgatggtctgcgcatccacttcggcatgcgctggcagggccttgaattcatcactgaccccgagcacttcgtgcagcacgaattgcatgtcgcgcagcggcggcgtatagatgggcatgggtttactcccggtgggtggtggaaacctggcgtggcgcctggtcggttgcagcgggggccgcagcgtcggtctgggcgccgtagcgcgccagaatgtggtgaaaccccgcttgggcgcgctccggagcgcccggggcctgcaggaaacgcgcctcgtagtgcagcgcaagaatgaggccgtggatttcaaacagcatctgctcctcccgggtgtccgggcgcaattggcctgcctctttgcactgctctatcgcgcgcagcatcgcggtgtgccaggtcagcaccgaatgcaccagcgcgtcgcgcacggggccgctgcggtcatcgaactcgaccgcgccactgatgtagatgcagccggagtcgatttcgatcgagctgcgtttcatccagttgtcgaacagcgcgctcagccgggccacaccgcgcggcgcggacagggcggggtagaacacctcctgctcgaaccgtgtgtggtactcgcggatgacggaaatctgcaactcctcgcgcgagccgaaatgggcaaacacgcccgacttgctcatgcccgtgacatcggccagcgcgccgatcgacagcccttccagcccgatgtgcgtggccagacccagggcggcatcgacgatcgcggccttggtttgctggcctttttgcagggcacggtcgccgccgccgctgctgcgcgcgcgcggcaagcgggtgatctggccgccgggctggtcggtgctctggtctgggtcggtggacatcgcgcatgaaaaaaagaacgatcgttctattttgccgcaaatccgctgccgaaccaccaccttcggaaaaaaaggccaatgatttgcacactgcccgcgtgcgctcaatggctgcggatcatggtgccgaaggcttggtcggtcaggatttcgagcagcatcgcatgcggcacccggccatcgatgatgtgcacggcatgcacgcccgccttggcggcatcgagtgcgccagctatcttgggcaacatgccgccggaaatcgtgccgtcggcgaacagcgcatcgatctcgcgggccgtcagatcggtcagcagattccccttcttgtccagcacgcccggcgtgttggtcagcagcaccagtttttgcgcctgcagcacggtggccagtttgctggccaccacgtcggcattgatgttgtagctctcgttgttctcgccaaagccgatggggctgatgaccgggatgaaggcatcgtcctgcagcgccttgaccacgctggggtctatggacacgatgtcgcccacttggccgatgtcatgttcgatgctggaatccttgctgtcgaccatcttgagcttttgcgcgcgtatcatcgcgccgtcgcgcccggtcagccccacggccttgccgccggcctggttgatcaggcccacgatgtcttgctgcacctggccggcgagcacccactcgaccacctccatggtctcggcgtcggtcacgcgcatgccctggatgaacacgccctttttgcccaggcgattcaatgccgtctcgatctggggccccccgccatgcaccaccaccgggttcatgccgaccagtttgagcagcaccacatcttctgcaaagtcggcctgcaacgccgggtcggtcatcgcgttgccaccgtacttgatgaccatggtcttgccatggaacctgcggatatagggcaacgcccgggccaggatttcagcctggtcgcgcggggcaatcgaaagagggtcggtcatgcaggcctgcgatccgcaaaaaaacggtagggcgcattgtgccgcatgcgcgtggcgctgcctgcgcagcgggatgtttgcggccccgtcgggggtgcaagcaaaagagtcgcccggccctggaaaatgccgccggcatgttcagcggcgcaaccagcgcggcaccttgaagcgcacgatggccaggtaggccagcacatagctgatcacgaacaagccgcaaaacaccatcaaccccggggtgttgttccaaaacagcactgcgggcatcacggtgagcagcgtaaagccccacagatagggcgaggtgcggttgttgcgcatcagcacccggcgtgactcgtcatcgtggaacacgccgcgcacgatgcggcggtagatcagctgatgaaaatgcagcgcgtcggccacgccgggcgagatgccgcgaacggccttcctgtagatcgagaaaatcgtctcccagaccggataaatcaacagcagcatcgggaaccatggcgacacatcggcattgcgctgcaccagcgagatgctggccagggcaatcgccacgccccagacataggcgccaccatcgccggcaaacagcatgccatgcggatagttccagatcagaaaccccccggtggcggcggcggtggacatcagcagcgcggccagcgcgcggtcgcccacctgcatggccacatgggccagggccagacagacgatcagggcgaccatgcccgccaagccgttgtagccgtcgatgatgttgaacgcatgtggcaggccggcgatggccagcaccacgatgacaacgcccagccatggggcggaggccagcaacgcatccagccagggccagcccagacggggcaaggtgagatcgagcagcagcaccgccaacgcgccggacgtgccggtcaggatcagccgatagcgcaccgacaggcgctgcgtcatgtcctcggcaataccccccagcgcagcgggcagcaagaccagcagccagccacccacccaggtgtccaagcgcagcgagccgggatcaccctgggaggactgccacatccccagcccccaactcatggccatgccgatcagcaatgcggccccgccgatgcgggggatgtcgcccagatgaaagcgctgcggcatcgcattgccgtagcgcgccgcatgtttgcgcccccatcgcacgatgagccccgcaaccagcgccgccaccagaaaacccaccacagacaacaagatcatgggacatcgatcctatcagtgatggcccggtcagatgcaagcagccgttgcgcctgcctgtagacgggcgagttccagagccgccagaggctttgcagatgccagcacagatggttcaggcgccgcccgctggcccgctggcccgcatgcaccagttgcgccggcgcgcgtgccagcctgaaaccggccaggcgcagacgcaggcacaggtccacatcttcgcagtacatgaagtagccctcgtcaaacccgttgagcgactgccacaccggctgcggcagcaccaagcaggcggcgttgacccaatccagccttgtttcaggcaacctgcgggcgcggcggcgccataaggcacggggcgtgggcaatgcacgttcactgtcttgccggcggccctgggcatcgatctgcaccgggtaggcacagccaatgcccggcgccgctgccagttgcaccagcgcggcaaaggggtcgccgcaggccagcgtgatatccgggttcagcacacagacgcaaggctcggtcgctccggccagcgcccgattgtggtttgtgccaaagcccacaggccgggcattgccgcgaatctgcagcgcaaaaggccagccaccggcgggcggcaagggcggcgcctcgggcaaattcagcgtcagcaccacacgccgcaccgtggcgctgctcagccgcgccaagtcgtccagcagacgctgcaccagcggcccgtggccatggctgaccaccgagaccaccaagtcgcccggcaaaggagaaaagcaggtcttgacaccctcccccgcccaaagggggattcctgcggtgctacccatgggttgcctcagtcacagtcacttcggcgggttcctgctgcgctacaggccggttccgtccaggccagcgccgtcctctcgacagcctctccacaggctgcagcgcggcgtccccgtgccaataccttcattacgccggcatgtcgcaacggatgaaccggggcctcttcgagccatggcgtttcagtgccgttgcgccacgcggtcaggcgttttgccagcgccgcgtcgccgaggaacctgcggcccgccgtgtagccggtcttttgcagcactggcgcgcctcgttgcagacgaatcggcaagaaccggcgaagcagcgcatcttgcgcacttgcccgccgttgggcggggtgggtatttgaacgcttggagccgctgcatgggcttgaatgatactgatacttcggcccatgaacgccgggcaaaccatcggcacgatcgacggccggcgggggcacggcctggatagcgccaagagcgtgcttcagtggcggtttcagaggcgcatgccggacatggaatcgggcgagaagcaccatcccattgaagccggccaaggtgttggagcactttgccaatcgacggccctgcgcgcctggcatcggggtctgcactggcgcacgctccattgggcaccaatgggcgcggttggacacggtgtgggcgcgcgcaatcatggcctggggtcacagcgtgcgcttcgacccacggcaaggcggcgcgcccgttggtggccggccgcaagaccggcgcaaccgatgcgcgggcgatctggctggccgtgcagcagcctgggacgaacgcagtgggttggccgaaatgacgaaagccccgcactgcggggctttccatttggcgccgcatctctcggcttgttagcgtccagagcgcatatcccagtgagatatccggttgccagtgtaacctgattcgccacatctgctacaaccacccccgtcaatcaatgcatgagaggtaccaatgaacaaggccgtcgcttatcgcctggcgctggatctgggatcgacttcgctgggatgggctatttttcggctgaatgaggcgcgtgagcctacggccatcatcagggcgggggttcgcatcttcagcgatggtcgcaatgccaacagcgagccgctggcagtccaccgccgcgtggcccgcgccatgcgccggcgccgggaccgtttgctcaagcgcaaaaaacgcatgcacgatcaactggtgcagcatggcttttttcctgccgaggtggccgagcgcaaggaactggagcggctgaacccctaccagttgcgcgccaagggcttgcatgaggccctgaccccgggcgagtttgcccgggcgctgttccacatcaaccagcgccggggtttcaaaagcaaccgcaagaccgatcgcaaggacaatgacagtggcgcgctcaagcaagccattagcgaactgcgcaagcgcatccaggacagcgactgcgccacggcaggcgagtggttctggaaggagcgcatgcagcaaaagcccgagggcgtgcgcggccaatgggtgcgggcacgctaccgtaaaacgccttccaccactgacgagggtaaaaagcgcatcggctatgacctgtatgtggaccgcgccatggttgaacaggagtttgatgcgctgtgggccgcgcaagcggcgttgcagcctggcttgttcaccgaagcggcgcgtgcggaattgaaagacacgctgctgtaccaacgcgatctgcgccctgtcaagcctggccgctgcacgctgctgcctgcagaagaacgcgccccgctggccttgcccagcacgcagcgctttcgcatcctgcaagaggtgaacaatctgcgtctcctggacgaagcactgcgcgaagtgccactgaacctggcgcagcgtgatgcagtggtgagcgcgctggagggcaagaaagaactgagctttgcggcaatacgcaagttgctcacgctctcgggcaagttcaacctggaagacgaaaagcgcgccgaactcaaaggcaacgccaccagcgtcatactggcccgcaaggacttgtttggcgacgcttgggcggggtttgacgcagccgtgcaagacgagatcgtttggcgactggtcagtcaggagagcgagggcgccttgatcgcctggttgcagcaacacacgggggtggatggggtgtgcgctgaggccatcgtcaacacccgtttgcccgatggctatggccgcctgagccgcaaggccttggagcgcatcgtgcctgcgttgcagcgcgaggtttgcacctacgacaaggccgtgcaggcagccggttttgcgcaccatagcgacctgggttttgactttgattacgccgaggatgaggtgcagcaggtgggcgaacacaccatcgcatcaactggcgaggtgcaagcgcagtacgctttcaagcaactgccgtactacggcaaggccctgcagcgccatgtggcctttggcagtggcgatgccaaagaccatgaggaaaagtgctacggcaagatcgccaaccccacggtacacatcgggctgaaccaggtgcgcaccgtggtcaatgcgctgatccgccgctatggtcaccccaccgaagtggtggtggagctggcgcgtgacttgaagcaaagtcgcgagcaaaagcagcagacgcagcgcgaacaggctgacaaccagaagcgcaacgaggacattcgtaagcgcattgctccaatcctggaaaccagtcccgagcgtgtgcgcgaccgtgatatcaaaaaatggatcttgtgggaagaactgaacaaaaaggatatcgctgaccgtcactgtccctacagcggcgaacggatcagcgccactatgctacttagcgaagcggtggaaatcgagcatatcctgccgttttcgagaacgctggacgacagcctgaacaaccgcaccgtggccatgcgccgggccaatcgcatcaagggcgaccgcaccccttgggaggcgcgggctgactttgaagcccagggttggcgctatgaagccatcttgcaacgcgccgagggcatgccgccgcgcaagcgctaccgatttgcggaagatggctaccagcgctggttgggcaaggaccggaactttctggcccgtgcgctcaatgacacgagctacctctcgcggctggctgccaactatttgcggctggtgtgtccgcaaggggtgcgggtgattccggggcagatgacggacaagctgcgcggcaagttcgggttgaactctgtgctgggtttggacggcaaaaaaaaccgcaacgaccaccgccatcatgcggtcgatgcctgcgtgatcggcgtgaccgaccagggcctgatgcagcgctttgccaacgccagcaaacaagcccgtgaaaatggcttgacccggctggtgcaagacatgctcttgccttggtggcccagctactacgaccatgtggagcgtgcagtgcgccatatccgggtcagtcaccggccagaccatggctttgagggggcgatgatgaaagggaccgcccacggcattcgcgaggacggcatccgcgaggacggcagaatcaagcaacgccccaaggccaaaggtagcgcggaccacaagaccatcaccctcattcctattgacgagcctcgccaactcgcccgccatggcgtggatgcagaaggcaagcccctgccgtacaagggctatgcgagtggtagcaactattgcatcgagatcacgaagaacggcaagggcaagtgggaggggcaggtgatctcgacgtttgatgcctatcgcatcaaggccgctgccgatgcggcggcgcgtgccgggcaggtgatctcgacggttgaagccgattccatcgtgcggaaatcaggctgggagcgtctgcgcggcgcgcagagccaaaacgggcagccgctggtgatgcgcttggtgattggggatagtgtcaggatggaagtcgatgggcgcgatgaggtgatgcgtgttgtgaaaatgagcgggaaagagatggtttttgcgcctgtgcgtgaagcaaacgtggataaacgcaataacatgccggacgagcaggatccatttacttacacctacaaacgtgctgaccaactgcgcaaagccaaggcccgccaagtcaccatctcccccataggcgaactgcgcgacccaggcttcaaaggctgacggcgatgataggccgcaccgtggaaatcgcagacgaccggcggcacctgtttgtcaatcgcggtttcatggtgatcaaggacaccgagggcgagcgcaaggaactggggcaagtgccgctggacgacattgcggcggtcatcgccaatgcgcatggcctcacctacacgaacaatctgctggtggccctggccgaacgcggcgcccccttcgtgctgtgcggccccaaccacaacgccgtgggcatgctgttgccactcgacggccaccatgtgcaggccaagcgcatagaggcgcagatcgcagccggcctgcccatgcacaagcgcctgtgggcagccgtggtcaagtccaaactggaacaacaggccgcagcactggaggctgtggccgcacccacggcgccgctacaggccctggtcgccaaagtgagaagcggcgacccggagaatatcgaaggacaaggtgcgcgccgctactgggggctgctgtttggcgcggagtttcggcgcgaccagagcggcgacggcttgaatgcgctgctgaactacggctacaccatcgtgcgctctgcctgcgcccgcgcggtggtggctgccggcctgcaccccagcattgggctgcaccacagcaacgacgccaacgccatgcggctggtggacgatttgatggagccttttcgccccatcgtggacctgaaggtatggcagttgcacaaggcgggcgaatcgcacgtcacgccagacaccaagcgcgccctggtgcgcgtgctgtatgacgacatgcagacagcggcaggggtgacgccggtgatggtgtgcatgcagcgcctggcgacatcgctggcgcaggtgtacctgggcgaacgcgccaaactggatttgcccttgccggggctgccgctggcgctggctggcagcttcgagccagattgatccccttgccagccgcgccatgttgtccgggtaccgacttatgtggatgctggtgatgttcgatttgccggtggtagaaaaagccgagcgccaagcggccacgcagtttcgcaacgcgctgctcgacatgggcttcgagatgagccagttcagcgtgtacatgcgcttttgcgccagccagacccaagtggacaccctgtgccgcacagtggagcgcgccttgccttccggcggcaaagtgcatatctttcagttcacagacaagcaatacgaacgcgccatcacctaccgcggacgtagcaggcaacccacgcaaaaagcgccggatcagttcgaccttttttagaccatgaggcgactttcctgtcctcggaagacgaaaatttccttaagaatcaatcggttagcgcattgagattgtagctcactgggatatgcgcactggccggaacggcattagcaagtacatcaaacaaggagttattgtagctcactgggatatgcgcactggccggaacgagattcaatccaacgtgttgtgcgctgcgattgtagctcactgggatatgcgcactggccggaacaaggccagggccgaccttgacggttccgcattgtagctcactgggatatgcgcactggccggaaccagaagggtcaatttgattaatccatcaaaattgtagctcactgggatatgcgcactggccggaacctgctcctgctccagtggtcgatgccgcgtattgtagctcactgggatatgcgcactggccggaacgcgtttccatgccatatcggcctcggcctgattgtagctcactgggatatgcgcactggccggaacgacatgacgctaaaagcccggcttgcgtctattgtagctcactgggatatgcgcactggccggaacatttcaccccatgggaaaagttcattttaaattgtagctcactgggatatgcgcactggccggaaccatgacttgtgcccatgacgcctgcagatcattgtagctcactgggatatgcgcactggccggaacgcaagctgaacaaggccggcgacactgccaattgtagctcactgggatatgcgcactggccggaacgtgaattcttaccatggtgaaccagtgtgcacggtccacaacaccgcttccaaaaatagctgatggtcctgtgcggtcgcaccaggatcgccgagtttacccagtagaataacgcaggcaatttctcccattggtcatcgcgtaatcgttttccgatttcttgcatcttcggtacctattcattcagataccgggcataaacatattccattgattgttgacaaattctgccctgtggtagtggcgcctgggtggcggctaccttggcgctgcggcgctgcgtgccagaccatgcagtgcttgcagcaactgcaccacatcctccgcccggttgcggtgtctcaccgggtgcctgcgccgcgtgcgtcaggacggggcacggtgacggccaggcgcaccagcggggcgtaggcggcgcgatgtctggccacggccagcgcgcccacggtctcactgtggtgaccgcccgtcagaccgacaagcggctcttggccgggcggccgatgttgcgccagtgatgcgcgctcattttcagcccgctctcggtggccgcagcgccatcactgccgtagaacgcatggcccagacccgtgagcgcgcccaggcgctccgacaactgcgccaccggcgcatgtgtgaagccggcgagcatcacatggtcgagtggcgccaactgctcggccagtgcggccttgacatgggggtggttgtggccgaacagattcacccaccaagagctgatgccgtccagataacgccccggccatcggtgtcgcacagccaagacccctgcgcacgggcaatggccacgggcggctgcgcttcgtgccgcttcatctgcgtgtcgggcaccatacatgggccaggctgcggtcgtgttcctgccgcatgaggatgacctgcctgcgtgccgggtgccatatatgggccaggctgcgggtggccagagcgtcatgggcgcgggccattgggggtgtcgcacatctcacggcgcctgcgtggaggccggcaaatccagcgtgcagccgtcacccaaggcctcgcgccagacccgcacgcggctggcgcgccaacgtagctcgtcgggcagggcacgggcgatgaagacgcacaggttctccaatgtcggtgggcccaggccgggcacatcgtcgagcatgtggtggtcgagctgtgcgcgcacccgctccaggccctggcgtagcagtcccaggtccagcaccatgccggtggccgggtcgcaagctccggtgagcgcgacctcggcgtggtaagtgtggccgtgaacgcggcggctgccttcggcctcgatctcgcggcgcaaggtgtgggccgcatcaaagaaaaaacgctgggaaatcgtgtgctgcatgggtaaaaccgggccaggcgggtggcgagtttagtctgaagttcccccggccttccccgcgcctgcccagcggccctcatccgttcctgcttggcgaccatgcacgagccaaggcgccttgtttggtgatgtgctccccctctttgccgggcttgccgtttcagccttgctgtggtggatgggccgggccgtgggtccggggggctgtgcagttattcccttccccaatcattcgtgcacttcgtcggcttcgcttgccgtacattcgtactgcctgcgcttcgccttcgcgttcacgaacgatttggaaatggaattacgccttggacgcccattccctggctacttttcgcgcatcgatttccgcattcgcttttgtcttggcgaagtcggtattcacgacggttggcgcgacatgaatatgcgcgaccgattgaaccccgatgaatttgagccagtcatccacataaggggtggaaaagtctgatccgaaacccgctgctattgcagcgtggtacacgccgctggcgtgtatgacgagggcttttttcccatgcagcaagcccgaataccctttttcgacatcgaatccaaatgcccatccgggttgggtaacgacatcgatgaactgtttcagtttatacggaatcccgttgttccatagcggggtgttgaaaatgtacgcgtctgcgcgggcgaagcgatcgaaaatttgtttcatctcttcccagacttttgtttgtgcgctactgaagccgctgccggagaacagtgccatcttggcgcccacggcaagtccgtcgaattccggcagtttgtcatcaaacagattgaatgtgtcgagctccaattgcgtatggttgcgcacctccgcaatgaaggtgttggccattttcagggattcgctgttttcgccgcgtgtcgaggcgttgatatgcagtaatttcatgggtgcttccattggtgaacggggatgcgaaaaattcgcggtgatccatcgtggtacccaatggcactggccatcggcgtacccatgcggcttcgttgcacccattgggtgaagccgtcccttgcttggcctgtgcaactttttccatgtgggtacgcctctttttttctcaaggatttttttgagcggaagtccgggcctgcccgtcgcattggcccatccctggcccattccccgtcaacggtttggccacccgcccctgatggccggccgcgggtgcccgcaaggccgcccggggctattgctattgcgttcccagcggcaccagcagcgcgcgcagtgcctggacttcggcgggcttgaggtcggacagcggtgggcggcgcaccgggccggcgccgtggccgaccaatgtggcgcccgccttcacgatggccaccgcatagccctggccctggttgcgcagggcgatgtagggcaggaagaagtcgcgtatcaggcgctcgcaaacatgggccaccaagccttcctggctggcttcggtcaggtaatggggcagcagcaagatgccctgcgcgcccaggcgctcggcttcctgtgcgtagccgacggccaaggtgccgccgccggcatcggcatcggcatcggcatcggcaatgatgggggtgcggccacggcagcgttcgacggccacttgcaccacggcgccaaattcctgcggcgtcagtgagaagaactcgccggtgccagcggctgcaaacggcgccgaggccccgtagggctgtagccattccaggcgttcggtgtagggcttgggggcaaaacgcagttcgctgtcgaagtcggtcaacgcgaacgagagcaggccggcttgcagcacgcttttgagttcttgcggggtcatgggcagggcgctgaaggccggctggcggggcctgatcgggtggttgagtcatcgtacgacgacgcccgtcgcaaaaccctgcgggggactacgggctgttggccaggtggccatcgcggatgcgctcgtccggggtgtcgagagcagtcccaaggccagggtacggggtctgcggtgtggcgcgatgtcggtgctcgtcttggtgtcgttccgggcggtggatgggccaaaaggagttgggctattcggttgtgctgcgccgttcgtaggttatattgcgccgttcgtcatacggctattgacagcgactgacgataatctccctcctgcatcatgtccaatcatgtccatcacgcagtcgcgccactgcagcaagaaccctgggcttgaccatgtcctgttatccgacttccattcactttaaacgtttgttgctgaccggcgccgccggggtgctcgggcgtcagctgcgcccgcgcctgaaagcccattgctgcctgctgcgcgtttcggacattgccgacctgggcagcgccgcgccgggcgaggaactgcacccggcccgtctggaagatgccgacgcgatgtcgcgcctgctcgaaggggttcaggccgtggtgcatctgggcggcgtgtcgaccgagcagccctgggaggccatcttgcaggcgaacatcatcggtgcatacaacctgtacgaggcggcccgcaagcaggccgtcccgcgcgtggtgtttgccagttccaaccatgtgaccggcttttaccggcgcgaccaggtggtgggcctggatgatccggcccgtccggatgggctgtacggcctgtccaagactttcggcgaagacctcgcgcggttgtacttcgaccggtacggcatcgagaccgtttgcctgcgcatcggctcggcgctgcccgagccgcacgaccgccgcacgctggccacctggatcagttacgacgacctggagcgtttggtcgtcgccagcctgactgcgccgatggtagggcacagcatcatctatggtgtcggcgacaacgccgtcggctggtgggacaaccacctggcccgccacatcggctaccagccgcaagacagctccgagcgtttccgctcccggatcgagtcctccgagccgccgcccgatatgaccgacccggccacgatctaccagggtggcattttcgttcgcagcggcccgcttgcgaaatgagcctggcgctgcgggtctgctgctgtcagagcagcgcatccgaagtgggcaaaagcccggtgtggcgcgtgccggaacaagcgctttttctggatcgacactgaacgacgcgcgctgcaccggaggtcgttgccggtgcctcaggtccatcgtttcagtcgttggcaagcgccgggcgcttggtctggctggggcggagagcctggccatggcctgcgcgccggctttcccgctgtgcttgaccgatttgatcttgcccgatctgatcttgcccgatctgatcccgggccgtggctgacttcgatcagcccatgcgccggccggtctgccggtcgaacaggtgcacattcccgatgttgacccgcagccccacggtctgcccgggccgggcgtcaacgcggccgtgcatcagcagcaccagtttgtcttggcccacctgcaccagcagttcggtctcggcgccggtgggctcgaccaccaccacttgcgcgtcaacgtgcgcgtcagcgccgctgcctgccgcagcaagcgtgatgtcgcccggccggatgccgtagtgcacggcttgcccgtccgtcgccggcaggtctgcgggcacgggccagcgtgcgccctgcgcctgaacatggcagcccgtgtccgcgcgctgccactggccctcgatcacgttcatcgacggcgagccaatgaactgcgccacgaacaggttatcgggccggtcgtacaggtcgagcggcgtgccgatctgctcgacgacgccgtcgtgcagcacgacgatgcggtcggccatggtcatggcttcgatctggtcgtgcgtcacatagaccgtggtggttttcagccgctggtgcagcgccttgatctcggcgcgcatcgccacgcgcagcttggcgtccagattggacagtggctcgtcgaacaaaaacaccttcgggtcgcgcacgatggcgcgccccatggccacgcgctggcgctggccgcccgacagctcgcgcggatagcgtccgagcaaggtgtcgaggttgagaatctttgcggcccgcgccacgcgctcgtcgatctccgacttgtcgaccttgcgcagacgcaggccaaagcccatgttctggcctaccgtcatgtgcggataaagcgcatagctctgaaacaccatcgcgatgtcgcggtccttcgattcgaggtcgttgaccacgcgctcgtcgatcatgatctggccgccgctgatgtcttcaagccctgcgagcatgcgcagcagggtcgacttgccgcagcccgaaggcccgaccagcaccacgaactcgccgtcggcaatgtccaggctcagatcctggatgatctggaccttgccgaaggatttgcggatgttgcgaaaagatacggtcgccatgggatgtccctcgattgattcagctcttgacggcgccggccgtgaggccgccgaccatgtagcgcttgaaggcgtagtagatcgccgcaggcggcaaggcatagatcaggcccgtggccatcaacaactcccatggtgaatcgtcggccgacaggaagttgcccagcgccacggccagtgtcatgctcttgtcgttggacagcagcaggaaggcatagaggtactcgttccatgccaacaacagcgcataggtgcccaccgccaccagtgacggcaccatcagcggcagatacaccaggcgcaacagttgcagcggcgatgcgccgtcgatgcgcgcggcctcgtcaagctcatatggcagcttgtcggaagcctgcttgagcacccagatgcagtacggcgaggcgatcgtcaccatcgccaatatcagcgcccaccggctgcccagcagtccgtagttgcccatcgtcttgtacatcggcaccgccaggaaggcggcgggaatgaagtacgtgagcagcgccaggttcatcacgatgcgcccgcccctgaattgcagccggctgatcgcgaacgcggccgtggttgccacgaagagcgtcaaagcgcccaccgtcagcgcgatcagcaacgagttgcccagttgccgccagaagtggtcgaggtggaaatgctgctgcaggaacacgatgcgaaagttgtccagcgtcgggttctcgggccacagatggcccgaggtggcggaatccttggccgaaatcgcaaacagcaccatgtgatagaccgggaccagcgtccacagcagcaccgggatgccgatcagcagcagtcgggcctcggtcactgcggcccggagggtccagcgtttcatttcgagagcctcttcatcatgaagtacaccagaggcaagaccagaggcaacgccaccacgatcgacgccatcgacaggccgacctggtcgagccgcaggtaacggatgccgagtgtggccagcacctgcgtcaagtccgcagggccgccgccggtcagcagatagacgctgttgaagtcgcccagggtccagatcatcgacaagatggtcgaggtgatgtagagcgtcttgagcgccggccagctcacgaagcgaaacttctgccacgacgaggcgccgtcgaccgacgcggcctcgtactgctccgaagcaatcgccagccgccccgccacgagaatcagcgtccagaacggcagcgacttccacacatgcaccaccatcgccaagctcagtgccagcgcggggtcattgagccagttcggcccgtcagcgccggtcagccggaagatggtgctgttgatcacgccccactcggggttgagcatgaagcggatcgacaagatggtcggaatcgacggcatcgcccagggcaggatgaaaatcgccgaaacgatcttgatccaccagcgcgactgcacgaaaaagcccgagagcagcaacgccatgagcattttcaggttgatcgccacggccaggaaaatggccgtgttgatcaccgagcgcaagaaaatcgggtcttcgaccagttgcacatagctttgcggatggcgcgccagccacagtccataccccaccgggtagagcacgaacaccacgaacaccagcaggtagggcacgaccatcaccgcgccccagaactgccagcgcgcgtgccgcgccccaggatcggcaacaggcgccacgggtggcgccgcagtgacgctgctcatatgcggatgcaggcaatgccatggcggcggcttactgcgccaccaccgtcttgatgcgcgcgatcatttcgtcgaccgcctggcccacaggcaacttgtcggtgacgatgcggttgaccgccttggcccagacgttctcgttgttcagcacggtgaatctgtagttcttggtgaactcgaaggtcacggtgccggcggcgaactggttgagcaccgacagccgatgcggatcggccttccagaactcgctcgcctgcccggcccgggtcaccgggaaccagcggcccagcgcaccttcgacatagggagtgaggttttcttcttccagcaagaaggagacgaactccttggcgcgcgccttgttcttggcgtccttgaacaccacgcc

SEQ ID NO: 1809 - DNA, 23198 bp, synthetic construct
  misc_feature 1..23198: note = Synthetic
  source 1..23198: mol_type = other DNA
aagcgcgcgccgatttgctgggcgcgttggcgcaagcgccgggaccggtagtctttgtcagcaatgaaatgggctggggcgtcatgcccctgggccgggccgtgcgcgcctttgccgatgagctgggggcgctcaaccaaatgctggccacgcactgcccgcaggtgctgttgatggcggcgggcttgcccatgtcgctcaaatccgcgccgccaggcgtgtgaggggttgttggattgttttgcaaatcaatatgaatttgcaataaacaccaacatgccgaaatgggttgatttttattcctattgatttgtaaaaatgaaaagccctctgcgcacaagcgtcagagggcggagggggctgggcaggcgagctgccctgccgggccggagcctagagcgtgttacgcgcgaatcaggtgatcgaatgcgcccagagcggctttggcgccttcgcctgcggcgatgatgatttgtttgtagggcacgctggtgcaatcgcccgccgcaaacacgccggggatattggtggcgccgtgggcatcgaccttgatctcgcccgtgggtgtcaaatcgatcagacccttgagccagtccgtgttgggcagcaggccgatttgcacgaagatgccttccagccccagattgacgatttcgcccgtctcgcggtttttataggccaggccgttgactttgccctgcgcgccggtgacttcggtggtttgcgcgttggtgaggatgtccacattgggcaggctcttgagctttttctgcaacacctcatcggcgcgcagttgcggggcgaactccagcagcgtgacgtgctgcaccacgcccgccaggtcgatggccgcctccacgcccgagttgccgccgccaatgacggcgatgcgtttgcctttgaacagcgggccgtcgcagtgggggcagaaagtcacgcccttggtgcggtattgctcctcgccaggcacgcccatggagcgccagcgcgcgccggtggagaggatgacggttttggatttgaggcgggcgccgctttcaaactgcacctcgatcaggccgccgggctgggccgcggggatcaggcgcgtggctttttgcaggttcatgatgtccacgtcgtaatccttgacgtgggcctccagcgcggcggcgaatttcggcccttcggtgcgggtgatggaagtgaagttttcaatatccatcgtatcgagcacctggccgccaaagcgctcggcggccacgccggtgcggatgcctttgcgcgcggcatagatcgcagccgtggcgccggcggggccaccgccgatgacgagcacatcaaacgcctctttggcgctgatggcctgggcggctttttcggccgcgccctggtcgatgcggccgacgatttcggccagctccatgcgcccctggccaaagtgctggccgttgaggaagatcgtgggcacgcccatgatctccctggcttcgatctcgccctggtagagcgcgccgtcaatagcggtgtgggtgatgttggggttgagcaccgtcatcagattcagcgcctggatgacgtcggggcagttgtggcaggtgatggagtaatacgtctcgaagtggaagcgcccctggatgcccttgatctgctcttgcagctcttgcggctctttggaagggtggccgcccacttgcagcagcgccagcaccagcgaggtgaattcatgccccagcggcacgcccgcaaagcgcaggcccgtatccacgccggggttggtgatgaggaaagagggcacgcgcgcatcgctgccatcggtgcgtacggtgattttgtcgctctgggcgcggatgtcttccagcagctcgcgcatctgggctgcgccttggctgtcgtccagcgtggcgaccagctccacgggcttggtcaggcgttccaggtaggctttcaattgggctttgagtgcgtcgtccaacataggtgcaaatccttgcaaaaagagggggagggtaggcggggggcggtggggccgtcgttgggctggtttttgcgcgtaaaaaagccccgtgcccgcagggcaggcttcggggctgtgagccaagtgacgcgcgctgggaggtcagcgcgcggccctggccttcatcatcgtggggcgatgtggggggcagtgagcgattaaatcttgccgaccagatccagcgaaggcgccagcgttttctcgccctcttgccacttggcggggcagacctcgccggggtggctggccacgtattgggcggccttgatcttgcgcagcaagtctttcgcgtcgcggccaatgccttcggcggtgatttccacagcctggatcacgccttgcggatcaacgatgaacgtggcgcgatcagccagaccttcgccatcgcgcagcacgtcgaagttgttggccagttggaaggtttggtcgcccaccatgtagtactggatcttgctgatggtgtcggacgaatcgtgccaggccttgtgggtgaagtgtgtgtcggtcgagacggaatacacctcgacgcccattttttgcagctcggcgtagttgtcggccacatcgcccagctcggtggggcagacgaaggtgaagtcagcggggtagaagaagaagacggaccacttgcccagcacgtctttttccgtgatttccacgaacttgccttggtggtaggcagtggctttgaagggcttgatgggggtattgactttggccatgctgtttcctttgtttggagaagggttgatggaggtaactcgcaatggcaggcagtgtaggggttttcccttttttaatctaattgaatgattcgatggtttcgatagtttttagttatctttcgggtggttgatcgtgaacagccgatctcgtctggcgttggcaagggtttccgatgggcgctcgccgtagcgcttgcggtaatcggcggcaaactgccccaggtgggtaaagccgcacgccagcgccacttgggtgacagaagctctgtccgagcacagttgccgccgcgctgcttccagtcgcatgtttttcaggtgcgccataggggaggtgtgcagatggttgcgaaatccgacatgcagactgcgcacgctaatgcccgctgcctgcgctacgtcggcgatgccgatgcagtggggcagatgctgctccatgaattccagcgcgcgccgaataacgtgtggcagcactgtggcggggcggttgctggcttggttgtgcgcttgtaatgccaatagtgcgtaagcgagcgtttgttcgaaatgctggatgtgccgggggtgctcgaacaaagagccgttttcggagatttcggcaaactgccagttgagcaggcggcgcaagctggcgcctgcgggttggctccaatcgatacgggggtgaaattgcagcaccgcgccggggtcttgcccgaagtagtcgcgaaagtggcgctccagaccgtgccggtcgatgcggacaaacaatttgtcggcgtcatggctgtgctccatgcagaactgctgcgcagggctgatgaccgaggccagggtggcggtggaggaaaaacaggcattgggggtgtggatttgctcttgcccgcgcaatggaatttgcagcaggtagaagtcgtcaagcggctgcggctcaatgcgaacttgcgcgccgtagcgcagacggccataggccatatcctgcccttgacgcagaaacaagtgggtatccaggctggcaccctgatcgagcaggatcagcttgtgggggcagaagacctgcgtgatgtggcgctggacatgccccacatcgcaggagcgtagctgcgcatgttgcgtcaagaaagaagccatagcggacaacgggcaaaagccgattgccatcttggcatgcttgagggcggcaggaaatcaaggctatccctattgctttggctctcaatgatcggtacggcctcgcgctttattgccaggccaggcagcgcaggtcgtttgctgcctggccgctgccatggggcagttggttgctgtgcgctgcgctgttatgcctggaagcgcccaaagcggccttgccagtacagcaaaggcgaatcttccagaggctggggcagatgcacttgcagcactttgcccagcacgatggcgtggctgtggcgcagcacgatctcgacgacttggcaggccaaggccgccggcgcaaggcgcgccagccagatgccgtgttcggtacacatccactcatggccggcatagcgctgttcgccttgctcgccttggagtccggcaaactgctgcgccaggcccatttgcgctgcgctcaagatattgacgccgaacagtccgctatcgcgcagcaaaggccatgaagacgcgctttgattgatgcacaccaggatttctggcggctcagccgataccgatgtcacggaagtggcggtcaagccgccccggcgcccttgatgcgcgacggtgatgacgttggccgttccgcccaaatggcgcatggcctgcttgaattgatcggcagacaccgcgccgggcaggcgcccatcgtgcggatgggcaatggctgctggcaggggcttggaaaccatagggtgacccatgtccaactggccttagcggatgccgcgttgttggagcaggggaagcacggtgtcgcggaagtaggggaactcctgcacgtagtcgaaaaacgagagcgtggtgccgcgaaaaccggcttgctgcaatgcgcacaagcgctcggccacttgctctggcgtgcccactaaaggaaagccgccgtggcccgttgccatgcgctcgcgaatttgcgccagcagctcatgggggaaggagtgggcgtgtgcaaattgcagatgcatgagattgtccaaagcgccctcatcggtgttttggagctggcgctgccattcctgcttggcttcggcctcggtggggcggcagatgacatgggagaacgtcatgacgtccaccttgcggccctgcgcctggccctgggctttgagcgcggcgatctcttctgccgagcgctccagttgcatggcgggcgtaaagagaaagttggcattgcggctggcgaattcgcgcccctggccggagccagccgcattgaaaacgggaggatcgaactcgggacgcggattgccatacacgcctttgagctggaaatattggccattccaatcaaaccggccttcgtgatgccagattttcttgatcacatcgaaccactcttgcgcatagccgtagcgtgtttcgtggtcatcgggcagggcaatacccagggcgtcgtattccggcttgttccagcccgccacgatattcaggcccacgcgattgccgctcatttgcgccatggtggcaatttgcttggccagcgcgacgggatggttggccacggtatgcacggtggcaaagacgctgatgcgccttgtatgggccagcaaggcggtcgcccacgtgatggtttccagcacatagccgtggaagtcggtttggccgccgtagccaatccagcgtgcaatcggcagcatgaagtcgatgcccgcctcgtccagcatgcggccgagcttgaggttgttgtcccaagtggcttgccagcggtcgggcaaggtggataccgtcatgcccccgccgcagttggaagcaaaagtgccgagcaaaaacttgtcgtgggtcaataaagcgttttgggccatggtgtgtctcctggatattgttggatgaggccagcccgcgctggtgctggcgcggcacagtctagggagacggcccatgcagctctatcaaaaaaatgcggttttatcgaaaggctgcaattgattgattgccgtggatggccgtggcagatgttttggcgcggatgcgcgcgcgagacgcagcacacaccgaggcaggcgagcggctggcttgggcaggcttttacaatcgcgcccggcccaagcagaccgtgagggctcatcaaaaggagccttgtatgccagagagtgcccgtgctgcggccgcgcctgtgggtgtggccgattcatccaaagtcgtcaaagcctatcgactgaaattcaccggcacgggggcagagtactttcgcgtctggttcgtcaacatgctgttgatggttctcacgctgggcatttacaccccttgggcgcgcaagcgtacggtggaatattttttcggccatagcgtgttggcgcggagtccgctggagttcacggcggaaacccggcgcatagtgattggctttttcgtctttctggggctttacagcttgttcaagcaagccaccaacagccagaacgcgctgctggtggggctggcgctgctggcggcggcggtatcggtgccgtttttgtgggggagtgcgcggcgctttcgcgttaccgccacacgctggcgcggcctgcgcttgcgttttggcaccagttggaaagagatttactgggccagttggcctgtgttcgtgattgcgctggtctggttttgtgtgtacgcgggcatcgacatgcgccacaccttcacctcgcccagcctgctggaagaaacccgccccaaaacgtttctgggcctgacggtgatcgattggatattggtggcgctgggcctggtggtgagctggctgtgctttgtgcgggtgatgttcaattaccagcgcttgacgattgagcgcacctatatcggggtggaacagggcgtctttcgcggcacttacggtgatttcgtgcggatttggctgggcgcaaccctgattgcggtgctgggatttgcgaccgttgtcacgggggtcagtctgctgcttgccgagcaattgcccagccgtttcggctgggatgagcaggtcgaggctgctgtggagcaagccgctgcggaagaggacgaattcagccaggcgcgcaggcagctttacgaaaaaatgcaggagcaactggagcgatcgccccaatcggtcgattgggaaaccttccgcgtcgagatgcaggccattgaggaggcccgccagcaaaagtgccgcgaaccgggccagagccagcagccttactgccaaagcgctgccgggtggtggacagaaggcgaagccgatccggccgaggcagagaccgatgaggcagcgctggaggcgggcggcgccgatttcgtcttgatcgctctgatagtgctgtcctggctgcccatgctgctggtgttcgagatcgcccacgcctaccgcgaggccaagcagcaccggctggtgtggaatctttcaggcgtgagcgatattgcgcgctttcgctgcaagctcagcgtgggcggttacgtgtggctgcggctgcaaaactggctgctcaccgtcatcacgctgggctttttccgcccctttgcgcgggtgcgtgaataccgcgcgcgctggacttccaccaccgtgcacatccgtggcggagcctcgcgcctgcaaaacctgctgaccatccagcaagaaggcggtgcatttgccgatgccgttgccgacttcgctggctttgacatcgtttcctgagcacgaggccatttgccatgcccagcgcagcccctgaacatgccgcggcccctgctgccgcgcccccgcctgtcctcaaagccttgtggttcgacggcgccagcagcagcggccagcgcgtgctggccctgattgagccaggccccaaggggccgcggctgacgctggcgccgctggaccccgaggccctgggcctgacgctggacagccccgacgtgaaatggccccaaacctacggcaaggccgaccccaagcgccgcctgacggtgaacttgggcgagcacggtagcctgcaagtggccaacgctgcgcagtggcaccgtgcgtatgagctggcaggtgggcggcgcaagatggccgaacgcttgcaaacgggctggaaaatgctcatcggcttcacgctggcgtgcgtgcttttgctggtggcctttttccgctacggcaccccctgggccgccgggcaactggcgcgctttgtgcccctggggtgggaaaccgcgatgacggatggtttcctggagcaaatcgagggccagttctttcgccccaccaagctctctgcccagcggcaaagcgatttgaaagagcgctttgccgccatgctggccgacatccccgagcgcatgcagcgctacggcggctaccaacccttgtggcggctggagtttcgcgccagcttcatcggccccaatgcgctggccttccccggcgggctggtggtggtgacggacgacatggtcgaactggcccaggccaaaggcttgggcgatcacgccctgatgggggtgatcgcgcatgaaatcggccacatcgtgcaccgccattccagccgcatgctgattgagcaaggcgtgctcaatgccaccctgagcgtggcgctcaacgacgtttccagcatggtggcgctggccagcaccagcttgacggtcttgtcctacagccgcgaccacgagcgcgaggccgattgctttgccctggccctgatgcgccaccagcgcatcgaccccaaaggcttggcccaactgtttgccgcgatggaaggccgggctgtgcctgtcgagaaaaacgcccccgaaagcacccctgaaaacgcccccaaaaacgcgcgcagccaagggctggattggctctccagccaccccggcacgcaagggcgcatcggcatgttcgcctcaggtcaatccatgcagtgcgatatggaaacggggcggttgctctaatgctgcggatgagcggcgatgatccgcatgggccatgccgggcggcagcggtgtgcgctggcgcggcgctttgcgtgatcttgaccggatgcgttgcgcagccttcagccccccaagcccctggggcacagcaagccgtggcggcagtgcaaggctatttgcgcagcaaggggcgcgacaccgcctggcccgccctccagtgcgaagcgctgcaagggcccgaggtgcgggcgctgggcgggcactaccttgtgctgtgcgacttcgatgtgcagcagcgccagtggggcaaccacaccggctatttgctgggcagccaactggagttgctggaggtgattccgggtaaatgaatattccaaatcaatggaaaatccgcttgagtacagaattgccgaaacatggcaatttgttttctttttgatttgtaaaataaagacatgggaagggcttagcgcgtgggtgcggccgttttgggctggtaatcacaccaagcgctgacgcggcactcccagcaacgcggcttgcgtgcctggcacacatagcggcccagcaggatcagccaatgatgggcatggacggcatagtctttgggcacgcgcttgagtaattgctgctccaccgccagcggcgttttgccaggcgccaggcccgtgcggttgctgacgcgaaagatatgcgtatccaccgccatcgtcggctggccgaaggccacgttcagcaccacattggccgtcttgcgccccacgccgggcagggcttccaacgcttcgcgcgtgcgcggaatttcgccgccataacgctcgaccagaatctgacaagtcgccagcaggtttttggccttggtgcggtacaggccgatggttttgatgtgctcctccagcccctccaggcccaaatccagcatcgcctgcgcagttccggcgacgggaaacagccgacgggtggccttgttcacccccacatccgtcgcctgcgccgagagcagcacagcagccagaagctggaaatcgctgccgtattccagctccgtttgcggatgcggattggccgcctgcaaggcggcgaagaagagggggatgtcggctttcttcatagacagggggcggatgcgtcgcccgaaaaaggtgaaagccgggcatgcccggctttccattttttgcatctagctacaaaagcaatcagcttgttagcggctaaagcacaaatcccagtgaactgagtgccaccattgtacctgttttaagaaacaatgtattgcataaagttgtaaaaagtagaaaatgttttcatgtcaaaacataaacctactattcgttaccgattggcccttgatttgggctctacctcgctgggctgggccattctgcgcctgaatgctgacaaccagcccaccgccatcatcaaggctggtgtgcgcatcttcagcgatggccgaagccccaaggatggttcctcgctggccgtgacccgtcgcaccgcacgcgccatgcgccgtcggcgcgaccgtttgctcaagcgcaaggcgcgcatgagggacaagttgattgaatacggcttctttccgcagggcgtggttgcgcgcaaggcgcttgaggcgctcaacccctaccaattgcgcgccgagggcttgcagcgcgcgctgacgccaggcgagtttgcccgcgcgctgtttcacatcaaccagcgccggggtttcaagagcaaccgcaagaccgacaagaaagacaacgacagcggtgcgctcaaaaccgccatcaaccaattgcgccagcaattgcaagacgaaaacgcccgcacggtaggcgagtggttgtggcaacgcctacaggctggccaaggcacacgtgcccgctatcgcgaaacgcgcatcaccaccgaagagggaaagaacaagatcgacaagagctacgacctttatgtggatcgccagatggtggccgatgagttcgatgcgctatgggctgtgcaggcgggcttcaatcctgccctgtttcatgaacaggcgcgcgccgagttgagcgacaccctgttgcgccagcgccctctgcgcccggtcaagccgggacgctgcaccttgctgccagaagaagagcgcgccccgctggcgctgcccagcacgcagcgttttcgcatcttgcaagaagtgaatcacctgcgcttgcttcagcacggtatgcgcgaagaaccgctaacgctggcgcagcgcgatgccatcgtgaacatgctggaaagcagcggcaaggtcacgttcaaggccatgcgcaaaaagctcaagctgggcgacgtggtgcagttcaacctggaagacgccaagcgcagcgagctcaaaggcaacgccaccacggcggcactggccaaaaaagagctgtttggcaccgcatggcacgacttcgacgaaagcttgcaagacgagatcgtgctgcgcttggttacggaagaaagcgaagccgagctggtgcaatggctgaccgaaaacactggcgtggacgaagcgcgagccgcagccattgccaacgccggcctgcccgaaggctacggcagcctgagccgcaaggcgctggcgcgcatcgtgcccgcgctgcgggccgaggtcatcacctacgacaaggccgtgcaggccgctggctttgcccaccacagcgacctgggctgtggctttgagcatggcgatgacgaagtggcgcaaattggcgagcgcgtcattgcatccacgggggaaatcaaaccggtgcttgccttcaagcaactgccttactacggccgcgccctgcagcgccatgtggcttttggcagcggcaatcccaaagacccggaagaaaagcgctacggcaagatcgccaaccccacggtacacatcggcctgaatcaggtgcgcaaagtcgccaatgcgctggttcgacgctatggccgccccgccgagatcgtggtggaactggcgcgtgacttgaagcaaagccgcgagcaaaagctggaaacgcaacgcaaacaagccgacaagcaaaagcgcaatgcacgcatccgtgcagaaatcgcacccatgctgggcatcagcgaagagcgcgtgaagcacgccgacatccagaaatggattttgtgggaagagttgagctttgacgcggccgaccgccgctgcccctacagcggcgtgcaaatcagcgcggccatgttgctgtcggagcaagtggaaatcgagcacatcctgcccttctctcaaacgctggatgacagcctgaacaacaaaaccgtttccatgcggcaagccaaccgcatcaaaggcaaccgcacaccttggcaagcacgggaggactttgaagcgcagggttggagctatgacggcatgttgcaacgcgccgagcgcatgcccaaagccaagcgttaccgctttgcgcccgatggttacgaacgctggctgaaagaagaccaggattttctggctcgcgcgctgaacgatacgcgctatctctcgcgcatcgccaaagcctatctgcaactgctgtgcccgcaaggcacacgggtgatacccgggcaaatgacggctctgctgcgcgccaagttcggcttgaatgatgtgcttggcctgcatggcgaaaaaaaccgcgacgaccaccgccaccatgccgtggacgcttgcgtcattggcgtcaccgaccaagccttgctgcaacgctttgcccaagccagcgccgcagcacgccagcaaggtctggaaaaactcgtggaggacatgcccctgccctgggaaagctaccgcgcgcatgtagagcgcgccgtgcaaaacatctgggtcagccacaagcccgatcatgggcatgagggggaaatgtttgatgcaacgatctacagcgcatccggtcaaagccggatggccgcaaaagacaggaaagttctaccgttccacgcacgaccggaacatgcacacctgagtcgctatcgtgacaaaaacaacgcgccaaaaccctacaaaggcttgctgagcaatagcaactactgtattgaaatcacacgcaatgaaaagcgagactgggcaggaaaagtcatttcaacctttgatgcctacaagattgaaagagagctgctacgcgcctatagaaataaacatggaaaaaatgccagctcacttgctttgcttgatcttctcagcaatcatgagtccttcgatggtcaacctttggtcatgcgtttatgcaagggagactgcatagccattggtcaaggaaaagaaagagaagtgctgcaagttctgaaaatcaacagttccggctcagtcaccttcatcaaacccaacgaaaccaatatcagcgcacgctatctggcaaagcttgcagcgcaaaaagaccagaaggctggcaagttctttgatgaggctgcattgaacgacgtgttttttcaaaaagctttttccgcagggagtttgctggaggccaaagcccgccgcgtcaccatctcgcccaccggtgaactgcgtgaccccggcttcaaaggctgatcaaggggcgcagtatgatcgggcgcattgttgaaattgcagacgaccatcgacatctcttcgttaatcgtggtttcatggtggtgcgtgacaccgagggcgagcgcaaggagctggggcaggtgccgttggacgacatcgccgccgtcatcgccaatgcccacggcatcagctacaccaacaacctcctggtggctctggccgagcgcggcgcgcccttcgtgctgtgcgcggccaatcacaatgccgtgggcatgctgctgacgctggacggccatcacgtacaggccaagcgcatcgaagcgcaaatcgccgccagcttgcccacgcacaagcggctgtgggcggccatcgtcaaatccaaactggagcaacaagccgccgcactggaggccgcaggcgcgcccaccgcgcccttgactgcgttggtgcgcaaggtcaaaagcggcgatccggaaaacgtcgaaggccaaggcgcccggcgctactggggcttgctgttcggcaaggacttccgccgcgatcagaatgccggcggcctcaacgccctgctgaactacggctacaccgtcctgcgctccgccaccgcccgcgccacagtggccgccggcctgcatcccagcattggcctgcaccacagcaacgatggcaatgccatgcgactggtcgatgacctgatggagcccttccgcccggtcatcgacctgaaagtctggcaattgcagcgcgccggtgaagaacaggtcacgcccgaagccaagcgcgccttggcgcataccctttatgacgacatgcaaagccgcgctggcgtcaccccggtgatggtctgcatgcagaaactggccatctcgctggcccaagtgtatctgggcgaacgcgacaagctggaactgccgctgccgggcttgccgctcgctctggcgaaaaacttgaacccagaatgatgcgatgccatgctttcaggataccgactgatgtggatgctggtaatgttcgatttacccgtgctcaccaaagccgagcgcaaagctgcaggtaattttcgcaaggcgttattggatatgggctttgagatgagccaactcagcgtctatctgcgcttttgcagcagccaaacccagcttgatacctacacccgccgggtagaggccatcttgccggtcggtggtaaggtcagcgtattacagttcactgacaagcaatacgaacgcatcttgacatttcagggaagaaccaagcagccaccgttgaaaacgcctgagcagttcacacttttctagccagagtgatgttttttctcttctcgaaaagcagaaaaccccttgtaaaaacaaggggttactgcatagggattttagatcactgggatttgtgctctaaccggaactaaccttagagtgtaacacactcgctgacattttagatcactgggatttgtgctctaaccggaacaggcgcaacgcccaggcgctgggccagctcattttagatcactgggatttgtgctctaaccggaaccgctggcccgatggggcctaccgctattgaattttagatcactgggatttgtgctctaaccggaacatacgcatccactgcctcctgatccgccccattttagatcactgggatttgtgctctaaccggaacttggagatagaaaaatggcaatcgagcaatattttagatcactgggatttgtgctctaaccggaaccactcggtgaagggccgtttggggaagatgattttagatcactgggatttgtgctctaaccggaacggactagtcgtgatatttgtgacgataggcattttagatcactgggatttgtgctctaaccggaacatgccctcgcgttttacgagggcatcgtcaattttagatcactgggatttgtgctctaaccggaacagaggacttctacgacgccgccgctcgtaaattttagatcactgggatttgtgctctaaccggaacccggctttggcgaagaagtacaggggtgagattttagatcactgggatttgtgctctaaccggaacgaatgtccaggctgatcaagaatggacggcattttagatcactgggatttgtgctctaaccggaacacgtcgcgcaggcgtttgtccagctcggcaaattttagatcactgggatttgtgctctaaccggaacgcccacaccgcagcatcgttttacatcgacattttagatcactgggatttgtgctctaaccggaacgcccacaccgcagcatcgttttacatcgacattttagatcactgggatttgtgctctaaccggaacaagtgtgtgagataggacatggtttgatccattttagatcactgggatttgtgctctaaccggaaccccaaaccatttcgcatgcgcatcattttattttagatcactgggatttgtgctctaaccggaacggtgccgtatggctcgtcgttactgcctaaattttagatcactgggatttgtactctaaccggaacttcttgatctcccctgcgcaataccgatcattttagatcactgggatttgtgctctaaccggaactggatttgaccgctggctgctttggctcaaattttagatcactgggatttgtgctctaaccggaacgggttcttcgaggtggagtcgtgagcttgcattttagatcactgggatttgtgctctaaccggaacgtggagagccgttgtggatgccgtcaacatcaattttagatcactgggatttgtgctctaaccggaacggcattcaatcgtgacaacctatctgagtcattttagatcactgggatttgtgctctaaccggaaccggggtcagctcgggcgggatcgcccggccattttagatcactgggattttttccctaaactaaaaaaatcgcataggcgactgcgtcggcgatcgcgcgttgaataggggcgatgaggcgttgaatggctgggaggatttttctattcaatcaacttacttttacgtaattccaatatcgtctttgattcaaaacccaattcttgcaatatggcttgcgtgtgctcgcccagttggggcgggttttggtaggtgcgcaggcgctggccgtccatgcgcagcggcagcagggttgcgtgcacggtttggccagcacgggcgccgtcggtgagggtgatcgggtctagcccttgggtggcttgcacatgcgggtcgtcaaacaattgctcggggcgcatgatgcgggcatagggcagggcgtgctgctcgaacagggcggcgatggcatcggcgctgtgcgcttgaagccgctggcgcagctcgggtaagagggtggggcgggcgcgcacgcggtcgttgttggtggccagcgttgcgtcggcggcaaggtcgtcccagccgaacatgccgcacagggtgtgccaatgcgcatcgctgacggcgcacagaaagatttgctcgccatcgcgcaccgtgaagatgtcgtaaatgccccagggggagatgcgctcgggcatggggcgcgcggcctggcccgtgatttggtattgcagcatgtgctggccgacgagaaacaggttgttctcgaacagcgctgcgtccacctcctgcccgcgcccggtgtgctggcgttgcatgagcgcgcccaaagcgccgatggcgccgaacatgccgcccatgatgtcgttcacgctactgcccgcgcgcagtgggtcgcccgggcggcctgtcatgtaggccagcccgcccatcatctggacgacttcatccagcgcggtgcggtgctcgtaggggccgggcagaaagccggtgaggttgatgtagatcagcctggggttgaggcgctgcaagttggcgtaatccaggccaaatttggccagcacaccgggcttgaagttgtgcagcacgatgtcggcgctcaggcagagtttgagggcgatttcttgcccggccgtgcttttcaaatcgatgccaatgctttgcttgttgcgattgaaaagcgggaaaaagcccgcgcctgcgccgagcagcgtgcgggtgctgtcgccagtgacaggctcgaccttgatgacttgagcgcccaagtcggcgagcaccatgccgcacacaggccccatgaccatgtgggtgaattcaacgacgcggatgccttgcaggggcttgtgggaggtgggatcggtgttttcggccatggggagtgtcgggagcagaaaaacgcccatccgaagatgggcgcagtggagaaatgcctatggcggcggtgcgcaggttgatcagcgcagcaccagcacaggcaccgtggcgcgtgtgagcacgtgctgcgtctcactgcccagcagcaggcgcgcaatgcctttgcgaccgtgcgaggccatgacgatcaggtcagcgccgacttcgttggcggtgtccagaatcagatcggaaacgctctcgccgctgagtaccttgacttcggcttgcaggcccatggccttgccttgctccagcactttttccatggcgcggcgcgcatcttcgcgccattggcgctcgctggtctcggcaaattcccggttggacgcagcgctgccttccatgtaggtgacggggtagctgggcgtggcggtgagaatcgtcacgcgcgcgccgctgagcttggccaaatcgaagccgtgcgacacggctttttgcgacagttcgctgccatcggtcggaatcaggatgtgctggtacatggagaagctccttggtttgtggatggaacgttgtttgccagtgtccttgggacgatctttcaaagacggtttcagtatacgggcggatgccctggcgaagcattgatgtggggcaaacaagcgcgttgatggcagcttggactgcgcagtgaaacacatgcgaaattttgagtcgcgtatttttccgctagaatctcgcgcttcgtcggagcgtagcgcagcctggtagcgcatctgctttgggagcagagggtcgcgagttcgaatcccgccgctccgaccaataaacaacaacggcttaccgaattttcggtaagccgttttcttttgtgttctttggtggcgtgaatgccttggcgcgaagcgcaagccgggttgggctgcatgcgcgtggcctgcatagggggagagcaaagcaatgtccttgatggcgcagatggatgcacggcagttgctggcgggtttgctggatggcgctgccgtgcaggccgtggatgtgggcgcgggcgatttgcacgtggtgcaggcgtcctggctggggcagcccacggtgtgggtgtgtttcgactacggcgccagtcaaggctcgattggcgtgcaagaagcgcagcagttggtggcgagtttgcgccatgcacagcagcggcacgcgcgggtggtgtttgtgatggagagcggcggcatccgtgtgaccgatagcacggcggggattgcgtcgttccgccacgtgattcgggcggcggcgcaggcgcgcctggcagggatgcgcatgctggcggttgtcgggcgctgtgcgtttggcggggccagcatcctggcgggtatttgcgagcgctgcgtggttttcccccacagcattttggcgatgagcggcccccgtttgctcacgcatgagatgggcgaaggcatttggaatgctcgggatgcgagcgtcgtggcgcaatggctgggcggtgcagcccgggcgcgggccagtggacgctttgatttggtgcacgatgtgccagcatgccgcgccgcgttggcaacgtgggcggggagcgcgccattgccgccagcgccagagtcagacgggatggcctgcccggaactgccgcccgcccaggagctggccgcgtcacctgggcagcctggcccgggcctgatggcgtgcggacaagccttgctccaaccattggatgcccaggcagccggctgggagcgcttgtcggcgcaggtgtatcgcttgcgcgcagccgtcgccccagacgtgcatgtgctggcgctggaggcccccgagggcgcgcgcgtgcgcgatgtggcggtgctgatgcagcagttgcaggcgctgcgcccgcgcctggcgtctggcgccgtgcaggccaagctgttgatcgtgctggatgcgcaaagccacgcggcccgcctggaggatgagcaagcggcgttctcggtggtgctggccgatttggtgctgttgctgcacgtgatgcgacgcgagggcgtgcaggtgcaattgcgggttacggggcgctgcggcggcggcatttttgcggccttgagcgcaggcgtgggcgaggtggtgatggagccttcggcgcgtttggtcgtgctgccgcgcgctgcgctcgcggcgctgggcaagcaggaatcgcccgaggcaggctccgcgcaaatggcgctggccgtgggggtggtggatcgtgtgctggagcacgatgccagcggcctggatgcggcgtgggcgtagcgcccggcctgcgccgtgcgcaaaaactttccggcggtttctgcgagtcgggctttggggcgctctcaagcggctgctgagcgattgcagggcatgtgtagcgccatgcggcagtgctgtattttacgattcaatgtaaaaatgatttcaatgcagttatgccgaaatggggtaattaattttctttttgatatataaaaaggtcaaccttcctcgcctggctgctccatttgtgcgctggcgtcgggcgagcgggggtagcgtttgatggcggtgcggtacacatccagcacctcgtcggggttggacatggtcacgcccaaatccttgaccttgccgtctttcaagccgtagcaccagccatgtaccgccagcggctggccgcgtttccaggcgtccagcacgatgttggtttgggcaatgttgcccacctgctcgatcacgttcatttcgcacagcacatcttcttgcgcctggctgcataggtgcatgaggcggccgcggtggcgcatcttcacgtcgtgcacgtggcgcagccagttgtcggccagccccacgcgcgcgccatgcagcgcggccagcacgccgccgcagccgtagtggcctacgaccatgatgtgctcgaccttgaggtaatcgacggcgtactggatgaccgacaaggcattgaggtcggaatgcacgacgacgttggcgacgttgcggtgcacgaacacttcgcccggcgccagcgccacgacctggttggcgggcacgcggctgtcggagcagccaatccacaggtatttggggctttgctggtgcgagagcttttcaaaaaagccgggtttttcgcgcgcaacttgttcggcccaggcgtggttggcgtcgagaaggtgttggaggctgctgcgttcggtcatgtggtttgttgtagtcgttggagcatgaaaaacggcgcgggaaggcgccgttggtacgaggggaacacgtgcgaagcgcacaggctgcgcgccttggctgcgcggcctgtgctgccgaggcattacatggtctcggcaaacagctcgcggccgatgagcatgcggcggatttcgctggtgcccgcgccgatttcgtacagcttggcatcgcgccacaggcggcccagcgggtattcgttgatgtagccgttgccgccaaagagctggatgccgtcgccggccattttggtggcctgctcggcgcaccagaggatgacgctggcgcagtccttgcgcacctggcgcacgtggcccgcgcccagcacgtccaggtttttaccaatggtgtagaggaaggcccggcccgcttgcagcacggtgtacatgtcggccaccttgccttgcacgagctggaattcgccaatgctttggccgaactgcttgcggtcgtggatgtagggcacgacgttgtccatcacggcctgcatgatgccgatggggccggcggcaagcacggcgcgctcgtagtccaagccgctcatcagcactttcacgccgccgttcaactcgcccaggatgttggcggcgggcacttcgacgttgtcgaacaccatctcgccggtgtggctgccgcgcatgcccagcttgtcgagcttttgcgcggtgccaaagcctttcatgcctttttcgacgatgaaggcggtgatgccgcgcgcgcccagctcgggctcggtcttggcgtaaacgaccatggtgtcggcgtcggggccgttggtgatccacatcttgctgccgttgagcaggtagtagccgcccttgtcctcggccttgagcttcatgctgaccacgtcgctgcctgcgccgggctcgctcatggccagcgcgcccacgtgctcgccgctgatcagcttgggcaggtatttttgcttctgctcctcgttgccgttgcgcttgatctggttgacgcacaggttggagtgcgcgccgtaagagaggcccacgctggcgctggcgcggctgatttcctccatcgcgatcatgtgggccaggtagcccatgtcggcgccgccgtaggcttcgggcacggtgatgcccagcacgcccagctcgcccatcttgggccacaagtccatggggaactggtcgctcttgtcgatctcggccgcgcgcggagcgatttcggcttcggcgaaggtgcgcacggcgtcgcgcagcgcgtcgatgtcttcgcctaactggaagttgaggccgggcaggttgctcatgagaagtctccttgagtttgtggtgggggaaaagcgctgcgcgtttcaggtgcgcggcaatacagtcatcagcgtgcaatgcatggtggcaaccagcttttcgcgcggatggccgttttcgtgcgtgatgccaaaggcgcggccttcggtcacggtgatggtgcggcccgctctcacgacacggccctccatgcgaaagcgcggggcgtcagcgggcgccagcaggttgatcttgaattcgatggacaaaacatcggcttcgggcggcatcagcgacagggcggcgtagccgcaggtcgaatccagcacggtggcgagcacgccagcgtgcaaaaaaccgtgctgctgcgtcaaaggctcggaccagttcaggcccacatccacggcgcccgcatgaatcgacagcaattcggcgcccatcaggcgcatcacgctttgctgcgcaaagtttttttgcacgcgctcaatgtaactgggcggttcatcgctggagagggtcatggcaggggggatggtgatagcggacaagccggggctggcaggctggcccaaaggccgcaggccaagaattgggccgcattgtgcccctgcccccgggctggcttggttggcgccggggcaattggcaggatctgtgacctggaacgcgtggtttggtgtgatggggcgctggcgggcctcgtcagcggctttgattcgtgaagagtttttatttttcaaatcaaaaagaatgaaaattgccttgtttcggcatgtttttagggatgttggatttaccttgatatagaaatattcagggcaaaagaaaaggccccgttgaaggggccttgaaaggtggggtggctgatgggactcgaacccacgacgaccagaatcacaatctgggactctaccaactgagctacagccaccgagataagcgcgagattatagggtatttttttgccctcgttgtctttatgtactcacaacttagggtttcgggcgctgaaccagaaattcggccttgtagtcgtgcttgagggtttcgtaataagcgctggtttcggcggcagtgagcatttgggccagttgcatgtcgtagcccgcttgcagcaattgctgctcttgcgcgtcttgcgacgggtccagcagcggggccacgtccttgacttggacgacgaggtagctgccatcgttttggggcaagcccagcagttggggcaagctggccacgggctggagcatgatttgctcgatgctggcggcatccaggccgtgggcgttttgccgggagatggccacgctttcatcggcgcggatggcggccgcatcggccttgccgctttgcagggcggcttcgcctgcgg

SEQ ID NO: 1810 - DNA, 23180 bp, synthetic construct
  misc_feature 1..23180: note = Synthetic
  source 1..23180: mol_type = other DNA
aattttgcgcgtaacaaattcgcgcccgcgcaagggggattcgtggttaaacaaaatgccgctggatgcaaaaatgttgtaactttctcggtagttgatggtcatccaatgcgcaaacaatttggcaacaccgtaaggacttctgggataaaacggcgttttttcgttttgcggaatggcttgcactttgccaaacatttcagaagtggaggcttggtaaaagcgaatttttggattaacaatgcgaatggcttccaacaaatgcaaagcgcccaaaccggtgatgttggcggtggtaatgggttcttcaaaagagacgcccacaaaactttgtgcagccaagttgtaaatttcatcgggcttggttttgtccagcaagcgaatggaagaagaagcatcggttaaatcgtattccaccaatttcaaatggggatgatttaaaacgtttaattcttccaaacgccaaaaattaaccgaactgttgcgccgataagcgccaaaaacgcggtaatttttttctaataaaagtgcggttaaataagcgccatcttgcccagtaatgccggtgattaaagcggtttttgccattttgttttgtcctttgttgttttgttaattgcgtccgtaaatatcttcaaaacgcacaatgtcgtcttcgcccaaataagcgccggattgcacctctatcaattccaaaggaatgctgcccggattttccaaacggtgtttcacgcccaagggaatgtaaatagattgattttcagagagcaaaatttcttcatcccctttggtaactttggcggtgccgatgacaataatccaatgttccgcgcggtgataatgcatttgcaaggacaaagccgcaccgggattgaccacaatttttttcacctgaaaatgattgccgcaatcaatttgctcataactgccccacgggcgcaccacgcgttttcgttcataggcttcaatgcggttgtgtgcttttaaaaacgccaccacgtttttgatgttttgcaattctttaaaatccgccaccaaaagcgcatcgttggtttccaccaccaccatattgtttaaacccaaacacgccaccaacttgctttcggcgcgaatataagaattttgggttttttctaaaaaaatatcgccacttaacgcattgccgttttcatcttttggggacaacgcataaagcgcatcaaaagcgcccaaatccgaccaatcggcagacaattccacaacgctggcttgatcagaaggcaaatgttctgccacggcataatcaatggaatccgatggcgattgttcaaaatcggcttgattcaaacgaataaactctgaattttgtttaccgttttttaaagcattttgggcgcattccaaaatgcgtgggttttgcttttgaatttcttttaaccaaagtgcgctgttgagcaaaaaaattccgctattccaaaaataattgccgctttgcacatattcttgcgctttgatttcttgcggtttttcaacaaattgttttaattcaaaaacgccagaagataaatttttgccttttaaaatgtaaccgtaacccgtatgcgcactttgcggcacaatgccaaaggtgatgactttgttttgttgcgcttgcccaatgccttttaaaaccgcttgttgaaatgccgctttgttggcaatgacgtggtcggatggcatcaccaacaacagcgactcgggattattttcaaccaaagccgccaaggttaaagcgggcgcggtgtttttgccgatgggttccaaaacaatgcgggcattgtggatgttcatttggcgcagttcttctgccacttggtaacaataggcttcattggcaatgacaatgggcggattttgcgcaaaatccaagttttccaaacggcaaagtgtggcttttaaaagggattgcgtgccgtttaaatttaagagttgtttgggatatttttcacgcgacaatggccaaagccttgtgcctgcgccaccgcataaaataactggcgtgattgccattttttgttttcccctttttcaaaaaagtcaagttgaccgtggatttttaaaaaaaaacatttttccacggtcaacgtgaaaaaaattttaattttgtttggccaaataatcttctagcccgcccaaataatccacaatgttgccatctcccttgatttcccaaatgcggctggcaagggaagagacaaattctctatcgtgcgagacaaaaatcaacgtgccgttgaatttgtctagcgcgttgtttaaggcttcaatggattccatatccaaatggttggtgggttcatccatcaccaacacattggcgtggcgcaaaatcaaacgcccaaaaaccattctgcctttttcgccgccgcttaacacattaaccgattttttggcttcatcgccagaaaacaacagccgccccaatgtgccgcgcaccaaggtttccaaatcgccatctttgtcggcttcggtaatatgattgcgcatccaatcggctaggctttcattgctttcaaattctttggaatggtcttgcgggcaataacccaactgcgctttttccgaccatttgattgaaccattttgcggcgttaattcattcattaagagttttaaaagcgtggttttgcccacgccattttcaccaataatggcgattttttcgcccgctttgatggttaacgtttggttttgaaaaattggtttgtttgcttcataagaaaaagtcaaattttcaatttccaccgcttgccgatgcaatttgtttttttcatcaaattcaaaacgaatccacggatattgccgtgaagaaggttgaatgtcttcgggtttgagtttgtcaatcaatttcaagcggctggtggcttgtttggctttggatttgttggcagaaaaacgccgcacaaaatcttgcaattctgaaatgcgctctttggctttggcgttggcggcataaaggcgctcacgcgccaaggtggaagcttgtaaaaaatcatcgtaattgccggcataagtggtgattttgccgtaatccaaatccgccatatgcgtgcaaacttggtttaaaaaatggcggtcgtggctgatgataatcatggtggaattgcgctcgtttaacaaatcttccagccattcaatggttttgatatccaaatggttggtgggttcgtccaacaacaaaatgtcggggttggcaaaaagcgcttggcaaagcaacacgcgcaacttccagccgggtgccacttggctcattttgccgttgtgtaaagacaaatcaatgcccacgcccaagagcaattcgcctgcgcgcgcttccgccgtgtagccatcaaattcggcaaaaacgccttctaattctgccgcgcgcatgtaatcttcttcggttgagttggggttgtcgtaaatggcgtttttttcttgttgcgctgcccacatttcagaatgccccatcatcaccacgtctaaaacgcgctcgttttcataagcgaattggtcttgttttaaataagccaaacgctccatagggtctttggaaacattgccggaagtgggttctaatgagccgcagagaattttcattaaggtggattttcctgcgccattggcgccgattaagccataacgaaatccgtctgcgaatttgatattgacgttttcaaacaaaggtttggcaccaaattgcatggtgatgttggaagcgattaacatttttttaaatggtttaaagaattaaaaacttggcattctagcaaaatgcacttttccacggtaaacccaaaatttttttgaaaaaaattgggcgttgaccgtggattttctcattttttaatttgttttaattgacactaattcttatttaactaaaattcgctttttgatttggaaaaggtttgttatgaattcccgcatttttacgctttccttattgggttttgccattgtcaatgcttatgccgaagaattgaccagcgaaacggtgaatgtgacggcaaaaggttatgcggcgcagaatttggaagtgccgatgtcgaccatcggcttaacgcaagaagaaatcacccacaaaggcgcaatgaatgttggcgatgccttgcgtggaatgccgggcgttgcggtctcgcaagatagtgcgcacgggcaaaatccgtatattcgtggcttgggcaaagagcgcattgtggtgatggcagatggcattcgtttaaacagcgccgagccaaacggcgccttggcttcttttattacgctgggtttggcggaacaattggaagtggtcaaaggtgcttcatcggttctttatggcacgggcgcggtaggtggcgtcattaacgttttaatgccgcaggcggtgtttgaccagcccaatcgcgcccgcgcaagtttaatgtttgattcttcatccaccggcggtaaaggcgctttggttagccaaatgagtagcggcgaccacgcgtttatgttcggcgccagttacaccaatatgggcgattttcgctcaggtgctggcaaagaaaacaaaaccggttatgatagccgcgcttttattgggcaataccgctaccgtttgaatgcccagcaccaagtgcatgcgagcattcaatggcaagaagataatgatgtttggtatgtgggctccaaacgcccgcatcaaagcaatcggcaaacgcgctacacaatgatgcgctcgcccgagcacgcgcgccgactttttgaagcgggttattcttttaaagggcagggcgaaaatcctttgaatgttgatgtgcgcttgtatcgccaagccattgaccgcgatatgtataactttgccaactgggtcaatggcgacattgtgcaaaattcggttagttttgccaccaacggcgtggatgccaaagcacagtggttgtggaatgaaaacaatttgttgagttttggcgtgaatgcgtggcaaatgaaagcatcgcccgatgccaaacaagcatcaaatgcagccaaagtgagcaatgcggcacagttgcgttaccaaagaaatttgccgtttaaaaacggcgaaatcacctccaccggtttttttgtgcaaaatgacagcacatttggcgcgttgaatttgttggcaggtttgcgttacgacaaggttcaaggcgatgcggatagtatgaacaacggcaaacagaccacgggtttaaagcgcacggataatgcgttgagcggtaatttgggcgtgatttatgaagtctctgccttgtttcgcccttatgcgcaatatgcccgcgcttttcatgcgccattgcttcgtgagcgttaccaatcgggcgtcagaaatgatggttattattacgcaggctcgcccgacatcaagccggaaaccgccaatcaatttgaagtgggcgcaaaagggcaaaatgaatgggtgaattacgatgtggcgcttttttaccaaaatatttccaattacatatccggcaaaattttaaaggggcaagaagcaacaaaggcttgcgcgcaaaatgccgctgcgtgtaagaaaaacgtgaatgtgggcaaagccagaatttacggcattgacgcttctgccgattggcaatttgtaaatcagcaatggctttttgcgcgcttgtcggcaattcgcggggaaaacaaagaattgaatgaaccgctttttgaaattcccgccgatgaagtaacgcttggttggcgcggtgcgctggcgcaaaaagtcagcgccgattttgcgctgcgtttggtgcgcgcgcaaaatcgcgtggcaacccaatttaccagcggcaatgaagacaaaacgcccggctttgcaacgtttgatttgggcgccacgtggcgttattccaaagacggcaacttgcgcttgcaggtgaataatttgttggataaaacttaccacgaacatttggcagaaggtttgccgggttatgaattaaacgccaaaggcagaagttttcaattgatttggatgggcagtttttaaaaaaatccacggtcaacccaaaatttttttgaaaaacgcaggttgaccgtggaaaattgtttttaaaaaataattttggatgaaaaaaatgttcggtttaccgtggaaaattgctgttttttgtttggttttggtgttttcaaatgtttttgcgcaaaatgcgcaaaatcaaaaactatctgagattcgtttgagcggcccgggcgcttttttgtctttgccgttgatttatatggcagaaagcggcgctttaaacgatattgccgaaaaaacaacctttcaattgtggaaaaaccccgaccaactgcggctttttgttttagaccaaaaaacggatttcatcgccttgccttccaatgtggcggcgaatttgtataaccgcggcgtgccgttgaaactggtcaatattgccgcttggggcgggttgtggttggtttcccgccgtgaaaatgtggcgcatttggcagatttaaaaaatgaagaaattgccattccttttcgcggcgatatgccggacattttgtttcaattgaatgcggcaaaggaaaatttgaatgttcaaaaagattttaaaattcgttatttggcaaacatttttgatgccttgcagttgttgattttgcgccaagtagaccacgcattgttgccagacccagccgcttcaatggcattagaaaaatcgcaaagtttgccagtcagcgtcattgcgcccaaactttacaaagccttgcgttttgaaacgttgttaaaagaaaattttaacaaccaaaaattgccacaagccggcattgccgcggtcaatcacgcggcgcaaaattttgcgctgcaaaaccgcatttatgcggaataccaaaaagccttggcgttttgtgaagaaaacgcggctacttgcgccaaaatgatgatgaaatacgcgccgatgttatctacaaacgtggtggttgaatcgctcaaatcccgcgatttgaatccacaaaaaacggcggatgttgccagtgatttaaaagaattttttcttttattaaaccaacaaaatcccaaacttatcggcggcaaaatgcctgatgattctttttttgaataaaaaaacgagttgaccgtggaaaattatcgccgttttttggcaagctttggcgcttatttgtggagcgcttggggcgcgcttgccagcattgctttattttttgccttgtgggcagccgcggcgcaacactatggcgcgttgattttgccaagtccaaaagaatcttttttgcggctttttgcgcttttggaaagcaaagaaaactggatacaaataggaatcagcgcgcggcgcgccatcatcggttttttgttggcggcgctttgcggttcggttttgggaattttggtgggtttatcgcgcagtgcggttttgttgactcgcccgattttaacttttttcattggcgtgccgccgattgcgtggttggttttggcgttgttgtggtttggaatgaacgatggcacgccgattttcaccgtttttattgcgtcttttccgccgattttcatcggtgcattagaaggcacgcgcacattagaaggtgatttgaaaaccttaatccacatttttcgtttgccattgtggatgcgtttgagtgatctttattttccgcacgtggtggcttatttgttccccgcgtggattacggctttgggcgcttcttggaaaattgtggtgatggctgaattgttggcttgcgatgatggcatcggtgcgcttcttgccatttcgcgcagccatttggataccgaatcctccatggcgtggattttgagtttgttggttattttgtttgtgttggaatatttgtttttagaacccatcaaacgcagggtagaagaatggcgcggcttttagtagaaaacttatcgcaccgatttttttggaaagcggtgttggaaaacgtgaattttgcgcttgaatcaggcgaagtgttgtgtttgttaggaccttctggttgtggaaaatctacgctcttgaatttaatcgccgggcttttggtgccgtggaagggcaaaatacaaaacgattttcaaaacccatcattggtttttcaagccccaaggttgttgccgtggcttttaacgtgggaaaacattgcgctgggcttaaaagcgcgcggcgtttcaaaaaaagaacgttttgaaaaatccgtgatttttggaaaaaaaatggggttgaccgtggatgatttgcatcaatatcccagcgccttgtctggcggcatgcaaagccgtgttgctttgtgccgcgcttttgtggtgcaaccggatttgttgcttttggatgaacctttttcggcgttggattggagcttgaaacaagaactctacacattgcttgaaatggagcaatccagcgcacattttgccgtattgatgattacgcacgatcccttagaagccttgcgtttggctgaccgcattttgatgatgcaaaaaaaagatgaatcgcctgccaaaattgcgcgggaatggcgcattccaaccccaaaaaatgaacgctgccgcgcgtggctttcccaaaaaagcacggcatttttggatgaagtggcggcattgttttgagtaaaaaaatgaaagccttgtggatttgcccctttcgtccgtttttctttttaactgccttttcggcaattttttttatcatcatttgggtgttgggtttaaacggattttttccattgccatcaacacttcacccttttgtgtggcacgcttacagcatttattccgccacgctttttgccgccgtggcaggttttatgttgacggcaattccggaatttacatcaacccaaaattcaacaaccccacgcgttttaaagtgtttggtattcgtttggattttggggcgcattgcttttcaactcattgattttttaagtattttccccgccgctttttttgatttaagctttttagccacaattttttatttaacggcgccggcaatttggcaacaaaccccaagaaaacacaccagctttttgtttttacaaatcgctttattttccgctgttttggcgttttatatggcgcttgttgtgtcgcctgactcggcgcttaaaatcatccgcattttgtgccacttgatgatggtgttggtgattttggcaatgtcgcgcatttccatgcgtttgatgaatgatgttttaagccgccaagcgaacattcacacaagctatattgctcgcccgcccaaacgcgctttggcaattgtggcaattttgttgttgtgcatttctgaatttttggcgccacaagcagaagctactttgtggctcaaaattgctgcggctgctggcgtttttcatgtgttaagcgattggcatattgggcgcgccattttttcacgctggacaatgatgggctacattgcttatttttctattgctttgggctatttgctggaaggttttttgccgcttttttttgattttgcgccattgaacattgggctacatttgcgaacgattgcgggttgtggtttggcaattttgctggtgatgtgcgtggcaggcagaatgcattcgggttgggggttggatgttcgcccgtggataatttttgctgccatttttatttttgccgccgctttgttgcgtgagatttattcttttttgggtttttcttttttaattgcctccgctattttttggtgcgctgcatttttgctttatcttattttcagctcacatctttttttaaaacgccccgatggcaaaagcggttgcgatgattccaattgataatgattttccacggtcaacctaaaatttttttgaaaaaaattgggcgttgaccgtggaaaaaagtgttttgattttgtttgaacgcccaaaaaagaaaagacctcggcattgcacgaggtcacatctgttgcatctttaagcttgttagcatccagagcacatatctcaatcaactttgttttactatctatcagttgtgataaaaagtcaaatatttttttgaaaggaaaacaaaatgaacaaaccactgcgttttgcttttgatttgggcagcacttctttgggctgggctgttttgggtttaaaacaaatagaagggaagtttttgcccgattcaattattaaagctggtgtgcgcatttttagcgatggtagagacccgcaaagtgataaatcgcttgcggtaaataggcgtgagaagcgcgcggcacggcgcagacgcgaccgtttgttaaaacgcaaaaacaagatgatgcgcttgttggtggatgttggtttttttccaaaagatttgaatgcgcgcaaagcgctggaaaagaaaaatccttatgctttgcgggcaaaagcattggatgaggcattaagcaaggaagagatggcgcgcgctatttttcatttgaatcagcggcgcggattcaaaagcaatcgcaaatccgactccaaagaaacacaaggcgcattgaaaacagccattgccgatttaacagaacaaattgacctcaatgccgccgatggcaaagccagaacattgggtgagtttttgtggcggcgtatgcaaaaagggcagggcgtgcgtgcgcgtcattttgaagaaaagcaagtggaaaatggcaagtccaaaataaaaaaatattacgacctttatgttgaccgcgcgatggtggaagctgaatttgatgccatttgggcaaagcaaatggcattttctcccaatgtttttactgccgagattggcaacaaactcaaagattgtttgctttttcaacgcaaattgcgtcctgttcaagtcgggcgttgttctttggaaccagaaaaagagcgcgcaccacttgcattgcctttgcaacagcgttttcggattttgcaagaagtcaataatttgcgcattttgaacaaagatttgagccaaacgccgttgagcttggaagaacgcaacatattgttggatgctttggaaaaaaatgcaaaacgcacgtttatacaaattaaaaagttgcttcaattgccgggtgatgttgcttttaatttagaaagcgaaaatcgcacagaattaaaaggtaatgccagcacggcacttttgagcaaaaaagagttgttcggagccaaatggtttgaattttcaatagaagagcagacaacaattgttgaaaaactcttaaacgaagagagcgaacccgaattgatggcgtggttagaagcgcaatatggttttggtattgaaacttgccaaaaaattgcccgcgccaacttgcccgaaggttatggcaatttaagcaaagaagcgttggaaaaaattgtgcctgaattagaaaaagcggttatcacttatgacaaagccgttttgaaagcaggttatgaacaccatagccgattaaatgagtttggcgaggtttgtggcaaaacttttgatacgggtttgacttttacagacaacgccacaggcgaggttaagcacatttatgcttattttgaattgccttattatggcgagtgtttaacgcgccatgtgtcttttggttcaggcgtgccatccgattcggttgaaaaacgttttggcaaaattgctaatccaaccgtgcatattgcgcttaatcaagtgcgtttggtggtgaatgctttgctcaaacgttatggtcatcccaaagaaattattattgaattggctcgggatttaaaacaaagcaaagcccaaaaggcagaagcacaaaaaaaacaaaaagccaaccaagaacgcaacaaccgcttacgcaaagcagttgccaaagtttttggttgtttggaagaaaacgtcaaacgcgccgacattgaaaggcttattttgtgggaagaattaagcaaagatccggcacagcggcgctgcccttatagcggcaaaatgattagcatagaaatggcgctcaacaatgaaacgcaaattgaacacattttgccgttttcaagaacattggacgattctttaaacaacaaaaccttatccaccagaaaagctaatcaagccaaggctcgccgcacgccttttgaagccaaaggcgattttgaagcgcaaggctggcattgggaagagattttgcaacgtgtgagaaatatgccgcacgccaagcaatggcgctttttggaagatgccatgcaaaaatacaacgcggaaaatgattttgccgcacgtgctttgaacgatacgcgttatttgagccgcattgccaaggagtatttgagttttgtttgtccacaaaatacacgcgccatccccggggcaatgaccgcaaaattgcgcaaagagtttggtttgaatgatgttttgggattaaatggagaaaaaaatcgcaacgaccaccgccatcacgccgtggatgcgtgtgtgattggcattaccgaccaaggaatgttgcaacgttttgccaaggcgagtgcagatgcagaaaaaaaatctttgcaacgtttggtagaaaatatgcctttgccgtggtcaacttacagagatcatgttcagcgcgctgtggacaacatttttgttagtcacaaacctgaccacaactatgaagggcaaatgttgcaagaaagcgcccacggcttaaaaaattggggcacgcctcaagcgtgcgttaaaaaagccaaaggcagtgcagacaaaaacaacatttcaataaatagcgttgtgcccatttgtgaacccagccaaaatgcgcggcacggtgtggattctgatggcaatcctttgccttacaaagcctatgtgggtggcagcaattactgcattgaaattgtgaaaaacgaaaaaggcaaatggcaaggcgaggtaatttctacttttaaagcctaccaaattgttcgtcaatcgggtgaaaaacgcctgcgcgatcccaattggagccaaagcggcaaacccttggtgatgcgtttgatgatcaacgattgcgtgcgcatgggaacagacgttgtgtttcgtgtggtgagcattcgcacggatggacgaattacttttgcgcctattcatgaagccaatgtggacaaacgcaatacagaaaccggaaagcgcaaaaaacttcaaaaaaataatccgttgaccgtggaaaatgctcaggatgtggataattttgaatacaccacaataaaagcaagttcactgcaaaaagaaaatgggcgcaaagtgaccatttcccccatcggtcaattgcgtgaatacaaactcaaggagtgaaaacaatgatcgggcgcattgttgaaattgctgaaaataatcgccatttggctgttttttatggttttatggtgataaaagaatccaaaacacaaacggaaatcaaacgcattgctttggattctattgtggcagttattggcaatgcgcatggtctttcttatagcaataatcttttggtggcgctggccaaagaaggcattccttttgtgctttgtgcagccaatcacaatgcggtgggaatgcttttgcctttggatgacaattttgaacaatcgcgccgaattgatgcgcaaatcaaagccaaattgccggtgcataaacgtttatggtcgcaagtggtgcgtgccaaattagaacaacaagctttgcttttagaacgtttgggcatttcttgtgaagttttgtggcgtttgtcgcgaagtgttaaaagtggtgacccgcaaaatttggaagcacaaggcgcacgttattattggcaacgtttatttggcaaaaattttaggcgagataggcattcgggcgctatcaattcccttttaaattatggctacaccattttgcgtgcaaccgtagcgcgggcagtggtggcagctggtttacatccttctattggtttgcatcacgccaatgccagcaatgcaatgcgtctggtggatgatttgatggaaccttttcgcccgatggtggatttggtcgtttttaagctggcacaaaatggcgttttggaagttgctgcggatgccaaacgtgctctggcaaaggttgcttattatgatatgcaaacacaaaatggcacaacaccggtgatggtttgtgcgcaaaaattagcggtttcactggcacaagtttatttgggagaacggcgcgatttggaattgccattgccgcaattgcctgatgaattgtttgaaataaaggacgaattttgctaacgggataccgcattatgtggattttggtgatgtttgatttgccggttgttcttgccgaagaacgcaaggcggcgaatgattttcgccatctcttattaaaattgggttttgagatgagtcaattcagtgtgtatatgcgtttttgcacgagtcctgcgcaattagaaacttattgcaagcatattgaagaaagtttaccgccgggcggcaatgtgaagattatacaaattacggacaaacagtatgagcgcattattaattttcgtggcaaatcgcgccaagagaaaaataaaacgccggatttgtttgaattgttgtagcgtcaaaacgatttttttggaataaaaaagcaaataaccccttgaaaatcaaggggttatttgcttgcaattatagcagattgagatatgtgctctggctggaacgcccgtcttgcgaatcgttttccaaataaaattatagcagattgagatatgtgctctggctggaacacatatgcctgattggcttgaatataattgattatagcagattgagatatgtgctctggctggaaccaaactaaaagcattacatttacgaagaacattatagcagattgagatatgtgctctggctggaactgcattgcggcgtgattattacaactaatcattatagcagattgagatatgtgctctggctggaactatttcgcattgcaaagcaattttcgacaaattatagcagattgagatatgtgctctggctggaacggtcaaaaatcttaaaaccgcgcaaactgcattatagcagattgagatatgtgctctggctggaactataagtactttaacgcgctcgttaaaagcattatagcagattgagatatgtgctctggctggaaccggctattaaaagcgcaaaacgcggcttttattatagcagattgagatatgtgctctggctggaacgaaatggttgggcggtttgggcggttcttattatagcagattgagatatgtgctctggctggaactgctttccacgcgctttcaagtgcatcgttattatagcagattgagatatgtgctctggctggaacaaagctgaaagcattaaatttgcgcagaacattatagcagattgagatatgtgctctggctggaacgcccaaatcgtccgcataatcaatatatgcattatagcagattgagatatgtgctctggctggaaccttcaccttcaacatcgggcggctctgcaaattatagcagattgagatatgtgctctggctggaaccagattgagatggttcgcattctgagtttttttatccacggtcaacctttttaaattttcaaaaaaaattgacgttcaccgtggatttttttaaacaaaaaaaagcgagcaggggtgctcgctttttggtttagatttttctaaaaagggaaactattttaacttcacttctttgtatagcacgtgtttgcgtgcttttgggtcaaatttcatcaattccaacttgcccggggcggtttttttgtcgcccttgggttgcttgtttttggatttggacgtggtataaaaatgccccgtgccggctgtggattcaagtttaattttatcccgtccgcctttgctcgccatcgtctttctcctttaaatttcgcctttggcgcgcaattcttcaagcaccaagtcgataccttttttatcaatcatccgtaaacccgccgtggaaacacgcaaacgcacaaagcggttttcgctttccacccaaaaacggcggtaatgtaaattcggcaaaaaacgccgtttggttttgttgtgcgcgtgagaaacattgttgcccaccatcggggctttcccagtcacttggcaaactcgcgccataatttactccgtggttcttttcaaaaagtgcggattttaacgtaaaaaaatacttttgagcaagtgttattcttcattaaccaaaggcggtggcagattttttgaatcaagtgaaggcggcggcgggttttctactttttccgaatccgaatcgccgtttttgttggttggagttggtgggttttctattttttccgaatcagcgtttttggcaggtggtggcgaatctaggctgatagggtctttattttctggcattgcaaccgctttgggaaaacccgcattggtcaaaatggtgttgagccgttctgggtcaaaacctttttgaatggtggagccaacagtaacagagggcacaattttttccccggtttgttttaacaaccattcttcatccaactcgtctttgatacgtttttcggtaaatgccacgccccgctcggttaagagtttgcgaatttcagcacagtttgcgccgcacgaatgcgatgtgtagagaatcacgggcgtgaatttaaaatttttggctgggcgttttttgcgtttcagagggcggctttggttttcatccctttggcgcaaatcgtaataacgcgaatctttggcggttctaggcggcggcgcatcggttacgtattttctgccttttttatccgtccaacgatacacttgcgcatccacgcttgccacgctaattgccacaaggcttattgcaaaaagaatttttttaaacattttgattctccaacattccgttgtgccgcaacaatgcgtctatttgtggcgcgcggccgcgaaaacttgtgaaagattgtaatgccaaacgcgagccgccacggcacaaaatttcatttaaaaaacgcgcggcggttgttgcatcaaacaaatcccccgattcttcaaatgcggcaaaggcatctgccgacaaaacttccgcccatttgtagctgaaataacccgccgcgtagccgcctgaaaaaatatgcgtaaaggaatgcgcaaatcggttgaaatccacacttggcaaaacgcagcattctgcgcgcacatcttttaataattgcaaaatatccgcatctttttctggcaaaaaatcggcgtgcgctaataaatcaaaaagtgctaattcaatttgccgcacaaaagccaaaccgctttgaaaatttttggcttttaacattttgtcaaaaagcgcgcgcggcaagggttctcccgttttttcatgtgccgttaggttttttaagacttcataatcccacgcgtaattttccataaattgcgatggcaattccacggcatcccattccacgcggcgaatgcctgatgcggcaacttcatccacggtgctcaacaaatggttcaacgcgtggccggtttcgtgaaaaagcgtcaacacttcatcgtggcgcagtgttgcgtttttttgaaaattgcaaacaatcaatgccgcaggcaacacaatttcaccgtttggcaaacgctcgcgcgttgccaaatcgttcatccacgcgccgccgtgtttttctgttcgggcaaataaatccaaatacaaaaagccaagcggtttgcccgctttttttaattgataaaagaaaacatccgcgtgccacacgcggccttcggtttggatgaagtcgacgttgtaaagacgtttgacggtttcaaataatccgcttaaaacgcgcggcaatgtgaaaaatgcgcgaacttcttcatcggaaaaatcaaaagtggcttcttttaatttttcagaagcaaaagccacatcccacggtgcaaaatctttgatgtttaatgttttttcagcaaaatcttttaattgccgcgcgtctttttcggcaaagggtttggcgcgttttaacaaatcttttaaaaaatcgtgcgctgttttaaaactacctgccattttggtggcggtggaaaggtcggcaaagtgttgaaaatcaagcaattttgcttcttcgcggcgttttgccaaaatgttgcgcattaaggcggaattgtcccattcgggcgtaaattcagaggcgcgttcaacataagcggtgtagagtttttcacgcaatgttctattttgcgcaaactgcatcatcggcaaatagcaaggcatttgcagggttaaggcgtaggttgtttcatttttaatggcagattttaaactttcaggcacgcctgccatttcactttctgttgccatataagaaaaagcgttggttgcatccaaaacgttttcagaaaacttggcggataacatggcgagttcttcatccaatgttttaaaacgttttttatccgcttcgtttaaaaaagcgccgcccagttgaaaatcacgccattcatccagtgcgattttttggtgaatttcatttgaatcgcccgagtttttcagcctttcccattgcaaagccagtttttcattttgcgacaaggtcgtaaaaaaagcggaaattttgggcaaaatcgcattaaaagccgcacgccagcctgcgttatcttgcacgtggtgcaaatgcgcaacaacgccccacgggcggtttaagcgctcaactgccgcaaaataaggcacagcaaaatcattccacgtggcaggtttttccaaaagcgtgtttaaggtttgttgcgtttggcggagcaactcgtctatggcaggctcggcaaattcgggggagattttgtcaaaatcgggtaaggcgtgcgcatcgcttgccaaggtcaaaaaaggattcattgttggatggcataaaaaaaattaaaaacgttattttgggcgattttttgcaattttccacggtcaataagttatttttttgaaaaaaattgtaggtttaccgtggattttaaaaaacaaaaactgccaaaaaatgtcaacaaaatagaaaaaactgacaaaatttgcccccccccccaaaatttaaaaaaaattttttttttttcaaagggttatgaatggcatattttatgctgagccgtgcgcacctcaaatttttcttttaggagtagacaaatgaaaaaactacaacaaggtttcaccttaattgaattgatggtggtcattgccatcatcggcgtgttggcagccattgccttgccggcttaccaagactatgtgattcgctcgcaagtaaccgccgctttggctgaaatcacaccagccaaaaccaactttgaagcggcaaaagcggaaggcaaaacgccaactttttatgccgacttcaccaccaacaactacatttttatgggcattggtgatggctcgcaaaaaaccgattctgttaaaacttcttattgcacggtaacggtttggggggcaacaggtggtaaccaaggtttgaatcaaagatatggtccttttaattctggtgtggagtgtcacattggtcaaggcaacaatgtggtgaatgaaaaattgttgggcgatagaattgcgatgctccgccacaataattatggtgtttggcaatgctatgcggaagtttctgccaaatatatgccttccacttgcagaaaataccaataattcttgcgttgttgcaacatttgaaaaaaccgcctgcgggcggtttttttgcgtttgtttttttgtgattttccacggtcaacaagctatttttttgaaaaaaattgaacgtttaccgtggattttttaaatttggcggatttttttggctggcacgcccgcataaattgaaaaagcatcggtgttttttgttaccacagcgcctgcgccgataatgcaagcacgccgcaaacgcacgccacttaaaatcacagcgcccgcacctatccaaacatcgtcttccacaaaaatggtgtttttgtaacgcaccaagtttgttgaaacataagggttttggcacaacgttggcgaattgttgggcgcactattgggaataaacgccacattcggcgcaatgctcacattgttgccaacacaaaccgaaggtgaaaaatcgtcattgggggtgaattgcaaacccaaattggtaaaagaattttcgcccaaaacaaaacctaggcgatttaaataaaccttgcgcaccacggcatcgccgtaataaaaggcaagcattttgacaaaacgcatcggcattttgtcgacatttttaagcaaaaaatcttttgcgaaattatcaaggctatttaaaaagtgattctggggggggggggttaagattcatttaacgctccgcgtgcaaagtcagcaaggtaatttcagaaggcacaaaaaagcgcacggaaaaaccgctccaaaggccagtgccgcggctaacataaagttgcattgtttgagaattttcagtagaaacattgtaatggccggcaacaaagccatcattgaatgccgcaacaatgggttgcaagaaaaacatcaaaccgccgtgcgtgtggccagagagttgcaaatcaatgccggctagcgcattgtttaccgcaccacgcggttgatgcgccaatagaattttaaaggttttgggctcaatgttttttaatgcttggtgaatatcgggctttgtgccgccaaagcgcccttggcttgggtcgggcgtgccaataatcgccaattttgcttggttgatatttaaaacgcggtgttcgttatccaacatttgaattggcgtttttttgaaaaaattgagccattccatcgcgcctgcgtaatattcgtgattgcccgttacgccaaaaacgccatagcgtgcgcgcaaatcgtaaaagggcgcgacttcggattctaattgtgcaacaggcgcatcaacataatcgcctgttaaaagtattaaatccgggttttgcgcgttggcgcgcgccacaacttcggcaagccacgctttgtttaataatttgtgaatatgcgtgtcggtgatttgaataattttaaaaccgtttaaatcaggcggtagatttttaaaagttaaatcaacatggcgaatgtttggcacactaatggcggaaacgccactataaaaacctaaaattaaagcggtaataaaaaacaaaaccgcattttttgtttgtttatgccaagaaaatgggcgtttgaatattttaaaaataattaaaataacatcgcgcaaaataatcataaacaacaaaattaaaaccgaccccattaaactttcggttataaacaaaaggcttttgggcaatgcggggttaaaaaaatcaccagctaaaaaataataaatggcatatttggagagcattaccaaaataaccattgaaaataaaagtttggttaaacgtgtggattgaagtgggtaaataaaccgccaaaaaattaaaagaaaaacaagaagggatggaatcagtgtgaacattttaaaaaaaattgaatgtttaccgtggatttttaagatttttaaatttgcgttaaggattttaataaggcggcattatccgcccaaccgtgcttgacctttacccaaacttccaaataaaccttgatgccgaataatcgctccaaatcacgccgagcggtagttgcaatgtgttttaatttgttaccatttttgccgattaacatcgccttgtggttgtcgcgctcaacccagactgccgcaaaaatgcgggcgagtttttctgtttcttcaaatttttctatttccaccgcacagccataaggcaattcatcgcccaaaaagcgaaagattttttctctgataaattccgctgccaaaaaacgcatacttttgtcggtgatggttgattcttcaaaaaacaaaaaatcgtgcggcaaaaacgtttgggcaacatttaacaacggcgcactttctttttgcgaaatggcggcaatcggcacaatggcggcaaagttgaaatgttcttggcatttttttataaaaggcaacaaggtgtttttgttttttaaacggtcaattttgttaattgccaaaatcactggtttttctttgggcaaatagggcaaaagggcagaatctttgtcatcaaatgttccggcttcaataataaaaatcaccacatcaacttcaacaagcgtgtttttaacattttgattcatcccgcggtagagcgcattttgaaaacggttttgaaagccgggcgtgtccataaacacaaactgcgcggcattcgttgttaaaacgcccaaaatggtggcgcgggtggtttgcgccttgcgcgaggttatgctgattttctccccaatgagttggttcaaaagcgtggatttgccaacattcggtttgccaaccaatgccaaagtgcctgaacgcatttacattcctaatgattttaaaagctcgttgtgattttccgcggttttctttttgtggttttttttgggcaaaggctgggcggcaggggatttttgcagtggaataaagctaacatcatccattgccaattccacgtaaaacacgtggttgttgccggtgtaaaaggaaatgcggcgcgcttgcggatggtctaaattggtatcgactcgcaacatcacttccttattcaacaccaacattttgggttggctttgcgtgatattggtgtgcaaatcggcttcaatgcggcgcgtgaagtcgcccaccatttggtttaacaattcgcccatcacgtttgccacttctgctgccgtgtgtgaatgcgccaactcgttgtttggaaaacccatgttggagagatatttgctgtaaagctccattgccgcatcggctgaaaaattgatgacaaccaaacccgaaaaaccgccatcaaataacacaaaagaggcaatatccggttttaagcaggttttttgaatcacttgaaccattggcgaatagcgcacgcagtcgttggtggcggtgtttaaaacattggttaccgattcgcacaaattcaacaaaacgtcttccacaccgcgaacggcagaattattgggcattgttttatcctttctcactttccaaacttggacgaaataacgcaatgatacgccgactcatcttgtgaaattcttcaattttttgttcagtttctttgcaacgcgcatgcacatcgtttaagcgttcttccaaggaattggttgctttgtgaatgcgagatagggcttcaactctgcgttccaactgctgttcatattcccgcacctgcgcttccaaaggaatgatgatgctatccaaccacacggcgcaatcgctgttggttttttcaaccacatgccgaacgctcaatgtgacttcttcaaaaaaacgtt

SEQ ID NO: 1811 - DNA, 23171 bp, synthetic construct
  misc_feature 1..23171: note = Synthetic
  source 1..23171: mol_type = other DNA
cagcgcgggcacgaggcgcagctgggggcctgtggcttgctgcagctgggccagccggtcggcctgctgttgcagggcttcgcgcgcggccatctggggggcggcctgggcgctcatggcggcataggcgctttgcgccgcaatggcgcgctggcgcagttgcagcgtgggcgtgacggccagcgccagcagcagcagcagcgccagggccagcagcgccagccgcaggcggcggccccgggcggtcagggccttccgcacgcgcgcgccatcagacggcatgcaaatggggcgcagcacaccacccgccgcgctgaccgcgtggccgctggcgggcagcacccacacttcggggcggctcacgcgggcgtgttgcagcagcagcgcgtccaggcgctggcgcgaggtcagcgccaaatcaacgcggacgcggccatcgcccagaggcgcgctgcggtagcccgccacggtctgctcgggcttgaagggggtgatggcctgcacttccagctgcacggcttcgtccagatcggcctgcggcagggcgggcagggtgagggtgcgctccagcgcctcttcgcgcggcagttcgatggcctcggcctgcggtgcgcccgcgctggcgggcagcggctcggcctcgccgtttttgacgctccagagcgtgcgctggccgctggcctggtgcaggcgcacgcgcacggcgggcgtgagcgcgcccagcgccgggtgcgccagcagcagcgcagcggcagactgccactggcgcagccactggccaaggtcaatgccgaacaggcgcggatcgctggaaggtgccaatgccatgtgaaagggaagagggagcggagcgaacggaagctagcttcctgcgggcaaaacctgcccctgcgtccgcaaggtgcgccagggcgcaatggaagatgaataagcagatagcgttacgtcgtgcgcgaggctgaatattctgcccgcatccagcggtacgcgggctgtgactctgaaaaattgtgaaaagcccgcgccggtgagcgccgggtccagccccgtggtgtccacgcccgcctcgcctgcgtcgcggcggctggcaatgcgctgggccacggcggcgttgccgcgcgccagcacgagcagcaccggcaggggcgcagccagcgggttcacgttggtgtgctggtaggtgtctgccgtgaccagcgggcggatgcgggcgtaggtggcgtagtccatgccgggcacgagcagcaggtcatccgccgattcgaactggcggcggggcacgcgccgcgtggcgtcgcccgtgccgccggcgcgccaggtgtcgatggcgtgcgccagctggtcggcctgcttttcgggcacgccgccagccacttgcagcagggccgagagcaggggcggctgggcggcgttcagcgaaatcaggccgctcaggggctgcaccagcacttgtatctccacgccgccgtagctcacgcgcgtggcggccatgccttccggccgcgcgctttcggccttgagctgctgcaaggccagcgcgatggcgccttcggccagcgcctgcgcggccacctgctccgaaatggcctgcgcggccctgacttgcccgcgcaccgtctggctcatgcccaccaccagcaggctgagcgcggccacgatccacagcaccatgatcagggccagacccttgccccggccgcttttggcgctaccagattcatagcataaggtcctagtgcagaaagcgcaaaagccgcttttaccccccctgaatttgctcctgttcctgatatgaaaaagcccgcccgccgccgctgcggcccggcctgcgcctgtctggatcttcatggcccgaacccctcgctgcgcgcgtcggtatccgaggccagcggcgcgcgcatgggcacgatgagcagcggccagggcggctgcggcccgcgaatgtcaagcgccacggcggacggaatgcgcgcgcgccgtccggcggctgcggcccagtcgcccacccattcgccgctcaaggggtgccggtagcggatggacaggcccgtgaccggctgcgccagcgcctgccacggcgcgcgcgcccagtcaatgccgcccggctcatcgctccacggggcgtagcgcagcaccaggcggccttgcccgttcacatcgcgctccagcgccaggcgcatgaagtgccgcccgcccaggccgtagcgcgcgggcatcacgcccacccattccacggcttgcgcctgtccgctgaaaaagggccgcaaccgctcgttgccctgccgcacggggcgcagcgaggcttgcgagagcgcctcctgcaaaaagcgcgcggccaggcgcaagtcttcggcggactgcacgcgcgcgtccacccgctcttcggtttgcgcggcggagtacagggtcgaacccagcgccagcatcagcagcgaaagcagcgccatggcgatgagcacttccatcagggtaaagccgcgctggcgcgtcatcgcatcagccctccgggttgcgggcgctgctcggggcgcagggtttgcagcgtcatctcgcgcggcgggtcgtcgccccagcgcacggtaatgcgcagctcgtgcagcagcggcgcggcagggttggccgacgagacgggcgtggcaaagggcgcgctgcgcaattgccaggccatgcccgccgattcgcccccttcggccagcccttgcgcgggcaccgtctcgtgcagcgccagcagcgactcggccagcagcgccgcccgctcgcgcgccgtcacatccgccgtttgccgcgcgctgctgcccatcgcctgataaagcagcccgatggacagcgacatgatggcaaaggccaccagcacttccagcagcgaaaagccgccttgcagggcggcattcagggcgatattccgctccttgttcaatagcaggaagtccccgcattcattgtggcaaacgcctttttcggggcgtttgatttgctccttcttttgaggcgcggcggcggcgttcatggcgtcgctcccgctgcctcgccgctggctggctcctgctccacgcggccagaaaaccagtccacccgcaggcgcacgccgctgccggaggggcggatgagatccacgctgccgcccgtggcgccgccgcgcggcagaaagcggatgcccatttcctgcccgtcagcgctcgtttcctgccgcgccgccacggcgcgcagttgcagcgaatcgggcacggcgtggcgctcgccgccttccatgccgtaagtgcgctcgcgcaggttcaccgtaaagcgcgcctccacgccttcgctttgcgcccgctggcgcgccgcgcgcatttcagtgacgatgccgcgcaccgcgctgcggtattgcgccgtctcgtacatgcgccccagcgaagcgggcgccagcgccatcaccagcgccaaaatggcaaacaccaccatcagctccaccagggtgaagccgctgaagcggtgtggcgcgcgcggggcgaagcgaagcgagggcatgcggaaagcggcggactgaagccatttactcctggacaaggagcgaatccagaccccgcaaaaagcgtttggcgcaatcaggacggggacttcttgctattggaaaagaagcaaataaggaaggaaagagagctggcgcgcggcgggccggactgcggcccgcccgttcagcggccattgctcacgtcggcgttttcgccttcgccgccgggcgcgttgtctgcgccgtaggaggcgatttcaaggccaccgctggggccggggttggcgtagcggtaggggttgccccaggggtcggtgggcacgccgcctttcatgtaggggccgttccagccgctgacggagccgggtttcttgtccagcgcggccagaccctctgccgtggtggggtagcggcccgtgtcgagcttgtagatgtccagcgacttggcgatttcctcgatttgaagcttggcggttttggttttggcgccgccaaagcgctccatgactgccgggccgaccagcccggccagcagggccaggatggcgatgaccaccagcagctcaatgagcgtgaagcccgcctgggcatgcgcgcgggcgcgggcgggcgtgggttgcaggcgcatgaaacgcatgggttttcctttctgtagaggggtttacttcaccaggtcattgacggagatgatgcccagcaggatggagacgatgatggccgcaatcaagagacccagcacgaggatgagggcgggttcgagcagcgtcagcccgcgtttgatgccggtttccacgtcgcggtcaagaatggccgccagctcgttcatcatggcgccgacgcggcctgtttcttcgcccacgcgcaccaggttgatggccagcggctcgaaaacgccggtggcgcgcatggcgggcacgatgcgcgagccttccttgacgagcggggccattttggccagcgcctgccgaagggcctgatgggtgacggtttctaccgagatgtgcagcgccgccagcagcggcacgccgttgtccagcagcgtgcccagcgagcgggcaaagagcgtgagctggtatttgcgcacgatggggcccagcaccggcagcgcaatcaggcgcgcctgccaccactgccgccccgccggcgtgcgcagccagcgccaggccagccagcccagcgccgccgcgcccagccccagcgccagcccgtagtggcgaaagccctgccccagcagcatgaccacgcgcgtgggcatgggcagcgcgtcgcccatgcctttgaacagcttttcaaactgcggcaccacaaaacccagcatgcccaccagcgacagcacggccacgcccagcaagatggccggatagagcgtggccgacaccacgctctcgcgcagcgcgcgcaggcgctgcatgtggccggccaggcggtcaagcacctgcggcatctggccgctgacttcgcccgagcggatcatgttgatgtagaagtcgccaaagtgcgcctggtgcgcggccagcgcgcggctgaagggcgcgccgcctttcacgtcttccagcactttttccagcatggcgcgcacgctgggcttgtggctcatgtcgatgagcacgcgcagcgcggcatcgagcgccagcccggcgcgcagcatgatggccagctcgctggtgagcgagagcacgtcggcgggcttgacggggccgcgcgcggcgcgcgggcgcgggccggccagcgccgcgccttcggcctggccggccggctgcacgcgtatgggcgtcagcccccgctcgcgcagctggcgcagcacatcggcttcggcggcggcttcggtgcggccttcggcggcctggccgtcggcatgggcggcgcgccagagaaattcaggcatctgcgccttcctggctgtcttgcgtgacgcgcagcacttcatccaggctggtcaggccggcggccactttgcgcaggccgtcgtcatagagcgtgtgcatgccgcgctgcacggccagatgctgaaggctggcggcgtcctggccttgcaagatggcggcgcgcagcgcgtcatccaccaccatcagctcgtgtatgcccgtgcggcccttgtaacccgtgccccggcagcgctcgcagcccacggccttgtaaatgggcgcgccctcgggcagaaagcgccccagcccggagctttgcagcagcgcgggcgcgggctgcaaggccgccttgcagtgcccgcacaggcgccgcaccaggcgctgggccagcacgccattgacggtggaagtgatcaggtagcgctccacgcccatgtcctgcatgcgcaccacggcgctggcggcggtgttggtgtgcagggtggaaagcaccaggtggccggtgagcgaggactgcacggcaatctgcgccgtctcgccgtcgcgcatttcgccaatcatgatgatgtcggggtcttgccgcaggatggagcgcagcgcgctggcgaaggtgaggttgatttgcgcgtgcacctgaatctggttgatgccctccagctggtactccacggggtcttccacggtgatgattttttgcgtggccgcgtccagcttggccagcgccgcgtagagcgtggtcgtcttgcccgaacccgtggggccggtcaccagcaaaatgccgtgcgggcgggcgatgagctggttgaagcgctccagcgtgtctttttcaaagcccatgtcttccaggctgaagcgcacgctggcgcggtcgagcacgcgcatcaccacgctttcgccatacaccgtgggcacggtggacacgcgcaagtccagctcgcggcccttcacgcgcgttttgatgcgcccgtcttgcggcaggcggcgctcggcaatgtccagatgcgccagcagcttcacgcgcgaactcaccgccgcgccctgctgcggcggcacgatttcgccgggcagcagcacgccgtccacgcggtagcgcacgtgcaggccgtcgtcaaacggctccaggtgaatgtcagaggcgcgcagctcgatcacgcggccaatgatgttgttcaccaggcggatgacgggcgcttcactggccagatcgcgcaggtgctccacgaaatcgcccgcctcgccctcgcccagcgggccaaagcccgattccggcccctcggcctcggcggaaggctcctcgaacaggcgctccagcgccttgtcgatctcggcggccagccccacggcgggcagcacctccagccccgtgctcaggcgcagcgccttgcacacaaaggcgtcttgcggcgcggccatcgccacgtgcagccgccccgcgtcgtcctgcgcgagcggcagcacgtgatgcgcgcgcaaaaaacccggcagcagcccttgcggctccggcggcacggccggaaaggcttcgcccgtcacgaaaggcacgcccagatgatcagccagcgcgcgcgcggcatccacatcagacaccagccccaggctcaccagcacgcggtcgagcgagccgcccatctcccgctgcgctgccagcgcccgctccagatcgcgcgcgcccagcttgccctcgcgcaccagccgctcgccgtagcgcggccagtcatcagcggcaaaaagagggtcggcaacagggcgtgaagacatgaacgggcaggctggatgggcaaaaacggggcgcaatgctagcgcacgcccagcgcacacggaatgggcgcggcccgccaggaaaccgcttgcccgccgctttccccctgacggcattgccgaacggtatgcctgcccctcgccgctcgcgttgcagcgccaaggcgcacgggcttcgtctgccagggaatatcaaaacaagagcaaattaaggggccaaaaatgccaatttgcgcaaattgcactaggacctcatgctatgaataaaagagcgaattaaagggcgggcaaatgggcgtgttccgcccatcccgccacgcggcgccagcttcgaggcggcccgggctgccgctgccagcgcggcagaagatgcctgcgccggcagagtcattcacccgctttcgcaggctctcgcagctcgcggcgcagcactttgccgacgggcgatttgggcaggctggcgcgaaattcgatgcgcgaggggcgcttgtagcccgtcaggcagcggcgggcgtgctggcgcagcgcttcttcggtgaggctctcgtccttgcgcacgacaacgagtttgacggcttcgcccgttttgtcgtcgggcacgcccaccacggccgcttccagcacgccgggcacggcggccatcacgtcttccacttcattgggatagacgttgaagccgctgaccaaaatcatgtctttcttgcggtccacgatgcggatgtagcctttttcgtccatcacgccgatgtcgcccgttttgaaatagccgtcggcggtcatggccagcgcggtttcatcggggcgctgccagtagccggccatgacttgcgggcctttgatggcgatttcgccgctttgtccctggggcacttcgcggccctcgtcatcgagcaggcgcacgtcggtattgggcaggggcaggccgatggcgccgctgtattcgtgcaaggtgacggggttgcagcaggcaatgggcgcggtttcagacaagccgtagccctcgcaaacgggcgtgcccgtgcgctgaagccactgctgggccacggcgctttgcaccgatgagccgccgcccacggccactttcaaatggctccagtccaccttgtcgaagtccgggtgatgcagcatgccgttgaacagcgtattgaccgccgggagctggtgaaacttgtggcgagccagctcgcgcagcgtggccttcatgtcgcgcgggttgggaatgagcaccgtcttgccgccaatgcgcagcgtcaggatcaggctggccgtgaaggcgaagatgtgataaagcggcagggcgcagatgccgatgatttgctggccttcaggcacgtttttgagcacgggctggtaccacgcctgcgcttgcagggcattggccaccaggttgcggtgcagcagcatcgcgcccttgggcacgcccgtggtgccgccggtgtattgcaaaacggcaatgtcatcgggctgcacgggcggggcctgaaaaggcagcctgcgccccttggcgatggccttggcgtagcgcaccgcgcccggcaggcgaaaagccggaacggccttgcgcacgtggcgcagcacaaagtccaccaccgcgccgcgcacccagcccaggcgctcgcccacactggcgaggatgacgttttgcacctgggtctgcggcaggcaggcttgcaccgtgtcggcaaagttttccatcaccaccagcgcccgggcgcccgagtcattgagctggtgctccagctcgcgcggggtgtagagcggattgacattcaccaccaccatgcccgcgcgcagcacggcggccaccgtttcggcgtactggggcacgttgggcatcatcaccgccacgcggtcgccctttttcagcccgcgcgattgcaaaaaggccgccagcgcgcggctttggcgctccagctcggcgtagctgtattcgcggcccatgtagctcaaggccgcccggctggcgaactggctgaaactggcctcaagcagcgcggccagcgtaggaaaggcggccacgtcaatgctggcgggcacgccttcagggtattgaccaagccaagggcattgcgaagcggggttcatatcagggttcctctttgtctgtcaaaacgcggcggattgtggacaggctacaagaaaaagtattctttttcctgcgagtgaacccatatttgaaccaaaagtatcgttaaatgattctctgctggcgctggcagccccctatgcgccggacaagcggccagacgataggcacacacggcaggcttgaacgctcttttcacgagggtaaaagccacgcgggcttgcaagctggcagaacccgctcgcggcctggcggcgaagagcgaacggcgcagctcttggacaaagcacaggagagagaaagcaggcgaagccgctccgaattgctccgcgcctcgaatccctaggaaaaatgcgatccctctgcgacaagaaacagggatttattcaaacggatattgagcgccggctccacttgtccagaccgcctgctgaccatggcaacagcccaccgcaaggctggacgcgtttgcctctgggcatttgctccatcaagccgacggtgcttgtttggaatccactgcgactgcacgagcgtatgaagacaacttcagatggtgtgcagtccaccttgaacaggtggtgaatggctttctggaaaagcgaaagccccgtatacggggctttccatttggtgcatctaaagcttgttagcggtagagcgcatttcccagtgatcagggcttcgaagagtatagcaacttgttgcaaataaaagcacagggttttcaccgatgcacacgcgttcgttagcgtgtactaattgatttacttgaaacaaattgcactaaaaggaaaacgaatgccgaaacaaaagtctactcgttaccgcttggcgctggatttgggatccacttcgctgggctgggccgtgttgcggctcaatgagcagcatgagcccaacgccatcatccgcgcgggggtgcgcatcttcagcaacgggcgcaatccgaaagacggctcctctctggccgtgacgcgccgcgctgctcgcgccatgcgccgccgccgtgaccgactgctcaagcgcaaagcgcgcatgatgaacaagctggtggagtatggtttttttccggccgatgtggctgaacgcaaaaagctggaacgcataaatccctacgagcttcgcgccaaaggactggatgcgccgctaacgccgggtgaatttgctcgggcactctttcacatcaatcagcggcgcggtttcaagagcaaccgcaagacggacaagaaggaaaacgacagcggggcgctgaaggctgccattagccacctgcgccagcagttgcatgaaagaaaggcgcgcacggtgggcgaatggctgtggcagcgcctgcaagcaggcctgggcacgcgcgcccgctaccgcgaaagccgagtggcgcaggccaatggcaagacgcgcattgaaaagagctacgacctctacgttgaccggcagatgattgcagaggaatttgacgcgctatgggcggcacaggcagccttcaatccgcagcagtttagtgaacaggcgcgtggcgaattacgtgatgttttgctgtttcagcgcgatttgcgacctgtcaggccagggcgctgcactttgctgcccgatgaggagcgtgccccattggcactgcccagcgtgcagcgttttcgcattctgcaagaagccaatcacttgcggctgctgcatccggacttgcgtgaggaaccactgtcattggcccagcgcgatgccgtggtggatgcgctggaacacaacagcaaacgcacgtttgagcagctgcgcaagctgctcaagctcaacggcacagtgaagttcaatctggaagatgagaaacgcaaggaactcaagggcaatgcaacgagcgcaactctgtccaaagacggcctgtttggtgagaactggtggaatcttgacgaagctttgcaagatgcaatcgtctggcaactggtttcggaacaaagcgaggaaaagctgcagaactggctgcaggccaacacgggcgtgaatgccacgcaagccgagaccattgccaatgccggattgcctgaaggctacggttcgctgagctacaaggcgctggcgcgcatcattcctgccttgcgtggtacggaggtggcaaatggaatagatgtgccacgcacatatgaccaagccgtacaggcggcaggctttgcgcaccacagcgatctggattccggatttgattttgaacacagccacgatgaagtggagcggattggcgaacgtgtgattgcctcaacgggtgaagtcaaacctgtctttgccttcaaacagctgccgtattacggcaaagccttgcgacgccatgtggcgtttgccaaggagcatccacgcaatgaggaggaacgctatggaaagattgccaatcccacggtgcatatcgggctgaaccagctacgggtggtggtcaatgcgctgattcgccgctacggaagaccaacagaagtggtggtggagctggctcgcgatttgaaacaaagccgcgaacaaagacaggaggagcaaaagcggcaggccgattaccagaagcgcaatgagcatattcgccgcgaaattgccagcatgcacggctgcgccgaagaacgagtgagccatgccgacgtgcagaaatggattctctgggaagaattgagctttgacgtggccgatcggcgctgcccctacagtggcgtgcagatcagtgcgcagatgctgctgtccaaccaagtggaaatcgagcacatcctgccgttttcgcaaacgctggacaactccttgaataaccgcacagttgccatgcgacaggccaaccgcatcaagggcaaccgtacgccgtggcaggcgcgggaggactttgagcgccaaggctggtcatatgacagcattctgcaacgcgccgagcgaatgcccaaggctaaacgctaccgtttctcacgcgatggttatgaacgctggttgaaagaagacaaggattttctggcgcgagcactgaacgacactcgctatctctcacgagtcgccaaaacatatatggagctggtgtgcccactcggcacgagagtgattcctggacagatgacagcgctgctgcgcgccaaatttggtctgaatgacgtactgggcctcaatggcgagaaaaatcgcgatgaccaccgccaccatgccgtggatgcttgtgtaattggcgtgacggatcaaggactgttgcaacgatttgcgcaagccagcgcggatgcgcgcgggaatggactagaaaaactggtggaaaacatgcctgttccctgggcaacctacagagaccatgtgaagcgcgccattcaatgcatatgggtcagtcacaagccggatcatggttatgaaggccccatgatggaagaaacggcttacggcatccggaaagacggctccatcaggcaaaaaacaaaagccgatggcagtacggggcgggaaatcactcatctgattcgaatcactgagcctacccaaaatctgcggcatggcgtagacgcgcaagggcagccgctggcttataaaggctatgtgggcggcagcaatgactgcattgaaatcacacagaatgaacagggaaaatgggaaggaaatgtgattaccactttccaagcttatgacattgtcagacgactgggcagcaaacaggggcctcgccgcttacggcatccaacactggcacagacgctggatgtatatgggaaacccaaaaaactggtcatgcggctaatgattgatgattgtgttcggctggagctggacggcaacaaaaaaacgctgcgggttgtcaaaataaccggaaatggtcaagtattcatggctcctgtgcatgaagccaatgtggataaacgaaatagcgacaaaacagacccattcgcttacgtgtctaaatatgcgggctcttttcagaaggctaaggctaggcgtatcaccatctctccaataggcgaattgcacgatcccggcttttaaaagtaaaaaagagagcgccatgattggacacattgtcgaaatcgcagacgacagacggcatctatccgtacgccggggtttcatggtcgtgcacgatacggaaggcgaacgccggcttttgggtcaggtacccctagatgacatcgcagccgtcatcgccaatgcatacggcatcacctataccgggaatttactagtggccttggccgagcgtggcgttccatttgtactttgtgccgccaatcacaatgccgtagggatgctgctgacgctgaatggacatcatgtacaagcccaccgcatggaggcgcaaattgctgccagccagccgacgcgcaaacgcctctgggcagccatcgttaaatgcaagctggaacaacaagctgccgccctggaagccacaggcgttcctcatatgccacttgcagcattggcgaaaaaagttcgcagcggtgaccctgaaaatatggaagctcaaggcgcgcgccgttactggacacttcttttcggaaaagattttcggcgtgatcagcagggcgatggcgttaatgctctgctcaactatggctacgccattgttcgttccgccactgcaagagctgttgtcgcagcagggcttcatcccagcgtgggactgcaccacagtaacgatggcaaccccatgcgcttggtcgatgatttgatggaaccctttcgccccatgattgacttgaaagtctggcgattgcaatgttcaggtcatcatcaagtcacgcctgaaaccaagcgaatgctggcgcatattctttatgacgacatgcagaccagcgcagggaccactcccatgatggcgtgcatgcaaaagttggccacctcgttagcacaggtttacgttggtcaaagagaaaagttggacttgcccttgcccagtctgccgctatccctgacaggcaacctgcgcccttcatgatggattcaccatgctttccgggtacaggctgatgtggatactggtgatgttcgatctacccgtgctggaaaaagtcgagcggaaggccgccacagactttcgcaaggccttgttggacatgggttttgaaatgagccagctcagcgtttacatgcgcttttgcacaagccagactcaaattgacacctacgcaaaacgcgttgagtccatccttcccgccggcggcaaggtcaacctacttcaattcacggacaaacagtatgagcgcatcatcaccttccacggcaagatgcgacaagccccaccgaaaacaccagatcagttcgatctcttctgatgttgaacaacgcttttttatacctcgcagcacctaaaaggtgtttggcgacaaggagttaggtgttctggattttagatcactgggaaatgcgctctatccggaacctcggccttgagggatacggacattttccgattttagatcactgggaaatgcgctctatccggaacgtcggcgcggccatcctcgccaaagtcgagattttagatcactgggaaatgcgctctatccggaacttgttgcgcgagaggtcgcgcgagcgggccattttagatcactgggaaatgcgctctatccggaacataatgacctatcgcctagatgccctttcgattttagatcactgggaaatgcgctctatccggaacattcccacttttacggagccgccctgtgcgattttagatcactgggaaatgcgctctatccggaacttgccccccatgcctgccagctggcgggcgaattttagatcactgggaaatgcgctctatccggaacccatgcttgcgggctgcgacacccggccccattttagatcactgggaaatgcgctctatccggaacggccagacctacacacccgctcaatgccgcattttagatcactgggaaatgcgctctatccggaaccgaatcgaatacggggggatgtgccgtgaaattttagatcactgggaaatgcgctctatccggaacgggcgcggacaactcttgcacgacgaggccattttagatcactgggaaatgcgctctatccggaacagcatcgcgccagcggcggcaacggcggcgattttagatcactgggaaatgcgctctatccggaacccatggctgaactcttaaatgccgctactgattttagatcactgggaaatgcgctctatccggaactctatacagagcagtcatgcccgcctgcctattttagatcactgggaaatgcgctctatccggaactcacatggactggagactattttgatattcattttagatcactgggaaatgcgctctatccggaacgaacggcctgttttctataacggcagattcattttagatcactgggaaatgcgctctatccggaacatgctgcgcatccagatagatgtgcgatgaattttagatcactgggaaatgcgctctatccggaacagcgtgacggggaaatcgacggtgttgtcaattttagatcactgggaaatgcgctctatccggaactagcagaaggtgtagtcaccaactgcatgaattttagatcactgggaaatgcgctctatccggaacgccgaaacagtcctatgtgggtgaagctgtattttagatcactgggaaatgcgctctatccggaactaaaggagccggggcatgagagacgaccgcattttagatcactgggaaatgcgctctatccggaacgcccgtcatcagcaaaccgtcaggcgcaccattttagatcactgggaaatgcgctctatccggaactcgatcggttgccgttgctacacgcaacagattttagatcactgggaaatgcgctctatccggaactggagtttctgggggtgtgggaacggctccattttagatcactgggaaatgcgctctatccggaacgttattaaggcacaatacatctcatgttgaattttagatcactgggaaatgcgctctatccggaacgcggtggcgttggacaggtggctcatgacaattttagatcactgggaaatgcgctctatccggaacgcacgcagcgcgtggtgtcgccacggtacgattttagatcactgggaaatgcgctctatccggaacgttgcgatgcacactgcggcagcgcaagggattttagatcactgggaaatgcgctctatccggaaccgctggcttcaggtgtcatttttgattcctattttagatcactgggaaatgcgctctatccggaacggtgcccggatacgcgcacttgcttatgcaattttagatcactgggaaatgcgctctatccggaacgggtatgcacgcgtatcaaccacggaacaaattttagatcactgggaaatgcgctctatccggaaccagagttgctgaatgggcgaaattttcggtattttagatcactgggaaatgcgctctatccggaacttagccgccagccgggcgcggagctgatgcattttagatcactgggaaatgcgctctatccggaactcaagcggggagtgaagtttggcaaaggcattttagatcactgggaaatgcgctctatccggaacctatcggtataacaaaacagttttcaagctattttagatcactgggaaatgcgctctatccggaactgcaccgtcaccaaagaagcaggtttcttgtattttagatcactgggaaatgcgctctatccggaactgctggctgcttgtggatgtgtccggtgcgattttagatcactgggaaatgcgctctatccggaactatctggtcactggggcgaatggaaccggaattttagatcactgggaaatgcgctctatccggaacttggaatgaaggcattcaaaggtacgattgattttagatcactgggaaatgcgctctatccggaactccgcggggatgttcagcgcttcggcgtagattttagatcactgggaaatgcgctctatccggaactgccgaaacagtcctatgtgggtgaagctgattttagatcactgggaaatgcgctctatccggaaccatttgcatttcctttcggcgcagaaagaaattttagatcactgggaaatgcgctctatccggaaccgtgctgcggttgcacggcgtgggcgcgtaattttagatcactgggaaatgcgctctatccggaactacctctaccaggtcctctagcccatgcttattttagatcactgggaaatgcgctctatccggaaccagagtaaagatgcatgctctaaagtttacattttagatcactgggaaatgcgctctatccggaactcgaggtccatgcgcaagaaatagtcaaaattttagatcactgggaaatgcgctctatccggaacataggcacgatggtgtcgatgtcgtgctgaattttagatcactgggaaatgcgctctatccggaaccgaagatcgagcacaaggaatcctactccaattttagatcactgggaaatgcgctctatccggaaccacgacgcgcaggtctacggcaaggcgaaattttagatcactgggaaatgcgctctatccggaaccgcagatcgccgatgatcatgatgcggctccattttagatcactgggaaatgcgctctatccggaacctctagggctaacgggtataggtctatgatattttagatcactgggaaatgcgctctatccggaacatcacgtggtattacaagcgtgaagccgcgattttagatcactgggaaatgcgctctatccggaacctatggattattcaaggccgggcgaatattattttagatcactgggaaatgcgctctatccggaacagatggccgccccggcgcagatcgcgcacgattttagatcactgggaaatgcgctctatccggaacggccgaatgcagcgccaaaacgattcgtggattttagatcactgggaaatgcgctctatccggaacgtgtcgcgtgggacaggtattgccgggcgcattttagatcactgggaaatgcgctctatccggaactgtaaaggccaaggcacgccgcagcgatgaattttagatcactgggaaatgcgctctatccggaactgtaaaggccaaggcacgccgcagcgatgaattttagatcactgggaaatgcgctctatccggaacacgtccttgcaccggccgctgttgaatgccattttagatcactgggaaatgcactccagcaaaagcagcagcaaatatataccaagatttatttgcttccggcaatctgtttttgcagtttcccgcagtaatcaagcggcggaatgggcgaagtgagccagatcatgtccgagggagccagggcggatgttgcggcggggtcttcttgcgagtgcggcttgcccgcagccgaacgggcgcgtgcggaaagaacccgtgtgagaaggtgttggggcaagaagcgtgggacgcccagggcgcggtgggtgtgcccgttgcctgtgatgaggatgactgtttggctggagggcgcttgttcagccaggcgggccagtgtggcggccatggtcatgtcgcgggcgatttggatgcgtgtcatgggcgccgtctgctctgcgggcagcaaatcgcaatggctttggcgcaaacggtcttgctgcaaagccagcaaggaggcgggcagctgggtatccagctcaaggtttcccatggcttctttcatgcgggcgcgggggaggtttgcgccttccacgggcacgcccgcgcgcacggctgccatgatggcggggccgtaattggcccaaggccaggcgcggtcgttccaggacagcgcttgttgcacggcggcttcgctggcagagcggggcaggcggcgggtgttgtggccctgttcagccatttcaagggcaacggcagccagttgcccgcgcgccgccagccagtcaatgacttggcgttggagccgctggtgatcaggagcgtcgtgctgctcgccaatcagcagcgcctgggcgggcagcaggcgttccagttgctgggcgtcaatttcagtgggcgttgcagcaatgcaggcgctcaatgccaatggagcgagcagaagaagtgtgcgcatgtcatgttcccggcggaatgggccaaagggccaaagcaggcttgtgagccgccgtcatgctacgacagatggtgcaatggctctcatgcccgctctcacgtctgaatcaaccgcaagcgctggcgcgcgctgaaacgggcgctattgcattcacggcaagccgttgtcgcacgcttttttcggcaagaaaaaatcaggctctgaaaccgcctctgctttgctctgaatagcacaaaaccgcccgcctaataatcattccttttacagattattcggcttttcgcaaggccatgcatcaattgaaattgcatgagcggcggcctgaagcagattttctcaagaaaacagaatttgtcattgcaaatcctgcgcatagggtcggcctgtttattggtttcttgctgaaagatataaactgcgccgctccagcgcctcatatataatgcatccggttcatggcgtaaatgcgctttctgcttcgccagattatcaggccatgctgaaaatggccaaatgcagcatgcctttcattattagagccgcctgctcaccatttgtatgacacaccgcccccttcattggcaaaccgcccgctttcgcattgatctggcgcgcccgcgcatcatgggtatcgtcaatgtcacgcccgattcgttttcagacggcggccagcatgccagcgcggctgcggcgctgcgccactgcgagcggctgctgcgcgagggggcggacattctggacattggcggcgaatccactcgccccggcagccccgccgtttctctgccgcaagagctggcgcgcgtgctgcctgtgctgcgcgaggccgtccggatgggcgcgcccgtctcggtcgatacctacaagcccgaagtcatggccgccgcgctggatgcgggggcggacatcatcaacgacatttgggcgctgcgccagcccggcgcgctggaagccgtggcgcgccatccggcctgcggcgtttgcctgatgcacatgcacggcaacccgcagaccatgcagctggctcccatgccgggcgatcctgtgccgcaggtgctggcctttttgcagcagcgggcgcaggcgcttcaggcgcatggcgtgcaggccgagcgcatcacgctggatcctggcattggctttggcaagacggtggcgcaaaacttcgccttgctggcccggcaaggcgagctgttgagcgcgcggctgccgctgctgatcggctggtcgcgcaaatcttctctgggggcggcgctggccgcgccggggcagcagccgcccccgccccaagagcgcatcagcgccagcgtagccgcagctttgctggcggttgagcgcggcgccgccatcgtgcgcgtgcatgacgtggccgaaaccgcccaggcgctcaaagtctgggcggccttgcagctagcccgataaagccgcgcgcgcttgcgccgtcatcagcggctccgctcttgggcttggagcgcgagcgccaaaacggggggccaaagcggctttgcccagactgcggagccaaacctcaccgcacatgcgatgggcgcgccaagcccgcccgttggcggtgatggcgctttggcctttttcagagagcggaaatccaaagcgcaccgatcccggccagatcggcgcagcacccatcaagccgaaccaaaaacaggagcaaattcagcaggcataaaacagccttccgcgcaggtttcgctaggacccattgctatgcttgcaggagcaagaaacaccgtttctttccgtgtattcatctgggagcctgcctgtttcgcgcggcttttctgcttccgcgcaggcgcgcgccgggcaggttctcgaagcgctggagcgcaatgcctggcgcttgaaagaggggcaagccgcgcgctctgaacgggctccaatgcccgcctggatgggcctgcgtcatgactgcgtcatgaatctggcggcagcgccaggccctgccggtcgcggaacgcgcgggccgcgccaaagtgcccgcagccgatgaaagggcgcggcccgcgcgtggccgacaggggcgaggggtgattggccagcaacaccagatggccgtgatcggggccgcgattcgggccgctgttggctgcaatcagcgcctgcttggactgcgcgtgcgcgccccagagcatgaacacgatggggcggctgccccgggccacttgggcgatcagcgcgtcggtcagcggctcccagccttgcccggcgtggctgcccgcgcggccttcttccaccgtcaggcaggtgttgagcagcagcacgccttgccgcgcccagccggccaggctgccgccggggcgcggaaaggcgggcgcgggcacgcccaggtcgcgctccagttctttgaagatgttgcgcagcgaaggcggcaggggcacacccgggggcaccgaaaaggccagcccttcggcctgcccgcgcccgtggtaggggtcttgcccgaggatgacgacgcgcacgcgctcgggcggcgtgagttccagcgcgcgcagcggctggggcggaaagatgcttgcgcccgcgtccaggcgcgcctgcaaaaagcgcaagagcttgtgcccggcggcactggcgaaaaacgcctgtgtcgcggcccgccagccctcggccacgggccagcaggcggggtctgcgctgcaaagctggtcaggctgcatggcaaaactccttgaagtggcgaagaaggcagcgagtctaggcttcagcccccttcagactgcgcctgcgcgcgcaggccaggcccaagccatgccacagaggcgcgccagtccggggcggcacgctgaccgctttatttttgagagcggattaaagccctcaaaaaccgccgctatcgcacattccagtaagacctgacgctattagataaatagcaaaaaaaccaagggctttcggagcagtgcagcggctgggggcctgcccacggccagattgcgggcaggcgctcaggacaagtgcttgcccgcgatgcccgcgagcttgaacatgccgatgcggtcggcttcaaacagggggcgcagcttttcgtcggcgatgagggtgcgcttgtcttgggggtcttgcaggttgtgggccttgatgtagtcccagagtttttgcatgacttcgccgcgcccgaaggggccggggccgatgacggcggccagcgccgcgctgggcttgaggctgccggcgcgcggggttttcttcttttcggcggcggctttcgctgttttggcggcggctttcgtggttgtttttgcagcgggttttgccgcgctggcggcgggcgcggcgcggctgtaggccgggcgggcgcgcgcgccttcgcgcggctcgaattcaaaaatcaccttgccatcgccggcgctccaggccaggcgggcggcaaaggggcggcgggtgcggttgctgatgaatttgtcgagcaggtcggttttgcccgtttgcagcagcttgcccatttgctcggcgctgatgggctgctgaaggatggtttggccgcttttgaagtcgcaactggcgggggcggcgctggtggccacggatttttcgcacacgtagtttttgcccagcagcttgacggcactgccgcagcgcgggcaggggcccaggctgggctgggcggccagctcttgcgcggcctggggagtttcttcggcaggggcgctgtcgccaaagtcgaattccagcttgtagcggccgggcgcttcggcgtcttcggccagcgtgagttcggcggtgaagggccagccggccttgctgcgaaagccttcgagcgggccgatgcgcctttgggccagcagcgcctcggcttcgggcacgctcagggtgcggcctgcgggcgttttggtgatggaaaagccgcagccctggcccgcttggccgcctgcggcctggcccgtgcaggcgta

SEQ ID NO: 1812 - DNA, 23165 bp, synthetic construct
  source 1..23165: mol_type = other DNA
  misc_feature 1..23165: note = Synthetic
gaggtcatcgaggcctccatgcacacgcccgtgctggtggacttctgggccccttggtgcggtccttgtcgctcgctggggccagtgctggagaaactggagacggcctaccatggccgcttcaagctggccaagatcgactccgatcaagagcagcagctcgccggcatgttcggtgtgcgcagcattcccacctgcgtgttgatggtgcaaggccagccggtcgatggcttcatgggcgctctgcccgaggcgcaggtgcgcgccttcctggacaagcatctgcccgaaggcgctccggccatcgaggacgagggcgcggcgctggcggccgagccggccgtggaggaagacctgcaaacccgcctggacaagctgcagcaggccgtgcaggacaagcccgaggacgaggccgcacgcttcgattacgtcaagctgctgctggaaatgggcctggaagacgaagccaaggtggcctttgcgcccgtcattgcgcaggccgggacttcacagcgctatggcgcgctcaagacctggatggacgccctcgacgccgcgcaccgcgcaggcgacgccaatgcccgactcaaggaactggacgcgaccattgccgctgacaagcgcaacttcgaggcccgccaccagcgcgcacaaatcctgttggcgcacaaccaatggacggccgccatggatgagctgctggaaatcctgatgcgcgatcgccaatggaacgacggtctggctcgcaagacctatgtggccatcctggatttgatcgagccgcccaagccggccgtggccgaaggacagatcccgcccgaggaccccaccgtggccagctaccgccgccgtctctccagcgtggtgctgagttgagcgcctgctcaagccttctctgatttgggcacgggcccgccggcgaacagccagggcttgtccatcagataagcgcccatcagcctgagggcggcatcgcgcccatggcgcaccaagccttgcgcatggaagatccggccattgcgcaacgcctgtttttgcaccttggccacgcgcccggctcgcagccgggcccattgggccaacgctgcagggatggcctgggccggcgcgtcggcctgcagcccttgcaggcattgccccagctgctgggcatcttcgatcgccatggctgcgccctgggccaggaacggcaccatgggatgggccgcatcgcccagcaaggccatgcggcccgatgccagggcccggggtgacggcacgggccggcggatgcgcagcggccattccgtccagcgatagcccagcgtgttcatgccgtgggcctcgatggccagaatcgtatctttcagatctttggccaacgggccatgccgctcaatgctgcccagcaccgcctggatatctgcactgccgcgcctcgtgctgtgcgccaacgccgtgtcgttggcaatcaagaccacattgagccagtcgttgccccgcaagggataagtcaccgcatgcaggtacttgcccagccaggcgctgacctgctggcttctcaggcaatgcggcagcgcagattgacggatgatgccgcgataggcggtgtagcctgagcgagacagcggctcttgtgctgcctccacatttgtttgctggcgcaatcggccgccagcgccatcggcgatcaacagcagctcaccttgaagctgctgcgtcacaccatcggcgcccgccatgcgcagggaaacagcctgcccagcgcagtggctgtcaatggcctgtacctggccggccatgcgcagcgtcaggcgctcggtctgcctggcgcgctgcgccaggcaattgagcaaatcggcccgcagcacagtggcatagggggcgccatagcgctgctccgagctcaaacccagcggcagcgtgcccagaacggcgcctgtatgcaggtttttggcaaccatggcatggggcaggctggagacggccaatacatcccgctccaacccccaagcgcgcaggcagcgccaggcattcgggccgatttgcaggcccgcgcccacttcaacgaactggggggtttgctcgatcaatgtggtggcaaagccttgttcggccagcacgatggccgcactcaggcccgcaatgccgccgcccgctaccagtgcctgtgatgtggcctgcatgtgttcctgatttttgaagagaaaagcgcgcgctaccggcgctgctcaagctgcagcaaggctccagcgcgctgggcctgcgcgcgcagttgcgccagggtgatgtcgccattggcaatcaccagatcggccgcggccagcttggtgcggcgcggcgcctgctggccaaggatgcgctgcacttcttgcgccggcaattgcgagcgctgcatgacgcgctgcagttgcagctcggcgctgcaatcgacgatgaccactgcgtccagccgcgggcgccagtgcgcggattccaccaacaaggggatgtccagcacgatggccgtctgccggcgcgcctgcgcttgctgcaccaaatcctgcaaggcctgaaaaatcaagggatgcaaaatggcttccagcgcctttttggcctgcgcatcggcaaacacgcgctggcgcatcctggccctgtccatagcgccgtctgcgctgacgtattcagtaccgaagtgctgcgcgatggcggccacagccgcgccgccgggctgcgtcagctggcgcgaaataccgtcggcatcggccacgggcacgcgaaacagctcctgccacaaagccgccaccgtgcttttgccactgccaatgccgccgctcaggccaatcaggcgtggcggtttgctgtctggctcgcaatgcatggcaaacaggcggtgcggttcagcgttgggccgtggctgcgggcgcgggccgcatcactgcggctgcgggttgcgcaggcgaatgtgcagctcgcgcaattgcttttcgtccaccgcggagggggcctgggtgagcaagtcctgggcgcgctgggtcttggggaaggcgatcacatcgcggatggattcggcgcgcgtcatcagggtgatgaggcgatccaggccaaaggccaggccgccgtgcggcggcgcgccgtattgcagcgcatcaagcaggtagccgaacttggcgcgcgcttcttcctcaccgatgttaagggcgctgaacaccttgctttgcacgtcggcgcggtggatacgcaccgagccgccgcccagctcccagccgttgagcaccatgtcgtaggccttggccacgcactggccggggtcggtggcgagcaattcctcgtggccgtccttggggctggtgaaggggtggtgcatggccacccagcgcttgtcttcctcgtcgtactcgaacatggggaagtccaccacccacagcggtgcccagcggtcttcgaacaggccattggccttgccgaattcgctgtggccaatcttcacgcgcagcgcgcccatggcgtcgttgacgattttttccttgtccgcgccgaagaagatcaagtccccatcctgcgcgccggtgcgcgccagcagctcggcaatggccttgtcgtgcaggttcttgacgatgggcgattgcaggccgtcgcggcccttggcgatgtcgttgaccttgatccaggccaggcccttggcgccgtagatcttgacgaactcggtgtaggcgtcgatctcgctgcgcggcatggcgccgccgccgggcacgcgcagcgccacaacgcgcccgccgggcatggtggccggaccggagaagactttgaactccacatcggccatcacgtccttgaggtcggtaaaggccagcttgacgcgcagatcgggcttgtccgagccgtacaggcgcatggcctcggcaaaggtcatgacagggaattcgcccagatccacgtccatggtcttggcaaacacctcgcaaatcatgcgctggaacagctcgcggatgtcctgctcggtgaggaaggatgtttcgatatcgatctgcgtgaactcgggctggcggtcggcgcgcaagtcctcgtcgcggaagcacttggtgatctggtagtagcggtcgtaaccggccaccatcagcatttgcttgtagagctggggcgattgcggcagggcgtagaactggccgtcgtgcacgcggctgggcacgaggtagtcgcgcgcgccttcgggcgtgctcttgcccagcatgggcgtttcgatgtcgatgaagccgtgcgcatccaggaactggcgcaccgccatgctgacgcggtagcgcagcatcaggttcttctgcatgtaggggcggcgcaggtccatcacgcggtgcgtcaggcgcgtggtttcggacaggctgtcgtcgtccatctggaacggcggcgtgaccgaggggttgagcactttgagctcatggcacagcacttcgacccggccgcttttgaggttgtcgttgctcgtgccttcggggcgcgcgcgcaccaggccggtgatttgcaggcagaactcattgcgcaccgtttcggcggcggcgaacatctcggggcgatcgggatcgcacaccacctgcacatagccttcgcggtcgcgcaggtcgatgaagatcacgccgccatggtcgcggcggcggttgacccagccgcacagggtcacagtctggccagtcagggcttcggtgaccaggccgcagtattcggtgcgcattgccataaaaaatgtccgtttctggctggtttcagccggggttgttctggtgcaagaaaaagaaagcgccactcaggcggcagccggtgcggctggcgcggccgggctgccgccaccgctgccggcatcggtcgaggcggctgcgggcgcggcatcgccgctgctgggcgctgggctgggcggcttgccgctgtttttgaaatccgtggcgtaccagcccgtgcccttgagctgaaagctcggcgcagacagctgcttggcaaaggcctgggcgccgcagtgcgggcacagcgtcagcggcgcatcagagagcttttgcaacacatctttgcgaaagccgcattggccgcacaggtaggcgtagatcggcatacaacagcgcgatgaaaaatccagaaaaaggcccatggtcagcccatggcctgtctgcagaaaaaaccgctgattataaaagccgcgcccagcgcctgggcggcgcccgcaaagcgcctgccaggcaggccgccgggcgcggctgccgccctgtcgggcctggcagttaagcagttaaactcgcaggctttgtcagagcctgtcttcaaaattgccgcacacagcgctcgccccaggtcgggttgggcagcaagtttttacgggcgccgtagaccgcccgaatccgctggattgcccgctgtgcagggattgtgagcaggcgctcagccccttctctttctggatggacaccgatgcccagccaaaaccccgccccagcgcctgccggcgccaaggtgccttttgaactcaagagcgccacgctgcccgtggtggcgttgctgctcaagtccacggacacctacgccatccgcaaggcgctggccgagcgctttgccgacgagccggatttcttcgacaacgacgccgtcatcatcgatctgagcgccgtgcgcgacgaccctggcgccatcgacttccgcgggctgatgggcacattgcgcagcctcaagaccacgcccgtggcggtgcggggcggcaacgcggtgcagatcgagtttgcgcgcgccgccggcctgtccgtagcgcccgacgccccgccgcagcgcgccgcccccgagcccgcgccgccctcggtggaaatccgcgaagtggtgcgtgaggtggaggtggtgcgcgaggcgcccgccagcgagacggtgctgatcgacaaacccttgcgctcgggccagcaggtctatgcccgaggcgcggatctgatcgtcatgacggccgtgaacttcggcgccgaggtgatcgccgacggccatgtgcacgtgtatgcgccgctgcgcggccgcgccatcgccggtgcgcgcggcaaccccaatgcccgcatcctgaccctgtgcctggaggcgcagctggtttcggtagccggcatttaccgcacggcggaaaacgacttgccgccagaagtcgccggccgcccggcgcaggtgcgcctcgatggcgagcgcctgctcatcgagccgctgggcaaaggctgagcaatgacactctgaaacaccgccagctcatgacaggcgccaagcgccacgcacaccaaggcagaatacgcacactttgacccgctccgccccgcagccaccgggccgggtgcgaccagaaccgtaactttcacaggatgcattccatggccaaaatcatcgtcgtcacttccggaaaaggcggggtcggtaaaaccaccaccagtgccagcttctcatcgggcctggccatgcgcgggcacaaaacggcagtgatcgatttcgacgtggggctgcgcaatctggacctgatcatgggcgccgagcgccgcgtggtctacgacctgatcaacgtcatccagggcgaggccaacctgaatcaagcgctgatcaaggacaagcagctggaaaacctctacatcctggccgcctcgcaaacgcgcgacaaggacgcgctgaccgaggaaggcgtggaaaaagtgctcaatgacctggccggcatgggtttcgagtacatcatctgcgactcgcccgccggcattgaaagcggcgcgctgctggcgatgaagtttgccgatgaggccctggtcgtgaccaacccggaagtctcctcggtgcgcgactccgaccgcatcctgggcatgctctcgtccaagaccaagcgcgccattgatggcaaggagcccgtcaaggagcatttgctcatcacgcgctacaaccccaatcgtgtggagggcggtcagatgctgtcgctgaccgacatccaggaaatcctgcgcatcccgctcatcggcgtcatccccgaatccgagaccgtgctgcaggcctccaaccagggcctgcctgccgtgcacatgaagggctcggacgtggccgaggcttatcaggacgtgatcgcccgcttcctcggtgagcagcggccgctgcgctttgtcgatgcccagaaaggcggttttctcaagcgcatcttcggcgggaggtaagccatggccttgatcgacatgctctttggcgggaagaaaaaaaccgcctccgtggccaaggagcgcctgcaaatcatcctcgcgcacgaacgcagcgaccgcaccaccagcaagccggacttcctcaacgacctgcaaaaagacctggtgcaggtgatctccaaatacatccagatccaccccaacgacatcaaggtcaacctcgaccggcaagacaacctggaagtgctggaagtcaagatcgagatgccggagtcggaactgcgcgccaagcccggcggccaataaatccagctttctgtccgccgcccaggcgagcgcggcacctgctcacgcgccctgcccggcgggcaatggcgtgcgggcaaacaccatggcggagaccgccgccacacccgcatcacgctgtagcacccgggccagcgcccacaacgtagcgcccgtggtcatcacgtcatcgaccagcagcacgtgctgcccttgcaagcacgggccgggctgctgcactgcaaaggcccggcgcagattgcgccagcgcgcctgccgccccatgccagcctgctgcgcctgcatgccgtggcgcagcaccacatcctggcgcagcttgtgcgcctgccccgtttgcgcagccagtgcgcgcgccagctcccaggcctggttgtagccgcgctggcgcaagcgcgccgcagccagcggcacggccacgatggcatcggcgccatgcagcaatgccgcactgcccggctgccgcagcagcagctgcgaaaagccatgcgcccaggccggcgcagcgtagtacttgaactgggcaatgagctgctgccaagggtaggcgtagtccaccgccgccacgcaatgctgcaacgggccgggccgcaccatacaagcgccgcagaccagggcagaccaaggcagcgccctgctctgcgcctcatcaccccacccttcgtcgtgttcccgccccccatccacaggggccgaaaatggcaaggcacagcgcgtgcaacgcggcgcctgcagcccatggcgcgccaggcaatcggcgcacaggcccgccggcccatgccacaccggccagcgccggcacagcgggcactgcgccggcagacaacgggcggccagcaagtcaaaacgcaacaaatgcaaaggcatggcaggctcctggacattggcaaccctgcctggaccacccgcgctggcaagcccaggcacggcctgctatcgcgccccatcatgccatggcagcccgcaccacctatactcgcgcgctggctgcaccgcccaccgaccacatgccgcccaccgacacgccccccaccctggaccccaccgcactggcgcgctggcaagcccacgcgccggcagccagcccctggctgcacgaagaagtcggcaggcgcatgcaagagcgcctggcctggatggctcgcgcaccacagacctggtgtgactgggaacccgtgcgtggcggcatgcaaacccacgacctgatcgtgcagcgctaccccaaaagcagctgctggatcgtgcagcaacagcccgagcagcaacgcgtggcagcccaacgctggcgcacaccgcgctgggcccgctgggccggccgcgccgccgtgcacctgcaagagcctgcgccgcaaagcctggacatgctctgggccaacatggccctgcaccagcaagcccagccccccgccgtactgcgccgctgggcgcaatggctcaagcccgatggcatggtgctgttctcctgccttgggcccgacaccctgcggcaactgcgcagcctgtaccagcaactgggctggccaccacctgcgcagcaattcaccgacatgcacgacctgggcgacatgctggtggccaacggctttaccgagcccgtcatggacatggaatgcatcgagctgcaatacaccagcaccgagcgcctgctgcaagagctgcgcgaactgggccgcaacctgcacccacaacgctttgccgcactgcgcgggcgccaatggctggcgcaatggcaccaagccctgcacagcctggccgacgcgcaaggccgcatcgggctgacatttgaaatcgtctacggccacgccatcaaggccgcccccaccatgcccgtggccgcccaaacccacatcagcctggcagacatgcgccaaaccctgcaaaaacaccgccgcgaaacttgagcgcctgtgcaaagtctctgtacgacaggcaatcaagccgattggtgcggtggtctggcattgcaaatgcctcgccgggccactggggtaggacttcgttttgctgcttgtatcccatcccaaaccgcttcttgctcactcgcgccgaggctttgaacaggttctgagctgcaatacagccagaccgcacggcgcaggctctgttcacaattgggctgccaacaaccgccagccagggacaaccacgtcgggtattggcaaatcttggggccagaaaagcctaaagccgggcatgcccggctttccattttttgcatctagctacaaaagcatcagcttgttagcggccagagcacaaatcccagtgaactagtggcggcaattgtaaccccatccgctctgcctctacatatccatgcgcaattatttggtcacgcaccccaacactggcaatgcactggtggcgtaatccccaattcaagaactccacgcacacaagccacaaaatgttaaattgcgcgcaaacagtgtctcgcggatagcctgcgaagggcttctgagaggcacttaacctgaggtcataaaacagcaaagaggggctacagcaagtagagagggccttcgagccgcccctgatgacaaacatggatgccgcacagcatccatcaatgcatgaatgtgtggaaaggggctggtttcgtgtcaagaaaaagaaacatcattcgttaccgactggctttggatctgggatccacctcgctgggatgggccattctgcgcttgaatgccgaaaacgagcctactgccatcatcaaggccggcgtgcgcatcttcagcgatggccgaaacccaaaggatggctcctctctggccgtgactcgccgtaccgcccgctccatgcgccgccgtcgcgaccgcctgctcaagcgcaaggcgcgcatgctggacaagctgattgcgcatggcttcttcccacaggacgaagccgcacgcaaggcattggaggcgctcaatccctaccagttgcgcgccgagggcttgcagcgcgcgctgacgccgggtgagttcgcccgcgcgctgttccacatcaaccagcgccggggcttcaagagcaaccgcaagaccgacaagaaagacaacgacagcggcgccctcaaaaccgccatcagccaactgcgccagcaactgcaaaacgaaaacgcccgcacggtaggcgaatggttgtggcaacgcctgcaagccggccaaggcacgcgtgcccgctaccgggaaacacgcatcgccaccgagacaggcaagggcaagatcgacaaaagctacgacctctatatcgaccgccagatggtggccgatgagttcgatgcgctgtgggccgtgcaggcggccttcaaccccgtactgttcaacgagcaagcacgggccgaactgcgcgacaccctgctgcatcaacgcccgttgcgcccggtcaagccggggcgctgcactttgctgccggaagaagagcgcgccccgctggccctgcccagtacgcagcgctttcgcatcctgcaagaggtgaatcacctgcgaatcctgcacccggacctgcgtgaagaagcattgaggctggatcagcgcgatgccatcgtggccttgctggaggacaggggaaaagtcacattccaggccatgcgcagaacactcgacttgggtgatgccgtgcaattcaatttggaagatgccaagcgccgtgaactcaagggcaatgccaccacggcggcactgtcgaaaaaggaactgttcggcgctgcgtggcgcgaatttgacgaagccttgcaggacgacatcgtgctgcgcttggtcacggaagaaagcgaagccgaactggtgcaatggctgatcgaaaacaccggcgtggatgaggcacgcgccacggccattgccaacaccggcttgcctgaaggctacggcagcctgtgtcgcaaggcactggcgcgcatcgtgcccgcgctacgggccgaggtcatcacctacgacagggccgtgcaagctgcgggttttgcacatcacagcgatctgggctttggctttgagcatgatgatgacgaggtgacgcaaattggcgagcgcgtcatcgcatccacaggcgagatcaaggctgtgctgactttcaagcaactgccctattacggtcgagccctgcaacgtcatgtggcctttggcagtggcaagccccaagacccggaagaaaagcgctacggcaagatcgccaaccccacggtgcacatcggcctgaaccagctgcggcgcgtggtcaatgacctgattcgccgctatggccaccccaccgaaatcgtggtagagctggcacgtgacttgaaacaaagccgcgagcagaagctggaaactcaaaaacgccagaatgaaaaccaggagcgcaggcaaagaattcgcaaggaaatttcagatgccttcggccagcagggtagagaaatttccccggaacgtgtcaaagacgccgacatccagaaatggatcctctgggaagagctgagctttacgcctactgaccgccgctgcccctacagcggcgtgcaaatcagcgcagccatgttgctcagtgacgaggtggagatcgaacacatcctgccgttttcacaaaccctggacgacagcctgaacaacaagaccgtggcaatgcgccaggccaaccgcatcaagcgcaaccgcacgccctggcaggcgcggcaggacttcgaggcgcagggttggtcatacgaaggcatgctgcaacgcgccgaacgcatgccccgcgccaagcgctaccgttttgccgaggatggctacgaacgttggctgggcgaggacaaaggctttctggcacgcgcgctgaatgacacgcggtacctctcacgcgtggccaaggaatatctcaaactgatctgccctggcggagtgcgggtgattccggggcagctcacgggcatgctgcgtcggcatctgggcttgaatgacgtactggggctcgatggcaaaaagaaccgcgacgaccatcgccaccatgctgtggacgcctgcgtgatcggcgttaccgaccaagcactcttgcaacgctttgccaacgccagcgaactgcccaagatgcaggggcgccacaagttggctcaggacttcgagcctccttggcctacgtatcgcgaacacgcggcacgcgccgtgaaaaacatctgggtcagccaccgccccgaccatgggcatgagggcggcatgatggaagaaacttcctacggcatcagcaaggatgggcgcatcaagcagcggcgcaaggccgatggcagccaagggcgcgaagtcagcaacctgatccgcatcagcgagccaacccagcccgagcgccacggcctggacgccgaaggccagcctttgccctacaaaggctatgtcggcggcagcaactactgcatcgaaatcacgtgcaatgacaaaggcaaatgggagggcgaagtgatctcgactttccgcgcctatcaaatcgtgcgcaaacatggggtggcgcgcttgcggcatcctggactggcgcagaacgggaaagccttaatcatgcgcttgatgattgatgattgcgtgcgcctggaactggatgggcgagaggaaacaatgcgtgtggtgaagatcggcagtaatgggcaagtattcatggcgccactgcacgaagccaatgtggatgccagaaaccgggacaagaacaatccgttctcctatgtctcgaaaatggctggatctttccagcaggccaaagcccgccgcgtcaccatctcgcccatcggcgagttgcgcgaccccggcttcaagggctgagcaaggggcgtgacatgattggccgcattgtcgaaatcgcagacgaccggcggcacctattcgtcaaccgcggcttcatggtggtgcgcgacactgcaggcgagcgcaaagaactggggcaggtgccactggacgacatcgccgccgtcatcgccaatgcccacggcatcagctacaccaacaacctcctggtggccctggccgagcgcggcgcgcccttcgtgctgtgcgcggccaaccacaatgccgtgggcatgctgctgacgctggacggccatcacgtacaggccaagcgcatcgaagcgcaaatcgccgccagcctgcccacgcacaagcggctgtgggcggccatcgtcaaatccaaactggaacaacaagccgccgcactggaggccgcaggcgcacccactgcacccttgactgcattggtgcgcaaggtcaaaagcggtgatccggaaaacgtcgaaggccaaggcgcgcggcgctactggggcttgctgttcggcaaggacttccgtcgcgaccaaaacgccggcggcctcaacgccctgctcaactacggctacaccatcctgcgctcggccaccgcccgcgccgtggtggccgccggcctgcatcccagcatcggcctgcaccacagcaatgatggcaatgccatgcgactggtggatgacctgatggaacccttccgcccagtcatcgacctgaaagtctggcaattgcagcgcgccggtgaagaacaggtcacgcccgcagccaaacgcgccttggtgcacacgctttacgacgacatgcaaagccgtgccggcgtcaccccggtgatggtctgcatgcagaaactggccgtctcgctggcccaggtgtatctgggcgaacgcgacaagttggaactgccgctgccaggcttgccgctcgctctggccaaaggtctggaccaggaatgacgcaatgccatgctttcaggataccgactgatgtggatgctggtgatgttcgacctgcccgtgctgaccaaagccgagcgcaaggctgccaccgacttccgcaaatcgctgctcgacatgggcttcgagatgagccagctcagcgtctatctgcgcttttgcaccagtcagactcaattggaaacttacgccaaaagagtcgaagctgtgctgccttcaggcggtaaagtccacgtgctgcagttcaccgacaagcagtacgagcggatcctgacctttcacggaagagccaagcagccgccgttgaaagcacccgagcagttcactcttttctagcttgaagcatggttctcatcccccccaaaagcagaaaactccttgtagaacaaggagttactgcagagggattttagatcactgggatttgtgctctgaccggaactgcggtttactacaatggccgtttcgatctattttagatcactgggatttgtgctctgaccggaactattgccgcggccatctggaaatggctgcgattttagatcactgggatttgtgctctgaccggaacacgtgaaggctgctcgccgatagcagaaagattttagatcactgggatttgtgctctgaccggaacgcatgggtacgtgcattcatcgcccgccacattttagatcactgggatttgtgctctgaccggaactcaccaggcaaatgcaagtaccccatcaaaattttagatcactgggatttgtgctctgaccggaacccaggctgcctaggggaagaaggcctgacaattttagatcactgggatttgtgctctgaccggaaccgaattctactcggacaatgccaaccacaaattttagatcactgggatttgtgctctgaccggaacatgcgcgggattgagtgtgtgagcatgggattttagatcactgggatttgtgctctgaccggaacagcctctacatcggcagcaaagaagcaggcattttagatcactgggatttgtgctctgaccggaactttcccaaagtcaataacaatctacctgtcattttagatcactgggatttgtgctctgaccggaacatgagcgggattgagtatgttagcatgggcattttagatcactgggatttgtgctctgaccggaactgcgctcggtatggtgagctatgaattgtcattttagatcactgggatttgtgctctgaccggaacaacagaagccgtctcacgagggtagtcggaattttagatcactgggatttgtgctctgaccggaacggctctgtgattatctatgatgaagttcaaattttagatcactgggatttgtgctctgaccggaactctgggcgaaacaacttacaaggcgcttgcattttagatcactgggatttgtgctctgaccggaacaccagccaggtttggaagcaaaccacactcattttagatcactgggatttgtgctctgaccggaacgccccagatgctggccgtgttagtccggtgattttagatcactgggatttgtgctctgaccggaacgcctggagtgactactatgtctgttcgtaaattttagatcactgggatttgtgctctgaccggaaccgcctaggcggcagacaaataagcaagcttattttagatcactgggatttgtgctctgaccggaacaccatgtattactacaaggctggtgccgcgattttagatcactgggatttgtgctctgaccggaacgccgcgctgggcgagcttgagatcctgattattttagatcactgggatttgtgctctgaccggaacgtaacattggtgcatcacctgcatcacctgcatcacctgcatcacctgcatcacctgcatcacctgcatcacctgcatcacctgcattttagatcactgggatttgtgctctgaccggaaccaggaaaagcgtacatggcccagaaagggaattttagatcactgggatttgtgctctgaccggaacatcggcgctgaactgctgaagcgcacagccattttagatcactgggatttgtgctctgaccggaacctgagcatgtgcagatcgcccggctgcaccattttagatcactgggatttgtgctctgaccggaactgccgtgcaggacagactgaaaatcatttgattttagatcactgggatttgtgctctgaccggaaccgtcggcttcgtacaggaagaactgctcacattttagatcactgggatttgtgctctgaccggaaccgatacgacagtccaacagaacctgatttcattttagatcactgggatttgtgctctgaccggaactcgaataggcgcgtgccgcatatatcgtccattttagatcactgggatttgtgctctgaccggaacatggcacgcgcagggcgcggattggatggtattttagatcactgggatttgtgctctgaccggaacgacgcgggtgcggaacgggggtttctggggattttagatcactgggatttgtgctctgaccggaaccccccggtacatcgggcacaggtacgcctgattttagatcactgggatttgtgctctgaccggaaccgcgtttgacctccagcgccgctgcgccgtattttagatcactgggatttgtgctctgaccggaacgccttgtggttccactgcggcggagccttgattttagatcactgggatttgtgctctgacatgtgcgcacaactcaaaagaaaatcaggtaatagccattactgcgtcaaaaaaatagattccgcctgagattatatcggcgattattctcgtttggcgtggctgatcaggccgccgtgcattgaaagggctgaatttttgccagctcgtctgcggcattttctttagcggtgcgcaggtcatattcagactgaaggttgacccagcttcgcgcatcagtgttgaagaacgcggccaggcgcagggcggtgtctgcggagatggagcgtttgccatgcacgatctcgttgatccgacgcggcggcacgccgatggccttggccagggcgtattggctaatgcccatgggcgccaaaaactccccgttcagaatctcgccggggtggggccatgtgaattgggtcattgttccctttcagcggtcactgacgatctctacatcgtctgcgttgttggtggcttcattccacttgaagcagatgcgccactaatcgttgatgcgaatgctgcactactcccctgcgctcacctttcagggcctccaggcgatggctggacggtacacgcaaaaaattaatgctgcttgcggcgtgcagcaatgcgagttccctcagtgctaatttgcaatattggcaaatcgctttcttcgctatgtttcacctcctctggctgatgggtttgatccaaggataaggtacagctggattactgcttcaaaaatcacaattcctttcatctataccagcagctgcgccgccagctccagaaccgacaacggcgccgagccttcagccttgttgttgatggtcacgtaagcgttttggcctgcgccgcaggtgccgttgatgacgcgggccaggtgcgcgcgggtttcggggtcggggtcttgcaggcggttgaatggtgcgtattcggccttggcgctttcgtagccgtaggcgccgtggcggcggtgcaggttccagcggcacaccaatgggcctggccacagggcgcgcaacagcggcaactgctcttcaatgggtggcattttggcgtgcaagcccaggcagtaggtgatggggttgccgcgggcctggcgcgccgtgcgcaaggcctgggccaattgcggcgcatggccaggggccagaaaggcggcgtcacgcacttcgagcgcgaggacgccatcgggcgccgcgggcgccagcggcggcatggccgccagcaaggcgccaatgcgttcgatcaatgcgggcagctcggccagctgtgcgcggggcaaggggctgatctggaagaccaacgcgcccactttgtggcccaggccttgcaatgcgggctggatgaattcacgcagcgccagctccgggctgagaaacagcgggttgggcgcgcggccgcggccgtcttcagcgcgcaccagcgcatcgcaaaccaagctcggggccttgacgacgaagcgaaagtcatggggcacttgcgccgcatagtgcgcgtattgctgggcgctcagtgggcggtagaaggcccgatccaggctgacgctgcgcagcagtgggtgggcagcataggcgatcagcccctgccgggagagctggctttcagcgtagtcgccttcccacaccagcccggcccaaccgggaaagtgccaggaagaggtgcccatgcgcaagcggggcggcaaggctgcagccagtgcctgtatgcgggcatcggcaggcgcggcgcgcaccgctgctgtacggctgcgccccagcagcgtaccccgggctggcacggccttgcgctgcgtgtgcgtgtgcgtgtgcgtgtgcgtgtgctcgtcctcggccaaagggcctgcctggtcactggcctggcgggcttgctgggcatcttgggcggcaggctctgcgggcaagggcagggcgtcgaacagggctgtttgctgtggtggcgggctggcgggcatggcagcgatgatagggctatgtgccgagacgacccatggcacgtcccgcgtattcagcccagacggcacaatggcgcaagcgccacactgtggtggcgcacgcatgcgcacagacgcaatagggagagaacaaggatgcgttggttgggatttgccgggctgttgttggccctgctcatcacgggcctggtggtcaaacagcagctgcagaccgcacgccctgccctgccccaatcgggcggaggcgtggccttaccagaagggacaaagccgcccatcaccagggccacgacgccagaggcctacggcgagcaagtccggcagcagtatcaaaagacgctggatgcggccatggagcagcagcaacgcgcgctggaggccgccacgcagtgagcgatgcgctcttggtcaacgcggctttggcggcgtgccgggcgcggccatcatggagaagtcgcgctcaaagcgcatcaggtgctggccgccatcgaccagcagcgtggtgccggtcagcgaggcgttgctcaatgcgaagtgcacggcggcggccacatcctcaggggtggacgagcgccccagcgggctgagttggtgcaggcgcgcaaaactgctggcgtcgaggaattcgctggtcagcgtcagccccggcgcaacgccgacgacacgcacccaaggagccaaagccaacgccaacatggtgccggccgcttccagcgccgccttggagagggtgtagctgagaaagtctgggttctggttccagagcttctggtccagcaggttcacgaccacgccctgcggcttggccgcagccgccgcatcatcgccatcggcggtagcaacagccgcggcgcgcgcctgcaggtgggcctgcagggcctgcgccagcacaatgggcgcggccgtgttgctgcgcagatgccgctccaggctggcgtagctgaagtcgctggcatcgtcaaattcgaagcgcgaggcactgttgacgatggcatcgacgcggccaaagcgcgccaacgctgcaggcagcagcgcgcgggtttgcgcctcgtcgtcaaagtcggcggccagcgcatggctgtcggcaccggcggcgcggcaagcctgcaccgtggcctgcgcggcggcgctggagtggcggtagtgcacggccacattccagccctgctgcgccagatgcacggcgatggccgcccccaggcgcaagccggccccggtgaccagcacggtgggcctggcgtggccggcgggcaaagcggtggcagggctggggttggggggcatgaagggctgcgacaatcgcggcatggacgatgaaacacacgcaaacgcgccgagtgtaaccggccccttgtcggccaaactgcgccaggccatcgccgcccagcagggctggctgggctttgatgccttcatgcaaatggccttgtacgagcctggcctgggctattacagcaatgcgcggcgcaagatcggggccatgcctgccaccgccacatccgttggggctggcgaaggcagcgatttcgtcaccgcgccggagctctcgccgctgttcggccgctgcgtggccgtgcagttggcgcaagcgctgcacgtgagcggcaccgacacggtgtacgagttcggcgcaggccacggcagcctggcgcgcgaggtgctgggcacgctgcaggccatgggcgcgccgctgcggcgctactgcatcatcgacgtctccggcgcgctgcgcgcgcgccaggctcaaaccctggcggcatttggcgcgcaggtgcaatggctggacgagctgccgcaaaccctcgaaggcgtactgctgggcaacgaggtgctggacgccatgcccgtgaagctgttggcctgcaagcagggccagtggcacgagcggggcgtggcgctcgatcccgccggcgccttcacctgggccgaccgccccagcgcgctgcgcccgccctgcgagcccagcgccagcgagctggccgcccaggcctggccaggcgatgcgctgccgctgcaggggccgggcgatgcctgcgactacctgaccgaaatccacccctgggccgaagcctttgtacgcacctgcgccgagcgcctgcgcaagggcgccatgctgtggatcgattacggctttggcgagcgcgagtactaccacccgcagcgccgcagcggcacgctggcctgccacttccagcaccgcatggacgaccagcctctgcacgacgtaggccagaaggacatcaccagccacgtcaacttcaccggcattgccgtggccgcacaggaagccggcctggaagtgctgggctacacctcgcaggcgcgctttttgatcaactgcggcatccaagcgctgctggacgcggccagcctgcctgagcgcgccatggccgccaagctgctgcacgagcacgaaatgggcgagctgttcaaggtgatgatgctgggcaaaggcccattctgggagccgcaaggctttgccaccggggatcgcacgcatacgctgtagcagcgcccagcgacgcgccgcatcaaacatccagaggatgcagcaaaaagcccttgcggcaggccatgcagcaagggcttgaaatgtctggaggcgcggcccggaatcgaaccggggtaaacggatttgcaatccggtgcataaccactttgctaccgcgccagaaacgatgcattctacacgagttgcaaggcccgcgcagagagcgcgggccttgcgcgggcaggctcaggcctgcttggcctcctcacggtagatcaacagcggcggcgcgccttcggtaatggtggcctcctcgacgacaactttctgcacatcgtgcatcgacggcagttcgtacatcgtggtcagcagcgcctgctccaggatggagcgcaggccgcgcgcaccggtcttgcgcgcaatggccttgcgggcgatggcctgcaaggcttcggggcggatttccagctcgacgttttccatacccagcagcttggcgtactgcttgaccaacgcattgcgcggctcggtgaggatttgcaccagcgcggcctcgtcgagttcggccagcgcagtgaccactggcaggcgaccgatcagctcggggatgatgccgtacttgatgaggtcttcaggctcgatctcggcaaacagctcgctgacgctgcggccggccttggactgcaccgccgcgccaaagccgatgcccgaggcctcggtgcggttctcgatgactttttccagcccggcaaaggcgccgccgcaaatgaacaggatgttggaggtatcaacctgcagaaagtcctggttggggtgcttgcgcccgccttgtggcggaatgctggccatggtgccttcaatgagcttgagcagggcctgctgcaccccctcgccagagacatcgcgcgtgatcgaggggttgtcggccttgcggctgatcttgtcgatctcgtcgatgtagacgatgccgcgctgggcctgctcgaccttatagtcgcagctttgcagcagcttctggatgatgttttccacgtcttcgccaacgtagccggcctcggtcagcgtggtggcatctgccatgacgaagggcacgttgagcatcttggccagggtctgcgccagcagggtcttgcccgagccggtcgggccgatgagcaggatgttgctcttggagagctcaaccccatcgtcggccgcgccagcgccttgctggtcgcggtgccacaggcgcttgtagtggttatagactgccacggccagggcctgcttggccttgtcctggccgatgacgtactgatccaggttggccttgatctgtgcgggcgtgggcagatccgggcgggcctcggcgccatcggcactggcacccgcttcactggcttcgctgtgaaccaattcattgcacatggccaggcattcatcgcagatgaagccattgagcccggcaatcagctgcttgacctcgtgttggttcttgccacaaaaggagcagtacagggttttttcgccattggcgcggtgtttgtcagccattcgcgcagtgcctttgaatgaggggaaagggcggtcggcgcagcctgggcaggcgtgcgccatgcagaggcgccaagagcctgttcagccgccgcgcttttcgacgacgctatcgaccaggccgtagtccttggcctcgtcggcggtcatgaagtagtcgcgctcggtgtcgcgctggattttctcgtagggctggccagtgcgctcggccaggatgcggttcatctgctccttggtgcgcaggatgtcgcgggcgtggatctcgatgtcggtagcctggccgcgcgcgccgccgagcacctggtggatcatgaccttgctgttgggcagcgagtagcgcttgcccttggcgccagcggccagcaaga

SEQ ID NO: 1813 - DNA, 23165 bp, synthetic construct
  source 1..23165: mol_type = other DNA
  misc_feature 1..23165: note = Synthetic
ccatcgggaaacgccagtaccacaccgatgaacatcgcagccatcatgaacagccacaggtcgggaaagctctcggaaaagtaggtcttcccaaagttcaccaacagcgcgccatagacagcgccgaccagcgacatgcgcccacccactgccgcaaaaatcaccatctcgatggacggcacgatacccaccagcgacggcgacataaagcccacctgcaaggtaaaaagcgcaccaccgatggccgagagcaccgcagccaggcagaacgcaaacacccggaacatggccacgtcgtagcccgaaaaacgcacgcggtcttccttgtcgcgcatggccagcagcaaggtgcccagcttgcttttttgaatccacaggcacaggccaatggagcccagcagcagcgccaccgtgacgaagtacaggatgtatttggcgctgtcggtgcgggtgtcccaacccatcagggtcttcaggtcggtcataccgttcactccgccggtgtagccctgctggccaatgatgagcaccgtgaggatcagcgccaccgcctgggtgatgatggcgaagtagaccccacccacacgccgcttgaacatcgcaaaaccgatgatgaaggccagcagcgcaggcaccaccaaaatcatcagcagcgtcagcggaaacgagcggaacggctcccaccacagcggtagcgccgcgatctggttccagtccatgaagtcaggaatgccgggggtcgattggattttggtggtcaccgggtcgctggcttccagcttcaagaacatggccatgccgtagccgcccatgccgaagaaaacgccctgccccaggctgagcacaccaccgtagccccacagcatgaccaggcccagggccacaaaggcatagctcaaatacttgcccaccaggttcaggcgaaacaggtcgaatgccagcgggaacaccaccagcagcacggcagctagcaccagcacgctgcccagctggttgcgctcaatccaatgtttgaaggcgttcatgggtatagatctcggtgagtgggtgatttcagcgacgcactttggaggcgaacaagccctgcggacgcagcatcaggatggtcacgatcagcatcagcgtgagcaccttggccatggagccggtcatgaaaaactcggcaatcgactgcgtctgggcaatgccaaaggccgacaccaccgtgcccagcaggctggccgctccgccaaaggtcaccaccaaaaaggcatcaacgatgtacagcgaaccgctggtgggcccggttgagccgatggtggtgaaggcggcacccgccacaccggccacgccgcagccaatggtaaaggtgagccggtcggtcttgcgggtgttgatgcctgtcgcgttggccatcgcacggttggccaccgtggcccgcacccgcagaccccagcggcttttgtacagcgccagcaacacaccgcccgtcacaaacagcgtgagccccatcacaaacagtccgttgatgggaatgtccaaccccggcaccggtgcccaggagcccatcaaccagttgggcaagctggggctgacttctttggcaccaaagctggtgcgaaatatctgctgcatgcccagcgacagcccccaggtggccagcaaggtgtctagtgggcggtggtacaggtggcgaatgaacagccactccaccagccaaccgaccgcaaacgcgagcatgaaggccgccacaatggcaaatggaaaatacatctgcaccagcttgggtgcaaaggtttcggccaggtgagagaacaggtaaatggtgtaggcaccaatggtcatgaactcgccgtgggccatgttgatcacgcccatctggccaaaaataatcgccagccccaggcccatgagcaacaacacggaaaacaggctcagacctgcaaagccttgcatcaagccgatgttgagcatttcggatagggacatggtgaactcctgaattactgagcgatgtaggtgccatcaaccagccgacgcagcgtcggctggccgcggccgcttactgctttactggtagcccttggggaaagggttgggttcaatcaggttgggcgactcggcgaccaccttgaactggccgtctttctgggccacgccgatgcgcgccttgctccacaggtggcggttttcgtgaatcttcacgtagccctcgggtgcggttttcaactcgatgtctgtggacgcagcagaaatcttgtccacatcgaaactgcccgctttttcaactgtggccttccacagccacgggcccaggtaggcggcctgcgtcacgtcgccaatcaccgcgtctttgccatacttggccttgaaggcagtcacaaaggctttgttgttcgggttgtccagcgactggaaatacttcatcgaggcaaagtaaccttccatgttttcgccgccaatgcccagcacctcgtcttccgtcaccgagatggtcagcaagaactgcttggccgccgtcacacctgcggccttgagctgtttgtagaaggccacgttggagccacccaccacggcaatgaaaatgcaatcgggcttggccaccttgatcttgttgatcagggagttgaagttggtgtggcccagcgggtagtactcctcgcccaccacgctgccagttttggccacgcgctcaatgtgggcgcgggcaatcttcatcgaggtgcggggccagatgtagtccgagccgaccaggaaataggtcttggctttcttctctttggaagcccagtccagcccatacaaaatctgctgggtggcttcctggccggtgtagatcacgttcttgctctgctccaggccctcgtaaaacgtggggtagtacagcatgccattttctttttcaaagatcggcagcaccgctttgcgcgaggcagaggtccagcagccaaacacggccgccaccttgtcgttgaccagcagctttttggacttttcggcaaaggtcggccagtccgacgcgccgtcttccttgatgaccttgatcttgcggcccagcacgccgcccatggcgttgatctggtcaatggccaactgctcggcctggatcgagcccgtctctgaaatggccatggtgccggtggccgagtgcaactggcccaccgtcacctcggtatcggtaatggccagcttggtggtgttgaccttggcggtggggaactgcgcagactgcgcccaggcgggcattgccaccacaggcagggcagcacccaggccctgcatcaggcggcggcggctgattgaagaataggaatcgtgaccgttggacatgttgggctcctgaaagaacaagggtggaatgaactgacggtgttcatcatgttcaggaggccgtgtttgcccaatacgttaatcaacgtagggagtgacgtagcgccttcgcagcacaagcattcggggtcagatcaagattcaggacgcggtgccaatcagcacacaagacaaaaacagccaaccgcccaggtgtttattgctcaagcagctatcaaaatcgtagtgatcgaaccccttagccgcacaacaagcattcggagtctgatcaaaattcaggacacggtttgtatcggcgcgcgcggcaccgatacgaaattttgctctgaccccgattgcgcgtacccggcgactgcatgcgcgttgcaagcaggttcgtcccgatacgcaagcaaaaaatcgaggtcaaagcccagcaggggcacgcttcttgcgcttaccccgcaagcatcccggagcccgccttgaccgttgccacccagaaaatcttccgcatacgccgcgaatacaacgcctgggtggctgacgagtcgattgaagactatgcgctgcgctacacgccgcgtgggtttcgcaagtggtctgaatggcgggtgggcaacacggcttttggggcggtgtcgtttctggcgctcgaagccattggcggcgcgattgcgctgaactacggctttaccaatgcgctgtgggccattctcgtggtggggctcatcacgtttttaaccggcttgcctatcagctattacgcggcacgctacggtgtggacatggacttgctgacgcggggcgcgggctttggctacctgggctccaccatcacctcgctgatttacgccagttttacgttcatctttttcgcacttgaagcggccatcatggcgctggccttgcagatgtttttgcacatacccattgtgtggtgctatgccatcagcgcgctggtcatcttgcccatggtggtgcgcggcatcacgctgatctccaagctgcagatgtggacgcaacccttttggggcgtgctgttgttgctgccttatctggctgttttgtggaaaaacccccaggctttttctgatttcacgggtttggtggggcgcacatcaggcagcagcgactttgacccgctcatgtttggtgcggccgccacggtggcgttctcgttggtggtgcaggtgggcgaacaggtcgattttttgcggtttctgcccgaaaaaacccaagccaaccgcaagcgctggtgggccgccgttttgctggcggggccgggctggattgtgctgggcatgctcaagatgctgggtggtgcatttttggcgtatctggtgttgcaaaacgagctgccagcggccaaggcggtggagcccacgcagatgtacctggcggggttcgcgtatgtgttcaccagccccacctgggtgctggcggccacggtgatttttgtggtgatctcgcaggtcaagatcaacctgaccaatgcttacgcgggctcgctggcctggtcgaatttttttgcacggctgacgcacagccaccccggccgcgtggtgtggctggtgttcaacgtggcgatcgccctgctgctgatgacgctgggcgtgtttgcagcgctagaaaaagtgctggggctttacagcaacgtggccattgcctgggtgggcgcgctggtggccgatctggtgatcaacaaaccgctgggcctcagccccaagggcattgaattcaagcgggcgcatttgtatgacatcaacccggtcggcctgggctcgatgctgctggcagcggccctggcggtggtggcccataccggggcgctgggtgatgtagcgcaagccttttcacccttcattgcgttgggtgctgcgctggtgttgtcgccgctgctggcctggctgacccgtgggcgctactacatcgcccgccagccccagcccatgggcatgcccggccagatgctcaagtgccacgtgtgcgagaacgcgtttgaagcggaagacatggccagttgcccggcctatggcgctgccatttgttcgctgtgctgcaccttggaatcgcgctgccacgaccgctgcaaaacccgctcgcgggccgctgagcaggccgagcactttttaagccggctgctgcccagcgccctgtccagccgggtcaatttccgggtgggtcattacatcgtggtcacgctgtctttgtgcgcgctgctggccaccgtgatgggtatggtctatacccaagaggccgcgctgctggcggccacagacccctcggccccgttgcgctcggcctttatcaaggtgtttgccatgctgctgttgatcgtgacggtgtgcagctggtggattgtgctgagcagcgaaagccgtcgcatggcacaagacgagtccaaccgccagaaccagttgctgtcgcgcgagattgaggcccaccagcgcaccgaccaggccttgcagcaggccaaggagctggctgaatcggccaaccaggccaaaacccgctatgtggcgggcatgtcgcacgagctgcgcacgccgctgaacagcatcttggggtattcgcagattttgctcaaaagcgaagagttgcaaaccaagccgcgccaggctgtgcaaaccattcaacgcagtggcgagcacctgctggccctggtcgacggcttgctggatctggcgcgcattgaagccggccgcttgcggctggagccggcaccggtgccgctgcctgattttctgaatggtctggttcacatggtgcggccacaagcccaggccaaggggcttgatttcgtgctcaccacccatgggcgcatgcccgcctgggtgcaggcagacgccaagcgcctggggcaaatcatcatcaacctgctgagcaatgccgtggcatttaccgacgcgggccgcgtgaccctgcatgtggattgccgacgcgaggtgattcgctttgacgtggtggacaccggcattggcattgcgcagcaagaccagcagcgcatttttctgccgtttgaacgcggcacggcgggccgccagcgcggcgagccgggtacggggttaggcttgacgattaccgccttgctcacctcgctgatgggcggcgagctgacgctgcgcagcgaacaagaccagggcagcaccttcagcgtgcgcctttacttgcgcgagatagacgacccgggcccgctagccaacccgccgcgccagatcatgggcttttttggccagcgcaaaaccctgttggtggtcgacgaccagcccgtgcagcgccagatgctggccggcatgctgctacccctgggctttgcggtgcgcgaggccgccagcggtctggaatgcctggacagcgtggccagccagatgcccgatgcgattttgctggacctgagcatggacggcctggacggctgggaaaccgcccagcaactacgcgcccgcggctatgcgcaagtgcccatcattctggtgtcggccaatgtgtttgagaaccaggccgcccggctcaagcaggccggttgccaggcttttgtgggcaagcccgtgttggagtccgagctgatggaagccttgcagcgtcacatcggcttgcaatgggtcaccacagccgtgctgcctgccgccgccgccccggccacgtcaccaggcgcgacccacctgcccgacgacatgcgggccgagctggtggccctggcccggctgggccatatccacggactgcaccgcctgctggacagctttgccgcgcaagaacccaacctggccccgcagtgcagccagctgcgggcatttgtgacccgctacgacctggacggcatgctgcaagcactgaacctcgatgccgggagcgacccagatgccaactgaaaccgcctcgcagcgccctgttgtgctggtggtcgacgacacacccagcagcctgggcttgctgtgcgatgtgctggagggcgagggctacaccgtgctggtggcgcgcgatggcgatgcggctttgcagcgcctggagctggtcgtgcccgatgccattttgctggacgccgtgatgcccggcctgtcgggttttgagacctgccgacgcatcaaggcagacccggccctggcgcacattcccatcatcttcatgaccggcttgtcagatacgccccatgtgctggaaggctttgcctgcggcggcgtggactatgtcgtcaaacccctgcgcgcacccgaggtggtggcccgcctgcaaacccacacccgcaacgcacacatcacgcgcctggcgcgccaggcggtcgacgtggccgggtttggcgtggtgctggttgacgcaggccggcgcattgcctggtgctcgccgcaggctgccaactggcttgcgttgatagacccagaggcaccggctggctggctaccccaggacctgcatgccgccaccaccaccgaccccgaagcggtgttgctggagcgcgcgggcacctggctgtcggtgcgcaacatggggcatgtgggcatcggcgaggccatgctgttgatcgaacagcgccaccacaccagcgccaccccctcacgcctggaaagcgcagccctcacccaacgcgaaaccgaggtgctgtcgtggctggccaaaggcaaaaccaacaaagacataggcgacatattgggtatgagccaccgcacggtcaataagcacctggagcatgttttccagaaactaggcgttgaaacgcgcacggcggcggcggccttggccaacagcctgtgacatcacggggcacctgatcgctgatcctggcccccacatcaacctcaccggcaacgcccggctggcgactgcgggaacgggcgatgtgctggcgggcttgctggccgcgcaggtgcatgccaacgcgtttgcggcgtatcggcttggtggcaacgtcgatacactttgcccatgtggcctgttcttgcaatttgcgtcggtgccagtgcgggtgcgctggcgcgctggggcctgggtttgtggctcaacccggtcgctggcgcttccgcgacgctgccgctgggcacgctgtcggccaatctgatcggcggttatttaatcggtgtgggcgtgggcgtgtttcaagcgctgccccagctagacgccgcctggcgcctgctgctggttacgggctttctgggtgcgctgaccacgttttccacgttctccgccgaagtggtggccatgctgcaatcccagcgctacgcattggccctgggcaccgcggcgctgcacttgatgggctcgctgatgctcaccgttttgggcatcaaaactgctagttattttgtagctgcttgatcccgatgacccccgagcgcgcacacgacatcgccgccacgctggatctgcgcgccctgcccgctgacttttacgccaacccttacccggtatatgcggccttgcgcgaaaccgagccagtcaaacgcatgcccgatggcagctacctgctgacgcgctatgccgatgtgatggcggtgtaccgcgatgcgcaaggcttcagctctgacaagcgccaggaattcgcccccaagttcaacctgccgccgtttgacgaacatcaccctgccccgctctaccagcaccacaccaccagcctggtgttcaacgacccgccgctgcacagccgggtccgccagctcatcatgggggcgctcacgcggcgggcgattgacgagctggagccgggtttgattgcattggtcgatggtttgctggatcgcatggcagctcagggcggcggcgatttgatagaagactttgccagcgccattccggtggagatcattggcaacctgctgggcgtgccgcatacagatcgggggccgctgcgcagctggtcgctggcgattttgggggcgctggagccgcagctctcggcgcaacagcaggcgctgggcaacgcggcggtgagcgagttcaccgactacctgcgccacctggtcgccgcgcgccgacggcagcctggcgacccgcaacacgatgtgttgacccgcttgattcaaggcgaaggtgcccagcagttaagcgaggccgagctgctgcaaaactgcgtgttcatcttgaatgccggccacgaaaccaccaccaatttgatcggcaatgcgttggttacgctgcaggaatggtctgagcagaagaatcatttgctatcaaatatgaagctgcttgagcaagatttacatgggctgcaggcctgtttgatgcttgccgtggatgaatttctgcgtttcgagtcgtccaaccagctgggcaaccgccgagcgctgcgcgatgctgaggtgggcggcgtgcagttgcccgcaggcagcctgatcacgctgtgcattggtgcggccaaccgcgacccggcggtgtttgacgagcccgacaccttacaactgcaccgcaaccccaaccgccacctggcctttggtttcggcattcaccagtgcgccggcctgagcctggcgcggctggaagggcgcgtggcgattgggcggtttttgcaacgctttcccaactaccagctcacgcagccaccggtgcgcggcgggcgggcgcggtttcgggggtttttgcgggcggggtttgaggtttgagatcaagcgtgtaggtcctgaagctgtttttctgcggcacctgagcgccgcaacaaaccccgtaaaaagacgaaaggccgcatgtagcggcctttccatttggtgctcatggatagaacttgttagcgtccagagcgcatatcccaagcgataagttcttgaaatgtatcgcaaaagtagttacaaacaaaatgaaacgtcaatctgcaaaaagggagctgccaatgtcacacaagatgcgttaccgcctagcgctggatctgggttctacatctttaggctgggccatggttcgcttaaaccatgaagcgccgcccgcacccctggccgtcatcaaagcgggtgtgcgcatcttttccgacggtcgtaacccgaaagacggctcctcgctggcggtcacgcgccgcgaggcccgcgccatgcggcgcaggcgggaccgcttgctcaagcgcaaggcgcgcatgacccacgccttgctggcgcatggcttttttccttccgatgaagccgcccgaaaggcactggaaaggctggacccttatgcgctgcgtgccaagggtctagacgaagcgctgaagcccgaagaatttgcccgcgcactgtttcacatcaaccaacgccgcggtttcaagagcaaccgcaaaacagacaagaaagacagcgacggcagcgcgctgaaaaatgccatcagcaagctgcggcaggcgctgaaagaagaccagtgccgcacggttgggcaatggctcaacaagcggaacaccaccggacagaccgttcgagcccgttaccggcaacaaagggtggaaaaagaagacggcaaaacgcgcatcgacaagagctacgacctgtacatcgaccgggcgatgatcgaagccgagtttgatgcgctgtgggccaaacaggctgagttaaacccggctttgtttcacgaaaccgcacgcgccgaactgaaagactgcctgctgcaccagcgcctgctcaagcctgtcaagcccggtcgttgcacgctgctgcccgacgaagaacgtgcgtcgctggcgctgcccagcacccagcggtttcgcctgtaccaggaggtgaacaacctgcgcatcctgcacgaaggtttgaaagaagagccactcaccctggcgcagcgcaaccagctgattgacgccctggagcaacacagcaagcgcagcttcacgcaaatcaaaaaactgctgggcttgggtggggccgttcaattcaatctggaagacgccaggcgccaggaactcaagggcaacaccaccagcgccattctggccagcaagcagcacttcggcccgccatggtttggctggagcgaagccacgcaggacgagatcgtggcgcaactggttggcgaagaaaacgaagcccggctggttcaatggctgcaagacacaaccggcgttgacgaagcgcgtgccgaaaccctggccaatgtggccctgcccgaaggctatgggagcctgagcgccaaggccctgcgccgtatcctgcccgcgctgcggcttgaggtgatcacctacgacaaagcagtgctagccgccggatttgagcaccacagccacatcagccatgctgccaccggcgaaatactgcccacgctgccttactacggccagtacctgcagcgccacgtgggctttggcacgggtgtgccagaagacgccgacgaaaagcgtttcggaaagattgccaaccccacggttcacatcggcctgaaccaggtgcgcgtggtcgtcaatgcactgatcaagcgctatggccaccccagcgaagtgattgtggaagtggcacgcgacttgaagcaaagccaggagcagcgcaaggaagacaacgaacgccaggccaaaaatcagaaacgcaatgaacgcctgcgcgccgacgctgccggcgttttgcaatgcgcgcccgagcgggtgcggcatgccgatattcaaaaaatgattttgtgggaggagttgagctttgacccggcttaccgacgctgcccgtacagcggcgtacaaatcagcgcagccatgctgctcagtgaccaggtggagatcgaacacatcttgccgttctcggaaacgctggacgacagcctgaacaacaaaaccgtggcaacccgccaggccaaccgcgtcaagggtaaccaaaccccctggcaggcccgcaatgactttgcggcgcaaggctgggcttatgcagacatgctgaaccgggctgagctgatgcccaggaataaacgctaccgctttgccgaagacggttacgagcaatggctgcgagacgacaaaggctttctggcccgcgcgctgaacgacacccgtcatttgagccgcgtcgcccgcgagtacctcagtctgatctgcccgcaagccacccgcgtgattccaggccagatgaccgccatgctgcgcggcaagttcggcttgaacgacatcctgggcctggacggcgaaaagaaccgcaacgaccaccggcaccacgcggtcgatgcctgcgtgattgcggtgacagaccaggggctgttgcaacgttttgcacacgccagtgccgacgcacgacaacagcaactcaaccgactggtagaaaacatgccccttccgtgggaaagctatcgggagcacgtgaagctggccgtcagccggatttgggtcagtcacaagcccgatcacagccatgaaggagccatgcacaacgacaccgcctatgcgctgctgggcaatggccgtgtcagcgttcgaaaagtgatcgacggtgccagggttcgcgaagaaagcacactcaaagtcattgaattttccagcgccaaatcagccgaccgacatggcctgatgcccaatggcgagccacgggcctacaagggctacaaaggcgacagcaactattgcatcgagattgttcgcggggagggcggcaagtgggaaggcgaggtgatttcgacgtttgaggcgtatcagattgcgcgaaaacacgggattgcgcagttgcgaaaccaggttgccagcgtcagtggcaagccactggtgatgcgcttgatgatcgacgactcgttgaagcttgaggtcgatggccagctaaaaaccatgcgtattgcatctatcaacagcgctggaaggctgagcctagccgcacaccaggaagccaatgtagatgcacgcaatcgagacaacactggtacttggcggtacacctacaaacaagccggctcgctcctgaaagccaacgcccgccgcgtcaccatctcccctctcggcgagctgcgtgaccccggcttcaagccgtagcccgcatcatgattggccgcatcgttgaaatcgccgacgaccggcgacacctgtccttacaccggggctttatggtggtgcaagacacggaaggcgagcgcaaagagctgggccaggtgccactggacgatattgcagccgtcattgccaatgcccatggtctgagctacgccaacaacctgctggtggcactggccgagcgcggcgcgccctttgtgctgtgcgcggccaaccacaacgccgtgggtatgttgctgcccatcgacggtaattttcagcaagccaagcgcatagaagcccaaattgcggcaagccaacccacgcacaaacgcctgtgggcccatgtggtgcgggccaagcttgagcagcaagcagcagccctggaagccaccggtgcgccacccgctcccttgctggcgctggcaaacaaagtcaaaagcggcgacccggaaaacttggaggcgcagggtgccaggcgttattggacgttgctatttggtgaaggctttcggcgcgaccagaacgctgacaacgtgaacggcctgttgaactacggatacaccgtgcttcgcgcggccacagcacgtgcggtgattgcggccggcctgcaccccagcattggcctgcaccacagcaacgacaacaacgccatgcgcctggtcgacgatttgatggagccctttcgcccggttatcgatctgaaggtctggcatctgcaacgcggcggcaaaaccgaggtcacacccgacaccaaacgtgccctggttcgtacgctgtacgacgacatgcagaccgatgcaggcgcaacaccggtgatggtatgtgcgcagcggctttgtacctccctggcacaggtttatctgggcgaacgtgacaagctcgatctgccgctacccggcttgcctctggcgctggcggcatcgctgaacaacgagtagctatgacggagttccacacatgctttcagggtaccgactgatgtggatcgtggtgatgtttgacttgcccgtggttgaaagggccgaacgcaaggcagccaccgagtttcgcaacggcctgctggacatgggcttcgagatgtcgcagttttcggtctacatgcgcttttgtaccagccaggcccaggtggacacgctatgcaaaaaagtagaacaggcattgcccggtggtggcaaagtgaatatcctgcagttcaccgacaagcaatacgaacgcatcctgtcattccatggccagaccaaacagcccggaaacaaggcccccgaccaatttgatcttttctagccctcacctcttcaggtggacaagtcagtcaagaaaatcgtccaagcacccgccgtttgactttgcaagagcaaaaatgagcacgccaaaaagcgaaaaacctcttgaaaatcaagaggttatcgccaacagagtctagtcgcttgggatatgcgctctggccggaacatgtactcagttcaagttaatgctcacggaagtctagtcgcttgggatatgcgctctggccggaacgggggacacatgctgaaagcaccgcgccaaagtctagtcgcttgggatatgcgctctggccggaacgcaagccgccgctgaacgggcgttgctatcagtctagtcgcttgggatatgcgctctggccggaacgtcaaccagcgcatgagtaagcacgaccccagtctagtcgcttgggatatgcgctctggccggaactgcgcggtgtgcatccagctttgcagttacagtctattcgcttgggatatgcgctctggccggaactgattgtctgctgtgcgtggtgcccaccgaagtctagtcgcttgggatatgcgctctggccggaacctattgttttgtattcccaaatagctcctagtctagtcgcttgggatatgcgctctggccggaacagctgcgcgcccggcaccaccagggtgcccagtctagtcgcttgggatatgcgctctggccggaacaagctggtcggcctcaatccatacactgtcagtctagtcgcttgggatatgcgctctggccggagtttttgggttgacaggcgctacgcaccggtcaacccaaaaccagcgctaaagcgccgtcaccaagtattctgttgtacccccagcgtttgccgcctgaattcacgcgaaatctgctcaccgctcagacggaagccagcttcaacccagaatttccattagggtttggatagacaacggatgcagttgcgagtcagttttggcccgactgaggagctcatggcgcgcgccatgggcgacgaagaggggcgaaaatggccgcaaatgcgccgttggaatccaaacagcgccgaaggtgcgcctaatggaaaatctgggttcaacccatgcagcacacactacgttttcgatagctgcttgaccaatccatacatgggctggtggctgtttttccctcaaaacggccaaaaaacctttccgtgggcaccgcagccttgcaatcacaatcccaagccatagatcaacccaacacctcaagcgaaagcccaccatgccccaagcccttcaaattgatttcgtctccgacgtggcctgcccctggtgcgccgtgggtttgtggagcctggagcgggcgctgcacaagctgggggatgacgtgccggtggagatcacgtttcagccgtttgagctgaaccccaagatgccgcctgaggggcaggacatcaccgagcacctgacgcaaaagtatggctccacacccgagcagcaggcgagcatgcgcgaaaccctgcgccagcgcggtgcggcggtgggttttgccttcaagcccgaagggcgggggcgggtgtggaacacctttgacgcgcaccgcttgctgcactgggcgggcacgcaaagcgccggtttgcagcacgcgctgaaaaaggctttgctggttgcgttttttacccacggcaaaggcctggcggcgcacgatgtgttgctgcaagcggccagcgacgcagggctggacacgacgcgggccgcgcaggtgctggccaccgacgagttcaccaccgaggtgcgggccgccgagcagttctggcaggcgcagggcattcacgcggtgccctcggttgtcatcaacaaacagcacctgatccaaggcggccagggccccgaggtgtttgagcaggcgctgcggcaaatcgcggcggaaatggcttgatatgagcgctctgcccgccttgttcgtctctcacggctcaccgatgtttgctattgaatcaggagctactggtgcgcttttgacaagggcgggcacccagttaagccccaaatcagtggtcatcatgtcgccccactggatggcccgcagcccggcggtcatgaccacggcggcacccaccacctggcacgactttggtggctttccaccagccctgtaccaactgcaatacccggcacctggtgcgccagccctgggccagcaggtgattgaactgctggcgcaagcaggtatcacggcccaggccgacgccacccgcccgctggaccatggtgcctgggtgccgctgatgcacctgtttcccgccgcccaggtgccggtggtgcaagtggccttgcccgcgcgcgtgggcccgcaagcggtgtacgccatgggccaggcgctggccagcctgcgcacgcagggcgtgctgctcatcggcagcggcagcatgacgcacaacctgcaagaatttttcagcaacgacaggcccggcctgcacgacgcgcccccgccctacgtgaccgagttcgcccgctggatagaagctgcggtgctgcgcggcgacttgcccgccttgctggcctacgccgagcaggccccgcacgccgcgcgtgcgcaccccactgacgatcactttttgcctctgtttttcgcgctgggggccagtggcctggggagtgaccccacccgcttgcaggtggactacatcagccgcgaggtgctgcatggaagcttggccatggatgcgttcagtgtgaaccaggcactataaaaagaatagctacttgtgctgatatagcaagggcgtttggccaattgagctcaaaaaatgaaagcctggagccttggcgaaggctctttgagccgctcaattgctgaacaactccaggatggagcgcttttcttccggtgctggtgccgtgacgggctcaccctctttcgcgcccgatgaacctggtaaagggtcgctcaagcccaggctgttaatgccccggccacgtgaaaattcttcataaaaccattcaccattgatgttgagcacgccctggggcgcgctggcttccaccacgggcacgcctttgagtgcagactccatgtagctgatccacaccggcagtgacaggccaccgccggtttcacggtcgcccagcttgcgtggtgtgtcatagccaatccagctgacggccaccgaggtgcggtggtagccagcaaaccaggcatcgatggaatcgttggtggtaccggttttcccataaatgtcggggcgcttgagtgtggcttgggccttggcggctgtgcccgatcgggttatctcctgcatcaggctggtcatcacaaacgcattgcgcgcgtcaatggcgcgcacgctttcatcaagcgccggcggcttgaattccagcaggctgcggccccgctgatcggtgatgcgggtgatcacatgggggttcacgcggtaaccgccgttggcaaacacggcatagcctgtggccatttgcatgggcgtgacagcgccagcgcccaaagccatcgtcaagtaggcggggtgcttgtcggcatcaaagccaaaacgcgtgatccagtcttgcgcggttttggggcccactgatttcaaaatgcggatggagatcatgtttttggatttggccaaaccgcgccgcatagacatcgggccatcgaaggtgccgtcgtagtttttgggctcccaagcctgaccacccgtggcggctgcgtcaaaaaacagcggcgcatcgttgatcaccgtcgcgcctgaaaagcctttttccaggcctgcggaatacacaaagggcttgaagctggagcccggttgccgccatgcctgcgtcacgtggttgaacttgtttttatcaaaatcaaacccgcccaccagtgcgcgcagcgcgccggtgcgcgggtccagcgccacgaaggcaccttccacttcgggcagttgcgtgatgtcccaagcgcccttgctgtttttcaccacgcgaatgacggctccgcgcctgatcttgatggcgggcgctgcgctggccgacaagcccgactgggcggctcgcaagccctcgccggtgatctccagctgctgggcgtgccgccgcatggcaacaatccttttggagttggactccagcaccacagcagccatcaactcgtcactgtccgggtgctcggtcagcgcatcgtccaccgcttcttccagctcgtttttgtctttgggcagatcaacaaatttctccgggccccggtaggcctggcggcgctcaaagtccatgatgcctttgcgcaaggcgcgataggccacctgctgctcggaggatttgatggtggtgtagacatcgagcccacgggtgtaggcctcgtcgccgtaatgggcaaaaataagctggcgcacggtttccgtcacaaactctgcatgcacccgcgaggtatcggggccggtgcgcacccgcacatcttctgcgcgggctgcggtggcctgctcggccgtgatgaaaccgttttccagcatgcggtcaatgatgtagagctggcggcgcttggcacgcgtgtagttggccaccgggttggctgacgacgggaatttgggcacacccgccagcatcgcagcctcggcaatgctgatgtttttcaagggcttgccaaagtaggcttccgaagcagaagcaaatccgtaggcccgattgcccaggaaaatctggttcatgtagacctccagaatctgctctttggtcagcgcatgctccagcttgaacgtgagcagaatttcgtaaatcttgcgggtcaaggttctttcgttggacaggtaaacgtttctggccacctgcatggtgatggtggaggcgccctggcttttgagcttgcccagattggcccagcccgcccgcagcacgccgatgtagtccaccccgccatgcgagaaaaaacgcgcatcttcaatcgccagcaccgcgtggctcatgtgctgcggaatgtcttgcaggcgggtgagggtacgccgctcttcaccaaattcgcccagcaaggcgccatctgcggaaaacacgcgcagcggcagcttggggcggtagtccgtcagatcagacacatctggcaaattctggtaggccgtggccaccgccaggcccgccgcaaacaatataaagaagccgaccgtcaccaccagaccgaaaccccaggccgccaacgtcagcaagcgtttgcgccagtgggggcctgtcggacggtgatcaggattggatgaagggggggtgctgttttgcataagaaagatgcctgctgccccattctaggaacgaaggtgaagttcgcgtgaagtcaacggctgggtaacaggtgtcagtctgtaaaacaagacaaatcagggcttagtggcatacgtagatgtcggggtcgcccgacagcgactcacttttctttgcgtcgccaaagaaaagtaagcaaaagaaaggcgacccgcagtctgggtcccttcgcttcgctgcgggcaccttgcggtgctcaaacccagtggggtcacgtgcaaactcgcctgcggctcaaacaagcacgtgccctgatccactgggttttgcgctcctcagcccagcctggacgggggttctgtttgcagagattccctaccctgctcagttcgaacggaaatttctaatttcaccgggcgaattgataaggagcctcctcaatagctgcgaccgcctccatacatcccgctgcttttgcgctgcaaaccggccgctgccgccagccgctgctgggcgccgcccacatgggcgtgggtaatcgccaggcccagcgcgtcggcggcgtctttgccgggcagggcggggagtttgagcaggcgcatcaccatttgctgcacctcggccttgccggctttgccgtagccggccacggcttttttcatttgtagcgcggtgtattcggccacctgcaggttacagctgaccagcgaggtcaggcaggcaccgcgcgcctggcccaagagcaaagtggcttgcgggttgacgttgacgaacacgatctccaccgaggacacatcgggctggtagcgcgccaccacttcactgatgccgtcaaacagcaccttgagccgcgctggcaactcgccgcgcggcaggtgggtggtggtaatggtgccgctggccacataggtcagcgcatggccggctacatcgaccacgccaaaaccggtggtctgcagaccggggtcaatgcctagcacccgcatgagaggggtttaattactatcaatttagtagctgctcgagcaatcaatctctgggctagacgccaaaataccatctaaccgagtgaaaaaagatcggtgcggcaaagcacagcgaatccacccggtccaacaagccgttggcgccggtgagtgacttgccctcggtgccccagttggtaatgccgcggtcgcgcttcagggctttcatcaccaggtgtcccagcgagccggcggcgcaggcaatcagcgccatggcaatggcctgggcaggtttgaatggcgtgatgggcgagaagatgccaccggcaaggcctgccacagccaagccaatggcccagctgcgccagttgaaggtgctgctgatctttggcgcactcggcacacgccccaggtgccgcgtgaccaactgctgcaccaccatgccgccttgcaccacaaacaccagaaaaaacaccagaaacgcgtttttcccctcataacccttgaagttcagcagcagcagcgcgggcacgtggctcatgccgtaaacgcaaaccatgatgccccactgcagcttggcattgcgctccagaaagcgctgtggatcgttggccagtgcgctcaccacgggaatcagcaaaaacacatagaccggaatgaacacggtgaacaaatcaaagtggcgggtgatcaccagccagaactgaatcggcagcaccacaaaaaacgccagcaccaggctgcggtggtcgccgcgccgggtgggcgacaaggtgatgaactcgcgcagcgccagaaacgccaccaacgcaaacaagatggtggcaaccgtgtcgcccgccgcccagcccacccagaacacgcccaccatcaaccaggtggtgttgagcaacttgccgtagtgccgcagctgcgcatgccgcgcctggctgtgctcgctggcattgcgctcgcgcagcgagagaaaaaacagggtgatggtggcaatcagcagaaagccaaaaacgatggcaaacaacgcgcccacctgctgccccggcgtgaggtagcgcagaaagttacccatcttcagcggcagctcgaacgatgcgtccatatcagatctcccgcagcgccatgatggccaagcgcgcccgatccaaaaacgcgcgccgctcttcttcggcgtccagtttcactggcgcaccaaaggtcaccgagcacaaaatcggcaccggcaccacttcgccttttggcatgacgcgctgcacgttattgatccacgcgggcaccagcaccacgttgggaaacttggtggccaggttgtacagaccggccttgaacggcatgggctcgtcggcattgccgcgcgtgccctcggggaagatgatgatggaatcaccctgtgccaacgcatcaatcagcggttgcagcgggtcttcatcgccctttttttcgcgctccacatacaccgcgttgaacaccgccgtggtcacccattttttaaacggcgacgaggtccagtagtccttggccgcaatcggccgcgtgatgccgcgcagctcttcgggcagcgccgcccacatcatcagcaggtcggcatggctttggtggttggcaaagtagatacgctgctccgccttgggcgggcatccgtaccagcgggcctgtgcgccggtaagcaggcgaatcaggcccagaagaaaccatcccattaatttggcaggcatgtcgcagacgatcggttgagtcgctcaccagagcgacgatggctcagggtagcttgtctgagatacgcacaccatgaaatgcgccgaattcagcggtgtagccgagtttgggcggcgattcgcgtagatccaaatgaatagagccttccttctcgaaaaattcgctaacggttccgtcgatcgccgacaccttgatgctggccctggatacctctggcacgctggactggatttgaacccggttagggcctgcttttcggatcacgatctgcgtgttgtcggtgttctggcggttcacgccaccctggatgtagccttcatacacacccaccatcagatcagccgcgtctggcttgggtttcttcttatcgggcgtggtttgcgcgagagccggttgaactgccatgagcagtgcgacgaagaaagcaagaatgccttgcatgatgggttgcctccagaagttgatgcagcgcagctgcgtgtgagaaaactcagtttaagcgaagccaccggttacaccagacctgaggaacctctggttaaaggttactcagaggttccctaacaaggcctgccgcgtcttgggtttctccagcgccttcagccaccaggccagcgccttgccaggtgtgggcgacgattgacattgccacacataacaaacccgggagacacggttttggcggcgcacggtcttgcggatcaggcggccggtttccacatacggctgcgccatgtactcgggcacaaaaccacagcccagaccgcgcagcagtgcgtccagcttggcctgaatgctggccacggtgaacacatcctgcccgcccaagaggccaatcgacaggccact

SEQ ID NO: 1814 - DNA, 23150 bp, synthetic construct
  source 1..23150: mol_type = other DNA
  misc_feature 1..23150: note = Synthetic
ctcgctggggccggtgctggagaagctggagacggcctaccagggccgcttcaagctggccaagatcgactccgaccagcagcagcagctcgccggcatgttcggcgtgcgcagcatccccacctgcgtgctgatggtgcagggccagccggtcgatggcttcatgggcgccctgcccgaggcgcaggtgcgcgccttcctggacaagcacctgcccgaaggcgcgccagccatcgaggacgagggcgcggagctggcggccgagccggccgtggaagaagacctgcagacccgcctggacaagctgcagcaggccgtgcaggacaagcccgaggacgaggccgcacgctttgactacgtcaagctgctgctggaaatgggcctggaggacgaggccaaggtggcctttgcgccggtcatcgcgcaggccggcacttcacagcgctatggcgcgctcaagacctggatggacgccctggacgccgcgcaccgcgcaggcgacgccaacgcccggctcaaggagctggacgcggccattgccgccgacaagcgcaacttcgaggcccgccaccagcgcgcgcaaatcctgctggcgcacaaccagtggacggccgccatggacgagctgctggagatcctgatgcgcgatcgccaatggagcgacggcctggcgcgcaagacctatgtggccatcctggacttgatcgagccgcccaagccggccgtggccgaagggcagatcccgcccgaagaccccaccgtggccagctaccgccgccgcctctccagcgtggtgttgagctgagcggctgttcaagcctgctctgatttgggcacgggcccgccggcaaacagccagggcttgtccatcagataagcacccatcagcctgagggcggcatcgcgcccatggcgcaccagcccttgcgcgtggaagatccggccgttgcgcagcgcctgtttttgcaccttggccacgcgcgcggcgcgcagccgggcccattgggccagcgccgcagggatggcctgggccggcgcatcggcctgcagcccctgcaggcattggcccagttgctgggcgtcctcgatcgccatggccgcgccctgggccaggaagggcaccatggggtgggcggcatcgcccagcaaggccatgcgccccgctgccagggcccgcgcagagggcacgggcttgcgaatgcgcagcggccactccgtccagcggtagcccagcgtgtccatgccgtgggcctcgatggccaaaatcgtgtccttgagctccttggccagcgccccatgccgctcgatgctggccagcaccgcctggatgtcggcactgccgcggcgggtgctgtgcgccagcgccgcgtcgttggcgatcaacaccacattgagccattcgctgccgcgcaagggatagaccacggcatgcaggtgcttgcccagccaggcgcacacctgctggcttctcaggcactgcggcagcgcagattgccggatgatgccccggtaagcggtgtaaccagagcgcgacagcggctcttgcgctgcctccagcaccgtttgctggcgcaatcggccgcctgcgccatcggcaatcaacagcagctcgccctgcagctgctgcgtcacgccgtcggcgccagcgatgcgcagggacaccgcctgcccggcggcgtggctgtcaatggcctgcacctgcccggccatgcgcagcgtcaggcgctcggtctgcctggcgcgctgcgccagacaatggagcaggtcggcccgcagcacggtggcatacggcgcgccatagcgctgctgcgcagtcagacccaggggcagcatgcccagaacagcgcccgtatgcaggtttttggccaccatggcatggggcaggctggagacggccagcacatcacgctccaagccccaggcgcgcaggcagcgccaggcattggggccgatttgcaggccagcgcccacttcgacgaactgcggggtttgctcgatcaaggtagtggcaaagccttgctcggccagcacgatggccgcgctcaggcccgcaatgccgccgcccgctaccagtgcctgtgatgtggcctgcatgtgttgctgatttgaagagaaaaaagcgcgcgctaccggcgctgctcaagctgcagcaaggccccggcgcgctgggcctgtgcacgcagttgcgccaggctgatgtcgccgttggcaatcaccagatcggccgcggccagcttggcgcggcgcggcgcctgctggccaagaatgcgctgcacctcttgcgccggcagttgcgagcgctgcatgacgcgctgcaattgcagctcagcgctgcaatcgacgatgaccaccgcatcgagccgcgggcgccagtgcgcggactccaccagcaaggggatgtccagcacgatggccgtctgccgccgcgcgcgcgcctgctgcaccagctcctgcaaggcctgaaaaatcaaggggtgcaagatggcttccagcgcctttttggcctgcgcatcggcaaacacgcgctggcgcatcctggccctgtccatggcgccatcggcgctgacgtattcggcgccgaagtgctgtgcaatggcggccacggccgcgccgccgggctgcgtcaactggcgcgaaatgccgtcggcatcggccacgggcacgtgaaacagctcctgccacaaagccgccaccgtgcttttgccgctgccgatgcccccgctcaggccaatcaggcgcggcggcttgctgtctggttcgcagtgcatggcaaacaggcggcgcggtcagcgttgggccgaagctgcgagctcgggccgcatcactgcggctgcgggttgcgcaggcggatgtgcagctcgcgcaattgcttttcgtccaccgcagagggggcctgggtgagcaagtcctgggcgcgctgggtcttggggaaggcgatcacgtcgcggatggattcggcgcgcgtcatcagggtgatgaggcgatccaggccaaaggccaggccgccgtgcggcggcgcgccgtattgcagcgcatcgagcaggtagccgaacttggcgcgcgcttcttcctcgccgatgttgagggcggcaaagaccttgctttgcacgtcggcgcggtggatacgcaccgagccgccgcccagctcccagccgttgagcaccatgtcgtaggccttggccacgcactggccggggtcgctgctgagcaactcctcgtgcccgtccttggggctggtgaaggggtggtgcatggccacccagcgcttgtcttcctcgtcgtactcgaacatggggaagtccaccacccacagcggtgcccagcggtcttcgaacaggccattggccttgccgaattcgctgtggccgatcttcacgcgcagcgcgcccatggcgtcgttgacgattttttccttgtccgcgccaaagaagatcaggtcgccatcctgcgcaccggtgcgcgccagcagctcggcaatggccttgtcgtgcaggttcttgacgatgggcgattgcaggccgtcgcggcccttggcgatgtcgttgaccttgatccaggccaggcccttggcgccgtagatcttgacgaactcggtgtaggcgtcgatctcgctgcgcggcatggcgccgccgccgggcacgcgcagcgccacgacgcgcccgccgggcatggtggccgggccggagaagactttgaactccacatcggccatcacgtccttgaggtcggtaaaagccagcttgacgcgcagatcgggcttgtccgagccgtacaggcgcatggcttcggcaaaggtcatgacggggaactcgcccagatccacgtccatggtcttggcaaacacctcgcaaatcatgcgctggaacagcgcacggatgtcctgctcggtgaggaaggacgtttcgatatcgatctgcgtgaactcgggctggcgatcggcgcgcaggtcttcatcgcggaagcacttggtgatctggtaatagcggtcgtagccggccaccatcagcatttgcttgtagagctggggcgactggggcaaggcgtagaactggccgtcgtgcacgcggctgggcacgaggtagtcgcgcgcgccttcgggcgtgctcttgcccagcatgggcgtttcgatgtcgatgaagccgtgcgcatccaggaactggcgcaccgccatgctgacgcggtagcgcagcatcaggtttttctgcatgtaagggcggcgcagatccatcacgcggtgcgtcaggcgcgtggtttcagacaggctgtcgtcgtccatctggaacggcggcgtgaccgaggggttgagcactttgagctcatggcacagcacttcaacccggccacttttgaggttgtcgttgctcgtgccttcggggcgcgcgcgcaccaggccggtgatttgcaggcagaactcgttgcgcaccgtttcggcggcggcgaacatctcggggcggtcggggtcgcacaccacctgcacatagccttcgcggtcgcgcaggtcgatgaagatcacgccgccatgatcgcggcggcggttgacccagccgcacagggtcacagtctggccagtcagggcttcggtgaccaggccgcagtattcggtgcgcattgccataaaaaatgtccgtttctggctggtttcagccgggggttgttctggtgcaaaaaaaagaaagcgccacagacagcgccaatcaggcggcagccggtgcggctggtgcgtccgggctactgctgccggcatcggctgccggggctgctgcgggcgcggcatcgccactgctgggcgccgggctgggcggcttgccgctgttcttgaaatccgtggcgtaccagcccgtgcccttgagctgaaagctcggcgcggacagctgcttggcaaaggcctgggcgccgcagtgcgggcactgcgtcagcggcgcatcggagagcttttgcaagacatccttgcgaaagccgcattggctgcacaggtaggcgtagatcggcataaaaacagcgcggcgaaaaatccagcaaaggccacggggcagcccatggcctgcccgcagaaaaaaccgctgattataaaagccgcgcacgggggcccgggcgcgcgccgcaaggcgcctggcccggcgcgccggcaggcagtctgtgcacgcatcgcagcgccgtgcgcagcagttaaactcacaggctttgtcagagcctgttctcagaatctgttcccaatctcggcgcgagtggcaagaagtggtttgggatgggctgcaaggcacaaagcgcagcccttgcaggcgccgcagaccgccccaagccgctctctggcccgccgccgtgcagagattttgaacaggttctcagccccttctctatctggatggacgccgatgcccagccaaaaccccgccccagcgcctgccggcgccaaggtgccttttgaactcaaaagcgccacgctgcccgtggtggcgctgctgctcaaatccacggacacctatgccatccgcaaggcgctggccgagcgctttgccgacgagccggatttcttcgacaacgatgccgtcatcatcgacctgagcgccgtgcgcgacgaccctggcgccatcgactttcgcgggctgatgggcacattgcgcagcctcaagaccacgcctgtggcggtgcgcggcggcaatgcggtgcagatcgagtttgcgcgcgccgccggcctatccgtggcgcccgacgccccgccgcagcgcgccgcccccgagcccgcaccgccctcggtggaaatccgtgaagtggtgcgcgaggtggaggtggtgcgcgaggcgcccgccagcgagacggtgctgatcgacaagcccctgcgctcgggccagcaggtctatgcccggggcgcggacctgatcgtcatgacggccgtgaacttcggcgccgaggtgatcgccgacggccatgtgcacgtgtatgcgccgctgcgcggccgcgccatcgccggcgcgcgcggcaaccccaatgcccgcatcctgaccctgtgcctggaggcgcagctggtttcggtggccggcatctaccgcactgcggaaaacgacctgccgccagaagtcgccggccgcccggcgcaggtgcgcctcgatggcgagcgcctgctcatcgagccgctgggcaaaggctgagcaatgacactctgaaacaccgccagctcatgacaggcgccaagcgccacgcgcaccaaggcagaatacgcacactttgacccgctccgccccgcagccaccgggccgggtgcgaccagaaccgtaactttcacaggatgcattccatggccaaaatcatcgtcgtcacttccggaaaaggcggggtcggtaaaaccaccaccagtgccagcttctcatcgggcctggccatgcgcgggcacaaaacggcagtgatcgatttcgacgtgggactgcgcaatctggacctgatcatgggcgccgagcgccgcgtggtctacgacctgatcaacgtcatccagggcgaggccaacctcaaccaggcgctgatcaaggacaagcagctggagaacctctacatcctggccgcctcgcaaacgcgcgacaaggacgcgctgaccgaagaaggcgtggaaaaggtgctcaacgacctggccggcatgggcttcgaatacatcatctgcgactcgcccgccggcatcgaaagcggcgcgctgctggcgatgaagttcgccgacgaggccctggtcgtgaccaacccggaagtctcctcggtgcgcgactccgaccgcatcctgggcatgctcgcctccaagaccaagcgcgccatcgacggcaaggaacccgtcaaggagcatctgctcatcacgcgctacaacccgggccgcgtcgagggcgggcagatgctgtcgctgagcgacatccaggaaatcctgcgcatcccgctcatcggcgtcatccccgaatccgagaccgtgctgcaggcctccaaccagggcctgccggccgtgcacatgaaaggctcggacgtggccgaggcctaccaagacgtgatcgcgcgctttctcggtgagcagcgaccgctgcgctttgtcgatgcccagaaaggcggttttctcaagcgcatcttcggcgggaggtaagccatggccttgatcgacatgctctttggcgggaagaaaaaaaccgcctccgtggccaaggagcgcctgcaaatcatcctcgcgcacgagcgcagcgaccgcaccaccagcaagccggacttcctcaacgacctgcaaaaagacctggtgcaggtgatctccaaatacatccagatccatcccaacgacatcaaggtcaacctcgaccgacaggacaacctggaagtgctggaggtcaagatcgagatgccggagtcggaactgcgcgccaagcccggcggccaataaatccagcactctgcccgcccgcccaggcgagcgcggcacctgctcacgcgccctgcccggccggcaatggcgtgcgggcaaacaccatggcggagaccgccgccacacccgcatcatgctgtagcacccgggccagcgcccacaacgtagcgcccgtggtcatcacgtcatcgaccagcagcacgtgctgcccttgcaagcacgggccgggctgctgcacagcaaaggcccggcgcagattgcgccagcgcgcctgccgccccatgccagcctgcggcgcctgcatgccgtggcgcagcaccacatcctggcgcagcttgtgcgcctgccccgtttgcgcagccagtgcgcgcgccagctcccaggcctggttgtagccgcgctgacgcaagcgcgccgcagccagcggcacggccacgatggcatcgacgccgtgcagcaaagccgtactgcccgattgccgcaacagcagctgcgcaaagccatgcgcccaggccggcgcagcgtagtacttgaactgggcaatgagctgctgccaagggtaggcgtagtccaccgccgccacgcaatgctgcaacgggccgggccgcaccatgcaggcaccgcagaccagggcagaccaaggcaacgccctgctctgcacctccccacccatctcgccccgcgcctcaccctgagccagcacgccatccgcaggggccggcaacggcaaggcacagcgcgcgcaacgcggcacctgccgcccatggcgcgccagacaatcgccgcacaggccagccggcccgcgccacaccggccagcgccggcacagcggacactgcgccggcagacaacgggccagcaagtcaacacgcaacaaatgcaaaggcatggcaggctcctgaacattggcaaccctgcctctgggccacccgcgctggcagcgtccaggcacggcctgccagcgcgccccatcatgccacggcaggcctcaccgcctaccgcctatactcgcgcgctggctgcgccgcccccaccgcctccactgaccacatgtcgtccgcagacaccccaccgaccctggaccctaccgcactggcgcgctggcaagcgcgcgcgccggcggccagcccctggctgcacgaagaagtcggtcggcgcatgcaagagcgcctggcctggatggctcgcgcaccacagacctggtgtgactgggaacccgtgcgcggcggcatgcaaacccacgacctgatcgtgcagcgctacccaaaaagcagctgctggatcgtgcagcaacagcccgagcagcaacgcgtggcagcccaacgctggcgcacaccgcgctgggcccgctgggccggccgcgccgccgtgcacctgcaagagcctgcgccgcaaagcctggacatgctctgggccaacatggccctgcaccagcaggcccagccccccgccgtactgcgccgctgggcgcaatggctcaagcccgatggcatggtgctgttctcctgccttgggcccgacaccctgcagcaactgcgcagcctgtaccagcaactgggctggccgccgcctgcgcagcaattcaccgacatgcacgacctgggcgacatgctggcggccaacggctttgccgagcccgtcatggacatggagtgcatcgagctgcaatacaccagcaccgagcgcctgctgcaagagctgcgcgagctgggccgcaacctgcacccacagcgctttgccgcgctgcgcgggcgccaatggctggcgcaatggcaccaggccctacaaagcctggccgacgcgcaaggccgcatcgggctgacatttgaaatcgtctacggccacgccatcaaggccgcccccgcaatgcccgtggccgcccaaacccacatcagcctggcagacatgcgccagagcctgcaaaaacaccgccgcgaaacttgagcgcccgcgcaaagtctttgcgtgacaggcaatcaagccgattggagctgtggtctggcgttgcaaacgcctcgccccgggccaccggggtccgactgcgttttgctgcttgtatcccatcccaaaccgcttcttgcccactcgcgccgaggctttgaacaggttctgagctgcaatacagccagaccgcacggcgacgcaggcgctgttcgcgattgggctgccaacaaccggcagctggcgccaaccacgtcggggattggcaaatcttggggccagaaaagccgaaagccgggcatgcccggctttccattttttgcatctagctacaaaagcatcagcttgttagcgaccagagcacaaatcccagtgaactagtgacagcgattataaccccatccgctctgtctctgcatatccatgcgcaattatttggtcgcgcaccccaacactggcaatgcactggtggcgtaatccccaattcaagaactccacgcacacaagccacaaaatgttaaattgcgcgcaaacggtgtctcgcggatagtctgcgaagggcttctgggaggcacttaacctgaggtcgtaaaacagcaaagaggggctacagcaagtagacagggctttcgagccgccccctggtgacagacatggatgccgcacagcatccatcaatgcatgaatgtgtggaaagggactggtttcgtgtcaagaaaaagaaacatcattcgttaccgactggctttggatctgggctccacctcgctgggctgggccatcctgcgcctgaatgctgacaaccagcccaccgccatcctcaaggctggcgtgcgcatcttcagcgatggccgaaacccaaaggatggctcctctctggccgtgacccgccgcgccgcccgcgccatgcgccgccgtcgcgaccgcctgctcaagcgcaaggcgcgcatgctggacaagctgattgcacatggcttcttcccacaggacgaggccgcgcgcaaagcattggaggtgctcaatccctaccagttgcgcgccgagggcttgcagcgcgcactgatgccgggcgagttcgcccgcgcaatgtttcatatcaaccagcgccgcggcttcaagagcaaccgcaagaccgacaagaaagacagcgacagcggcgccctcaaaaccgccatcagccaactgcgccagcaactgcaaaacgaaaacgcccgcacggtaggcgaatggctgtggcaacgcctgcaagccggccaaggcacgcgtgcccgctaccgggaaacgcgcatcgccaccgacacaggcaagggcaagatcgacaaaagctacgacctctatatcgaccgccagatggtggccgatgagttcgatgcgctgtgggccgtgcaggcggccttcaaccccgtactgttcaacgagcaggcacgggccgaactgcgcgacaccctgctgcatcaacgcccgttgcgcccggccaagccagggcgctgcaccttgctgccggaagaagagcgcgccccgctggccctgcccagcacgcagcgttttcgcatcctgcaagaggtgaatcacctgcgcattctgcacccagacttgcgtgaagaagcattgacgctggatcggcgcaatgccatcgtggccttgctggagaacaggggaaaagtcacgttccaggccatgcgcagaacactcaacctgggtgatgccgtgcaattcaatttggaagacgccaagcgccgtgaactcaagggcaatgccaccacggcggcactgtcgaaaaaggaactgttcggggcagcgtggcacgactttgacgaagccttgcaggacgacatcgtgctgcgcctggtcacggaagaaagcgaagccgaactggtgcaatggctgatcgaaaacactggcgtggatgaggcacgcgccacggccattgccaacactggcctgccagaaggctacggcagcctcagccgcaaggcactggcgcgcatcgtgcctgcgctgcgcgccgaggtcatcacctacgacaaggcggtgcaggccgccggctttgcccatcacagcgatttgcgattcagtttcgagtacgacagcgccgatgtggagcaggtgggagagcgtatcgacaaaaccaccggcgaaatcctgcctgtgtctgccttcaagcagttgccctactacggcaaggcgctgcaacgtcacgtggcctttggcagtggcaacccgcaagacccggaagaaaaacgctacggcaagatcgccaaccccaccgtacatatcggcctgaaccaggtgcgccgcgtggtcaacgatttgatccgacgttatggccggccaaccgaaatcgtggtggaactggcgcgcgagctcaagcaaagccgtgagcaaaagctggaggcgcaacgcaagcaagccgacaaccaaaagcgcaatgcgcgcattcgcgcggaaattgcgcctatcttgggcatcagcgaagagcgggtgaagcatgcagacattcagaaatggatcctgtgggaggagttgagctttgacgtcgccgaccgccgctgcccctacagcggcgtgcagatcagcgcgcgcatgctgctcagcgatgaggtggaaatcgagcacatcctgcccttctctcaaacgctggatgacagcctgaacaacaaaaccgtttccatgcggcaagccaaccgcatcaaaggcaaccgcacgccttggcaggcgcggcaggactttgaggcgcagggctggccgtacgagggcatgcagcaacgcgccgaacgcatgccccgcgccaaacgctaccgcttcgcgcccgatggttacgaacgctggctgggtgaggaccaaggctttctggcgcgcgcgctgaatgacacgcgctatctctcgcgcatcgcccgggattacctcacccttgtctgccccggcggtgtgcgggtgattccggggcggatgacggctttgctgcgcgccaagttcggcctgaatggggtcttgagcctgagcggcgagaaaaaccgcgatgaccatcgtcaccatgccgtggacgcctgtgtcattggcgttactgaccagggtctgttgcagcgctttgccgaggccagcgcgatggctcgccagcaaggactggaaaagctggtggaaacgatgcccttgccttgggaaacctacccagcgcatgtgcagcgcgccgtacaaaacatctgggtcagccaccgccccgaccatgggcatgagggcggcatgatggaagagacttcctacggcatcagcaaggatgggcgcatcaagcagcggcgcaaggccgatggcagtcaagggcgtgagatcagcaatctgatccgcatcagcgaaccaagccagcccgagcgccacggcgtagacgccgaaggccagcctttgccctacaaaggctatgtcggcggcagcaactactgcatcgaaatcacgcgcaatgacaaaggcaaatgggagggcgaagtgatctcgaccttccgcgcctatcaaatcgtgcgcaaacatggcgtggcgcgcctgcgacatccagagatggcacagaacgggaaggcgctggtgatgcgcctgatgattgacgactgcgtgcgcctagaattggacggacgggaagagacgatgcgtgtggtggtaattcccaggaacggacaggtcttcatggcgccactgcacgaagccaatgtggatgcccgcaaccgggataagaatgatccgttctcctatatctcgaagatggccggctccttcctaaaagccaaagcccgccacatcaccatctcgcccatcggcgagctgcacgaccccggcttcaagggctgagcaaggggcgcagcatgatcggccgcattgtcgaaatcgcagacgacaggcggcacctgttcgtcaaccgcggtttcatggtggtgcgcgataccgacggcgagcgcaaggagttgggccaggtgccgctggacgacatcgccgccgtcatcgccaatgcccacggcatcagctacaccaacaacctcctggtggctctagctgagcgcggcgcgcccttcgtactgtgcgcggccaaccacaatgccgtgggcatgctgctgacgctggacggccatcacgtgcaggccaagcgcatcgaagcgcaaatcgccgccagcttgcccacgcacaagcggctgtgggcggccatcgtcaaatccaaactggagcaacaagccgccgcactggaggccgcaggcgcgcccactgcgcccttgactgcattggtgcgcaaggtcaaaagcggtgatccggaaaacgtcgaaggccaaggcgcacggcgctactggggcttgctgttcggcaagaacttccgccgcgaccagaacgccggcggcctcaacgccctgctcaactacggctacaccatcctgcgttctgccaccgcccgcgccgtggtggctgccggcctacatcccagcatcggcctgcaccacagcaatgatggcaatgccatgcgcctggtggatgacctgatggagcctttccgcccagtcatcgacctgaaggtctggcaattgcagcgtgccggcgaagaacaagtcacgcccgaagccaagcgcgccttggtgcacacgctttacgacgacatgcaaagcagtgccggtgcgacgccggtgatggtttgcatgcagaaactggccgtctcgctggcccaggtgtatctgggccagcgcgacaagctggaactgccgctgccgggcttgccgctcgctctggccaaaggtctggaccaggaatgacacaatgccatgctttcaggataccgactgatgtggatgctggtgatgttcgacctgcccgtgctcaccaaagccgagcgcaaggccgccagcgatttccgcaaatcgctgctcgacatgggcttcgagatgagccagctcagcgtctatctgcgcttttgcaccagccagacccagctggatacttacgctcgccgagtcgaagccatcctgcccagcggcggcaaggtcagcgtgctacagttcaccgacaagcagtacgagcgcatcctcaccttccatggaagggccaagcagccgccgttgaaagcacccgatcagttcactcttttctagcttgaagcatgattcccacccccgaaaaaagcagaaaactccttgtagaacaaggagttactgcagagggaattttagatcactgggatttgtgctctgaccggaaccacctgtaccagcgtgctcgcaaccaaggaaattttagatcactgggatttgtgctctgaccggaacctcggaagtgaaccattgcagtttgccttgattttagatcactgggatttgtgctctgaccggaactcgacgccggcgcagacggacgcccgctcaattttagatcactgggatttgtgctctgaccggaacgcctgcacgcgcactgcgcgcaccaggccgattttagatcactgggatttgtgctctgaccggaactggcggtcggtgtctagtgcctctgcagcaattttagatcactgggatttgtgctctgaccggaactgtgcacttcaattcctgttcgcaattgccaattttagatcactgggatttgtgctctgaccggaacggtcgcgcagctgtccggctgaccctgtatattttagatcactgggatttgtgctctgaccggaacacgcaaagtcatcgctttggctcctgtaaaattttagatcactgggatttgtgctctgaccggaacatgctgaagctgcacggcggtttcgtgcgcattttagatcactgggatttgtgctctgaccggaacaggaaagcattatgtttgtgtcatttgattattttagatcactgggatttgtgctctgaccggaacaagacggcgacctgcccgagcagcctgaaaattttagatcactgggatttgtgctctgaccggaactggcaatcctgcctgtgccaggtcgcgatgattttagatcactgggatttgtgctctggccggaactcaacaaagaggtgaccgagctggccaagaattttagatcactgggatttgtgctctgaccggaacgtcggcaacctgatcgaccggctgctgctgattttagatcactgggatttgtgctctgaccggaacaagagcgacaagcgcatggaaggccgcaccattttagatcactgggatttgtgctctgaccggaaccagcgcaatcgccgcatttatccttgcgttattttagatcactgggatttgtgctctgaccggaacagtccatcagcgttgcgataacacttatgaattttagatcactgggatttgtgctctgaccggaacaggcatacgcgcgcgcccttggcctgccgcattttagatcactgggatttgtgctctgaccggaaccgaaggcgattgctgggtgacggatgatgcattttagatcactgggatttgtgctctgaccggaacagcaatccttcagcatcgatgcggctcctaattttagatcactgggatttgtgctctgaccggaactcgcccaatgccgaccccgcagtgctgcaggattttagatcactgggatttgtgctctgatagtgcgcacacatttaaagcaaatcaggtagcatttattactgcgtcaccacaacaaagcccgcctgcgattatctcggcgggctttgtcgtttggttaggtcgctcaggttgcgaaaaaatggaagggctggattcttgtcagcacgtctgcagccttttctttagctgcacgcaggtcgtattcagactgcagattgatccaaatttgcgcatccgttttgaaaaatttggccaggcgcagggctgtgtctgcggtgatggagcgcttgccgtgcacgatctcgttgatccggtgcggtgacactccaattgccttggccaaggcgtgttggctgatgcccatgggctccaaaaactcctcgttcagaatctcgccggggtggggccatgtgaattgagtcattgttccctttcagtgatcgtccacgctatctacatcgtctgcgttgttggtgacttcattccactttaagcaaatgcgccactgaccgttgatgcgagtactgaactgcccttggcggtcaaatttcaatgctttcaggcggttgctaggcgacaaacacaaaaattgatgctgttttcggcgtgcagcaatgcgatttgctgcagcactgcttttgcgatattggcaaatctctttttcggcagaaatcaaaagctccgccgcatcttcgcacttggagccggaaatcgttctatgatattagcaagtttcgttgatatcatcaaccatcatgaaagctctatcagtgcgccagccttgggctgatgcaatcgcttctggtcagaagtggatcgagttccgatctcggccaacgcaatatcgcggtgatctggtgatctgctcatcgcggttcaatgagggctacgtcgtggacgtgaatggggaggaaaaaccacttcctctcggtgttatgctgtgcgtcgtcaagctgattgactgtaggccaacaaaaaaggccgacgctaagcagccggggtatggtggtgcggatggctatttctcgtggattctggacaatcagatagatattttggttccgaagccagtgcgcgggatggttaatttcttcacagtccccgacgatgaaattgagttcgcgccagaaggcaaattctggttcgattacatgtaagccaaagggcttgcatcaatccataagaatgcctcattgacgcccaaagggcgagcctatctggtctctcagtattgggctcggacgcagctgccctggcgctggtatcagccaccgcatcgcacgcaagtggctgcgtcgcttcgccgccgagggcgaagctggtttactcgatcgtagattgcgcgcccttcactgcccacagcgcagtgatgctggcaagagcgcgcgccatggctctgcgctccgcactcagcggctgaccaatgtctggattgacaagcgagtaggcctgcccatcagcacggaggcaagagcttgtcaggccacagacgtagcccgattgccaccttacaagaacaccgcctgtgcgtcattacaagtgcaggaccgccggcaagttgctacacctagacaccaagcagcagatttgcgttcttatcagacgggccatggtgcaataaacgaaatcaattgtatatatattgcaacgccccgaattctaacccaatcaaaatcattaaaattttaccgtagggatctaaagtaaaatccataaacccaaataatcaatatcacttttctctgactgatgcatttgatccaagggtacgatacagctggatcacggcttcaacaatcacaattcctttcatttataccaacagctgccccgccagctccagtaccgacagcggagccgagccctcggccttgttgttgatggtcacataggcgttctggcctgcgccgcaggtgccgttgatgacgcgtgccagttgcgcgcgggtttcggggtcggggtcttgcaggcggttgaatggcgcgtattcggccttggcgctttcgtagccgtaggcgccgtggcggcggtgcaggttccagcggcacaccaaggggcctggccacagcgcgcgcagcagcggcaactgctcttcaatgggcggcattttggcgtgcaggcccagacagtaggtgatggggttgccgcgggcctggcgcgccgtgcgcaagacctgggccaattgcggggcatgggcgggggccagaaaggcggcgtcgcgcacttcgagcgcgaggacgccatcgggcgccacgggggccagcggtggcatggccgccagcaaggcaccgatgcgctcgatcagcgcgggcaactcgaccagccgcgcgcggggcaaggggctgagctgaaacaccagcgcgcccactttgtggcccagaccttgcaatgcgggttggatgaattcgcgcagcgccagctctggattcagaaacatcggattgggcgcgcggccgcagccgtcttcggcgcgcaccagcgcatcgcagaccaggctcggggccttgacgacgaagcgaaagtcatggggcacttgcgccgcatagtgcgcgtattgctgggcgctcaatgggcggtagaaggcccgatccaggctgacgctgcgcagcaacgggtgggcggcgtaggcggccagcccctgccgagagagttggctttggtcgtagtcgccatcccacaccagcccggcccaaccggggaagtgccaggaagaggtgcccatgcgcaggcggggcggcaaggctgccgccagggtctgtatgcgggcatcggggggcgcggcgcgcaccgctgctgtacggttgcgccgcagcggcgtaccctgggctggtacggccttgcgctgcgtatgcgtgtcctcggccaaagggcctgcctggtcactggcccggcgggcttgctgggcctctcgggcgacgggctcggcaggcaagggcagggcctcgaacagggctgtttgctgcggtggcgggctggcgggcatggcggcgatgatagggccacgcgccgactggcgcccatgaagtacagccgacacatccggcccaggcggcacaatggcacaggcgcctgccgtggtggcgagcgcatgcgcacagacgacagggaggagaaagatgcgttggttgggatttgccgggctgttgctggccctgctcatcacgggcctggtgatcaagcaacagctacaagccacacgccctgccccgcccccgccgggcgcgggtgtggccttgcccaatggcgcgagtagtgatggcgcgagaccgcccatcaccagggcaacgacgccagaggcctacggcgaacaagtccggcagcagtatcaacagacgctggatgcggccatggagcagcagcaacgcgcgctggaggccgctgctcagtgagcgatgcgctgcggcgccagcgcggtcaacgcggctttggcggcgtgccgggcgcggccatcatggagaaatcgcgctcgaagcgcatcaggtgctggccgccatcgaccagcagcgtggtaccggtcagcgaggcattgctcagcgcgaagtgcacggcggcggccacatcctcgggggtggacgagcgccccagcgggctgagctggtgcaggcgcgcaaagctgtcggcatcgaggaattcgctggtcagcgtcagccccggcgccacgccgacgacgcgcacccagggtgccagcgccagggccagcatggtgccggccgcttccagcgccgccttggagagggtgtagctgagaaagtccgggttctggttccagagcttctggtccagcaggttcacgaccacgccctgcggtctggccgtggccgccgcatcatcgccagttgcagcagcggcgcgcgcttgcaggtgggcctgcagggcctgggccagcacgatgggcgcggccgtgttgctgcgcaggtgctgctccaggctggcgtaggtgaagccgctggcatcgtcgaactcgaaacgcgaggcgctgttgacgatggcatcgacgcggccaaagcgcgccagcgccgcaggcagcagcgcgcgcgtctgcgcctcgtcgtcaaagtcggcggccagcgcctcgctgtcggccccggcggcgcggcaagcctgcgccgtagcctgcgcggcggcgctggagtggcgatagtgcacggccacattccagccctgctgcgccagatgcacggcgatggccgcccccaggcgcaggccagccccggtgaccagcacggtgggcctggcgcggccggcgggcaaagcggtggcagggctggggttgggggacatgaagggctgcgacaatcgcggcatggacgatgaaacacacgcaaacgcgctgagtgtaaccggccccttgtcggccaaactgcgccaggccatcgccgcccagcagggctggctgggctttgacgccttcatgcacatggccttgtacgaacccggcctgggctattacagcaatgcgcggcgcaagatcggggccatgcctgccaccgccacacccgctggggctggcgaaggcagcgatttcgtcaccgcgccggagctctcgccgctgttcggccgctgcgtggccgtgcaactggcgcaggcgctgcgcgtgagcggcaccgacacggtgtacgagttcggcgcaggccacggcagcctggcgcgcgaggtgctgggcacgctgcaggccatgggcgcgccgctgcggcgctactgcatcatcgacgtctccggcgcgctgcgcgcgcgccaggctcagaccctggcggcattcggcgcgcaggtgcaatggctggacgagctgccgcccacccttgaaggcgtgctgctgggcaacgaggtgctggacgccatgcccgtgaagctgctggcctgcaagcagggccaatggcatgagcggggcgtggcgctcgatgccgccgacgctttcacctgggccgaccgccccagcgcactgcgcccgccctgtgagcccaacgccagcgagctggccgcccaggcctggccaggcgatgcgctgccgctacaggggccgggcgatgcctgcgattacctgaccgaaattcacccctgggccgaagccttcgtgcgcacctgcgcagagcgcctgcgcaagggcgccatgctgtggatcgactacggctttggcgagcgcgagtactaccacccgcagcgccgcagcggcacgctggcctgccacttccagcaccgcatggacgaccaacccctgcacgacgtaggccagaaggacatcaccagccacgtcaacttcaccggcattgccgtggccgcacaggaagccggcctggaagtgctgggctacacctcgcaggcgcgctttctgatcaactgcggcatccagccgatgctcgacgctgccagcctgcccgagcgcgccatggccgccaagctgctgcacgagcacgaaatgggcgagctgttcaaggtgatgatgctgggcgcaggcccattctgggagccgcaaggctttgccagcggcgatcgcacgcatacgctgtagccgccttgtagcgccgccccgcatcgaacatcctgcgcgcgcagtaaaaagcccttgcggcaggccatgcagcaagggcttgaaatgtctggaggcgcggcccggaatcgaaccggggtcaacggatttgcaatccggtgcataaccactttgctaccgcgccagaaaccgcgcattctacacgagttgcgctgcccgcgcagggaggatcgccagcagcatgcaaagcccgtgccggacattctcggtgcaggctcaggcctgcttggcctcctcgcggcagatcagcagcggcggcgcgccttcggtgatggtggcctcctcgacgacgactttctgcacatcgtgcatcgacggcagttcgtacatcgtgctcagcagcgcctgctccaggatggagcgcagcccgcgcgcgccggtcttgcgcgcaatggccttgcgggcgatggcctgcagggcctcggggcggatttccagctcgacgttttccatgcccagcagcttggcgtattgcttgaccagcgcattgcgcggctcggtgaggatttgcaccagcgcggcctcgtcgagctcggccagcgcggtgaccaccggcaggcggccgatcagctcggggatgatgccgtacttgatgaggtcttcgggctcgatctgggcaaacaactcgctgacgctgcggccggccttggactgcaccgccgcgccaaagccgatgcccgaggcctcggtacggttttcgatgactttctccagcccggcaaaggcgccgccgcaaatgaacaggatgttggaggtatcgacctgcagaaaatcctggttggggtgcttgcgcccgccttgcggcgggatgctggccatggtgccttcgatgagcttgagcagggcctgctgcaccccttcgccggagacatcgcgcgtgatcgaggggttgtcggccttgcggctgatcttgtcgatctcgtcgatgtagacgatgccgcgctgggcctgctcgaccttgtagtcgcagctttgcagcagcttctggatgatgttttccacgtcctcgccaacgtagccggcctcggtcagcgtggtggcatcggccatgacgaagggcacgttgagcatcttggccagggtctgcgccagcaaggtcttgcccgagccggtcgggccgatgagcaggatgttgctcttggagagctcgaccccgtcgtcggccgcgccagcgccttgctggtcgcggtgccacaggcgcttgtagtggttgtagaccgccacggccagggcctgcttggccttgtcctggccgatgacgtactggtccaggttggccttgatctgtgcgggcgtgggcagatccgggcgggcctcggcgccatcggcgctggcgccggcttcatgggcctcgctgtgcaccagctcgttgcacatggccaggcattcgtcgcagatgaagccattgagtccggcaatcagctgtttgacttcgtgctggttcttgccgcagaaggagcagtacagggttttttcgccattggcgcggtgtttgtcagccattcgcgcagtgcctttgaatgaggaaaaaggggcgattggcgcagcctgggcaggcatgcgccgtgcaggcgccaagggcctgcttcagccgccgcgtttctcgacgacgctgtccaccaggccgtagtccttggcctcctgggcggtcatgaagtagtcgcgctcggtgtcgcgctggatcttttcgtagggctgaccggt

SEQ ID NO: 1815 - DNA, 23147 bp, synthetic construct
  misc_feature 1..23147: note = Synthetic
  source 1..23147: mol_type = other DNA
tgcaatcggtggttgtgctgcggtgtgtcactttcgtttgcaaaaaagtgatggccccaggcacatgtgatgaacgaaaagccgcctttgtcttggagaatgcaccgccatgaggagcagcattcgaccttttgcccagatgttcaatggcgtgatcgtcggcgtggccgtgctggcgctggtgggttgcagtaccgccaggacggatcgcggcgaggtcaagggcatggtgcctcggtcagcgagtggcttcagtcggacatgaaccgggtggccaacgtcggcatgcgcgacaacctcaacgcattgctcaggctggccgacaagctgtaccggcgcaatcccgccgaatggaagaagggcggttttgcaagccgcgaagatgcgctcaaggcgttgaaggcggccgtcgagacaccgcccctggcgagcagccgtgacggcaatgccaatgcggaaagcaatcccgagctgaaggccccgccggacaaggcagaagtcgcccgggccaccgagcaggcctggccgccgctcaagggcaagcgcgatatcgaggccatggatctggccctgtcccccgcattcaccggtgaccgtgtcggcgcgttcgtctacggcacggccgacatgctgatcaccgcgcatggcggcaagaccgagttctatctgatcgacggccaggacgcccagaacatctacaacgccgcgcgcaacatcgagattgccgcctggatgcttgcgcaccgcaagggcgacaacggcaagccactgctgctggccgatgaaatcaacgccaacgaacgcaacctgagctacgagcgcgagttcggcaagatcattgcgcggcttgatctgctggccgccgtgaccaccgagaaataccgccgcgcggtcatcggttacgcccaggggctggttggcggatcgttcctgcagttcctgccggtgcgctgaccgggatcgaccgcaggcgcggtgatacggccaccgctgcaaagcggtatgcaggcgtttgagactgcaacgatttgccacgcgccgccatacggcctcggccttgaacgggcttgcgttatgtaacttttcacgaggcgcgggccgctttcgcgctcacgcctgcacacaatttgctccgtgcgggttttcccggcagtgttacacccccgtctgccatcacgctgcggcagaggatccccggacgcggcggtatttcagcctggagggcactgcttcacatgacagacaacgaacttcccgacacctccggtgcgacagacgagtcgccagccgcgcagccaaagcgatatcgggcgttcatcagctacagccattcggacaaccgcgagcagggccgcaaatgggctgactggctgcaccacagcctcgagacgtaccagattcccgccgagctgatcggcaagccgaatgcgcatggacagccgatccccgcccagatctttccggtgttccaggacgagaaggagctgtcggccaattccgatctgagcgcatcgctcaaggaggcgcttgaccattcggacttcctggtgtttctcgcctcgccgcgatcggcgcgctcggactacgttcaggaagagctgcgccacttcaagcgcaacggcaagggcaaacagatcatcgccatgatcctgcgcggcgagcccgcgtatgacggagtgcaaagcgacgaccagtgcttcccggcggtgttgcgccacgcggtggacgagcaaggccagatcatcgagtcgcaggccgacgaggcgctggccgccgatgtgcgcctgccgcattcgcgcgacgagggattcacctcatccgaagcctatcgccagcatttgcaggcgcagaagctgcccgctggcgagatcaagcagcgcgtgcagcagtacgaggagcgactgaatcttgccaagctcaagatcatcgcgacgatcctcggcgtctcgctcgccgatctgaccaagcgtgatcaggcctaccagatcgagcgcatgcgccgcaggcaccgcatcgtcgtcggcgttgcggtcggcatgggcgggctcgcggtagcagcggcgtttgcgggcgtgatggcgtggcagcagaagaatcgcgcgcagcagaatttcgcgctgacgctctacacctcgggcttgaaccggctcgcgcaaaacgagtatggcgatcctgcggcctacatcgccgcgtcggtgcgccagggcaatgccaacgcaaccgcatttgccgagtcgatgctggcgaccaaggaagacctgacgccgctgccgaacatgagccccgccgatctggcgttcagccccgacgggcattacctcgcgggccgtgcgcgcatcggcaccagcacgctgcgcatgcagatctgggacgtgcgcactcacaagctggtggccgatctcaagcagctcgacatgcagcagggcatcggcaagccgtatttcgaccgtgacaaccgcctctacttcaccgacgacaagttccgcgtcgtgcgctacgacatggccaccggcgagcatgaattcatggtgcccaaccaggccgccgagcgactggtgctgcagggcgtgagcgtcgatggaaaatggctcggcctgcggcaactgggcaccaatctgcagatcgtgcgcgccggccagccgggcgccaaggcctcggtgcctgccaacctctcgcaggtggtgcaactcgatttcgcgcccgatggttccgcggccacgctgtgcgcggagcgcgaggacaagaagggcgaatgcctcatcgtgaagctgggcaatccggacgccgtcgagacgcgcacggtgcggatcgggtttgcaagccccaaggtgagttttgccgaaggcggtgaaaagctggtgttctggcgcggctccaatatcgagctatgggacggcggcgacccgcgcccgctgtccacgggcggcagcatctaccaatgggtggcgttcaatccgggcgcgaacaccctgctcggcatgggcgactccacgaccgacgtctaccgcctgcccaacggtgagcgcgaagagtcgcacaagttgccgctcggcgcgctcaagaccgtgttgcccgacaactacgcaagcgaaatgcgctcgcccgatcaggcgcactcggtggtgacgcgcaatgcacgcgcttttctttaccagcaggggccgacgccgcaactggtgaaccagctcacgttcgcggccgacacgcggcgcatcgcgagcgacccgaatggcaagtatctctacgcggtgcgcaaggattcgggcgtcgtgtcgcgcacgaatatcgccacccgcgagacccaggccgatttcattcgcgagccggagaccatcaccagtctcaatacgctgcgctcgggcgtggtggcgaccacgtccggaaaatacacgacgcggctctacgacgccgagaccggcaagcagatcggcagcgcaatcagcacgcgttccctgccgatattcagcgccgacgaaaagctcatgacggggcgcatgagcgccgacagcatgggcatctggcaggtcaccgacggcaagctcctcaaggagtggaagcccacggaaggcgaactgccgccctacgcgctggacccgagcttcaagcgcatggcgctgtccgatggcaagggcttgcgcgtcatcgatctggaaacgcgcaagccactgtttgaagacaaggagcagcccagcttcggcaggttcagcaccgatgggcaatggatggccacctccaacaaggatggccgcctgagcgtatggaacctcgcgagcgcgaagaaggcgctggacgtgcagagcattgcatcgccgatgctgcgcttcagccccgatggcaagaccatggtggtatcggaagacgcgcgcaggatgcggctgtggaatctggagtccgggcagtccgtgggacaggtcattccggtcaccgccaacgcgcagtggaccgagttctcgcaggacggccaacgcctgttcgtgcaggacaacgtgaccggttcgctcacgccgtcggtgaaggtgatcgacagtcacaacggcaacctgatctcgatgccgtttgcgcgtgtgctgcccaacgagttgatgctgtcgagcaacgagcagcaactggtgacggtgaccaccgccgtcgatgccatacaggcgcagatctggcaggtgccgggctcgatgcgcatgccgcccgagcaactggcgagtgacctggagagcttctacggccgcaaatacgatatggagaccggcgcgatacagtcgttcgaccgcgcagagacccattcatcgtggttcttcgccgacccgtacacgcgcacgttgacaccgacttcgagcgtcaccgtggcggcggacatcgcgcgccagttgccgcttgcgagcacggcgcagatgcagtcgctcgcggccatttatctgtaccacccgctcgcacgcgcaggcatcgccgagtatctggcgcgccagggcaagctgggcgcgatgtcgctgcaactcgcgtcggccacgcagatgcagctcgataacgagtccgcacgtctcggcgcgaacagcagcgtcgcgaccgccacgcgtgactggctggccaagacacgcgagcatctgggcatgcctgaaagcgctcgatgagcgacgaagcagaaggaatccggacaacatgaaattgggacgcaagttcaccagcctgttctgggccgccgtcgtggtggccatcatcgtgcttacctggtttggtctcgtgcgcgcctatcccgaaatcggatcggtgcgctatttccccgaccggctgtttcgcctcgtcaagaccgtcatgggctcggacccttcgggcaccgctctggagagccccgacgtgccgtggcagctcatcatcgcgaaactgctggtgacgctggtgctcattcgcgggctgatgaaactggtgggcggcgtgtttcgcgacaacgtcacgcaactgcgcgtgatgctcaagaagcggcccacggtcatcgtcggcgcgggcaggaagggccgcagcatagccgcagacctgcgcgagacgcatcacgaaacgggcgtgatcattgagcgcaatgcggattccagcgacatcgccgcgctgcgccgcgccggacatctggtgatttccggagacgcgaccacgtcgtccgtgctcaagagcgcgggcgcgcagaaggcgcgtcgcgtgatctgttttgcacaggagcagaagaccggcattcaggtcgcggggctggtgcgcgagctgtggagcgcgcgaaagaacctcgaccgcgagacctgcgactgccatgtccatctcgataatccgcagctcgtggacctgttccgcagccatgtgcaggcggaaattcagcccgtgcgcgtgcacttcttcaacctgcacaaaatggtggcgcgcagcctgttcgaccgctttgcgcaggagcttgccccgcgctcatgaacggcgcggggcgcgtgcgtgtcgatctgatcggtttcgggcaggaggcgcaggcgattctggtgcaggggctgcgcgtgtttcatctcggcttgcccgagggcgtgcaatggcatgtgtgggtggtcggcggcgatcctggcgcggcgcgcaagacgctggccgcgcgccatcccatggccgaccgcatcgcggacatccgctttcacggtgccgacgcgcactaccgcgcgctggtggatgaggccttcgcatgcccgtccgacacactgcacatcgtgatctgcgcgctgcccgacgacgaggccaacatcagcgccgccgccgagcttctgcaggccgcgccgaatgcgcaatttccggtgtttgcgcgctgcgcggagatcgacggccttccggcattgctcgcgggcacgcgtccgcgtttgcggctgttcggcaatctcgcggaattctgcaccgtggagatgatctgcggcgagcagcaggaccagctcgcacgcgccattcacgccgactacctcgcgctgacgcagggcaccatggccgaaagcgaggcctacaagaacgactgggcgcaactcagcgaggacgcacgcgatgcgaaccgcgcgcaggccgatcacatcccgtacaaactcatggcggtgcagggcgatgtgagaaagatcgatgaccagctgcttgaattcctcgcgatgatcgagcacgaacgctgggccgcgcatcgctttttgaacggctggcgctttggcccgagcgcgacgacgagcgcaagacccacccgtcgctggtgcactggaacgagctgagcgaaggtgagcgcgagaaggaccgagacgcggtgcggcggctgccgcaactgctcggcgtgacggcggggcagccgcctgcacagcccgtggcgagggcatcttcgcccgacgtgcaggcctgacggccttgccttaaaatcgtgcgcttcgccccaaggagcgctgcagcaggccaccagcaaggaatcggttcgtgatttcaggtggccggtcaggcttggggtgggtgccagcacgctttttggcagtgttccggcccgcacgatgacaacggcgctcacctgtttttcagattttctgtttgctgcttttgcacaggtgagcttgatgtccgctactcccacttctccttccccggctgccgaggccgtcgagccgatgcgcctttcgggccttgagccggttttcatcggcgagggttcgctgttcgtgaacgtgggcgagcgtaccaacgtgacgggctccaaggcgttcgcgcgcatgatcctcaacgagcagtatgaagaggcgctggccgtcgcgcgccagcaggtagagaacggcgcccaggtcatcgatgtgaacatggacgaggccatgctcgacagcaaggccgcgatggtgcgttttctgaacctgattgcctccgagcccgacatcgccaaggttccggtgatggtcgattcatcgaagtgggaggtgatcgaggcgggcctgcgctgcatccagggcaagggcatcgtcaattcgatttccatgaaggaaggcgtcgagcagttcaagcaacaggccaagctcgtcaagcgttacggcgcggcggcggtggtgatggcattcgatgaaaagggccaggcagataccttcgcgcgcaagacggaaatctgcgagcgcgcctaccgtgtgctggtggatgaggtgggcttcgcgcccgaagacatcatctttgatccgaacattttcgccgtggcaaccggcatcgaggaacacaacaactacgccgtcgatttcatcgaggccacgcagtggatcaagcagcatttgccgggcgccaaggtgagcggtggtgtctcgaacgtgagcttctcgttccgtggcaacgacccggtgcgcgaggcgatccacaccgtgtttctctaccacgcgatcaaggccggcatggacatgggcatcgtcaacgccggcatggtgggcgtgtatgacgacctcgagcccgagctgcgcgagcgcgtggaggacgtggtcctgaatcgccgttccgatgcggccgagcgcctgctagaaatcgccgaaaccgccaagggcgcagccaaggacgacagcaagaagctcgagtggcgcggcacgcccgatcatcccaaaaccgtgggcgagcgcctgtcgcatgcgctggtgcacggcatcacggacttcatcgtcgatgacacggaagaggcctatcagcagatcgtcgtgaagggcggtggccgtccgctgcacgtgatcgaaggcccgttgatggacggcatgaacatcgtcggcgacctgttcggcgcgggcaagatgttcctgccgcaggtggtgaagtccgcgcgcgtgatgaagcaggccgtcgcgcatctcgtgccctacatcgaagaagaaaagcgccagcaggaagccgcggggctcgacgtgtcgagcaagggcaagatcgtgatcgccacggtgaagggcgacgtgcacgacatcggcaagaacatcgtgaccgtggtgcttcagtgcaataacttcgaagtcatcaacatgggcgtgatggtgccctgccacgaaattctcgcgcgcgccaaggccgaacgtgcggacatcatcggcctgtcgggcctgatcacgccgagcctcgaagagatgcagtacgtggcgggcgagatggacaaggacgactatttccgcatcaagaagattccgctgctgatcggcggcgcaacctgctcacgcgtgcacaccgcggtgaagatcgcgcccaagtacgaaggccccgtggtctatgttcccgacgcctcgcgcagcgtgagcgtggcccagagcctgcttggcgagaacaaggagaaatacgtcaccgagatgctggccgactacgacaaggtacgcacgcagcacgccaacaagaagaaggtgccgttgtggacgctggacaaggcccgtgccaatgccacgcccgtcgatttcgcgcggtttcagccggtgcatccgcgcgccatgggccgccgcgtgttcaagaatttcgatctcgcggaaatcgccggatacatcgactggggcccgtacttccagacctgggatcttgcgggggctatcccgccatcctcgacgacgagatcgtcggcaccgaagcgcgcaaggtgttggccgatgcaaaggccatgctcaagaaaattgtcgaaggccgctggttgcaggccaacggcgtgatgggcctgttccccgcgaatcgtgtcggtgacgacatcgagttctacaccgacgactcgcgcagccaggtgctgatgacctggtacggcatgcgccagcagaccgagaagcaggagatcgaaggcgtgatgcgcccaagccgctgcctgtcggatttcgtggccacgaaggaatcgggcatcaaggattacgccggcctgttcgccgtgaccgccggcatcggtgccgacaggaaggacaaggaattccaggacgcgctcgacgactactccggcatcatgttcaaggcgctggccgaccgcctcgccgaagcctttgcagaatgcctgcaccagcgtgtccgcaaggacctgtggggctacgcggccgacgagaacctgagcaacgccgagctcatcaaggagcaatacaaaggcatccgccccgcaccgggctaccccgcgtgcccggaccacaccgcaaagatcgatctgttcaaggtgctggacgcgggcgacatcggcatgcagctcaccgaaagcatggcgatgttccccgcgtccagcgtgagcggcttctacctgggccaccccgattccacctatttcaacgtggggcagatcggcgaggatcagttggaagacatggcgaagcggcgtggcatggatgtggaagtgctgcgcagggtgctggcgccgaatttggggtgatgaaatggcgggtcagccatggcggtcgttcttttgaggtgcgggcgttgttgaatcgaccgagcatttttcttgccgcgcgggcgttgctgcaacggtgcgttggtgcccgtagggctccaaactgtcatagtggagttcaagccctatatgtttgcgctgaacacttacctcgtccgcaaggaagtattgagaaaggtgatcagtaagagattgagactcaatgtccggcgcaagaagcgagaaaccagatgcctgcgaacgtgcgtcaatctcaatgaccacatggtggcagaaccaagagatcatttccaaaaagacgaaagcctcgcattgcgaggctttccatttggtgcacctttatgcttgttagcgtccagagcacatatcccagtgaattggtgagctgaattgtacctgcttttttcctcgctcatcaagcatcaccgaaattgaatccggttgaataggcaggaccttttacgcaacctgatcgccctgcgttatgtgaaacagaccctggatagggaaaaccagaatcttcattgcctttagaccaaagtcaagaatccgcctgaaattgtgactagcatcaaaaatatttctttttctcatgatttgagttacaaattgaactaaacgggaggaaatatgagctatcgcttggcgctggatttaggatcgacttcgttgggatgggctgccatccgtttgaatcagcaggccgaacccacggcactaatacgtgccggcgtgcgcattttcagcgacggtcgcaaccctaaagatggcagttccctcgcggtgacgcggcgggccgcacgtgccatgcgtcgtcgacgtgaccgaatgctcaagcgcaaggagcgcatggtgcgcaaattggtggagtatggtttttttccagccgacattgccgagcggaaaaagctggaagtactcaacccttatgaattgcgtgccaaaggtctgaatgaagcactggcccctgccgagttcggacgtgtgctgtttcatttgaaccagcggcgtggctttttgagcaatcgcaagaccgacaagaaggacaacgacagcggtgcgctcaagcaggcaatcaatacgatgcgtacgcagttgctcgagacgggttgcaggacggttggcgagtggtactggaaagtgcgaatgcaggagaactccggaggcgtcaagggccacggagtgcgcgcgcgataccgcgaaacaccgatggtgggcgaggaagggaagaagcgcatcgacaagcgttatgacctgtatgtcgagcgcgcgatggtggcccaggagttcgacacgctctgggacgcgcaggcggcgttgaatccctcgcagttcaacgaaaccgcacgggccgatctccgcgataccctgctgttccaacgcaacctgcggccggtgaagccggggcgctgcacactgattcccgaggaagaacgtgcactgcttgcactgcccagcacgcagcggttccgcatctaccaggaagtgaacaatctgcgcgtgttgcatcccgatctgcatgaagaatcactgaccttggcccaacgcgatcagattgcggcgatgcttgaatccaaagccaaagtcacgttcgagcaaatgcgcaaggcgctcaatttgtctggtgctactcaattcaacctcgaagacccgaagcgccaggaactcaaaggcaatgcaacgactgcgattctgggcaagaaggaccttttcggtgcgcagtgggcccagttcgattcgcagttgcaggacgagatcgttttcaacttgatgacggaagaaagcgaagaacgcctgattgcatggctgcaagcgaacacaggcgtagacgaaatgcgcgctgcggcgatcgccaataccagcctgcccgaaggctacggcagtctgagccgcaaggccttgagcgctattcttcccgtattgcaatcagcagtgctcacctacgacaaagcggtgcgagccgcaggtttttcacatcacagcgatctgggcttcgattttgagtacgcctccgaagatgtggagcaaattggcgagcgcattattgcgtcttctggcgaaatcaaaccggtctacgcgttcaagcaactgccgtactacggtcgcgccttgcagcgccacgtcgcgtttggcagtggcgagcccgatcacacggaagaaaagcgctttggcaagatcgccaatccgacggtgcatatcggattgaaccaggttcgcgtcgtcgtcaacgcattgattcgccgatacggcaggccgagtgaaatcgtcgtcgaattggcgcgcgatctgaagcaaagccgtgagcaaaagatggagacgcagcgcaaacaggccgataaccagaagcgcaatgcgcgcatccgcaccatgattgccgagacgcgcaatatcagcgaggagcgcgtacgcgtcgccgacattcagaaatggattctgtgggaggaattgagcttcgacgcagccgaccggtgctgcccctatagcggcgtacagatcagtgcggctctgctgctcagtgagcgcgtggagatcgagcacattctgccgttctccaagaccctggatgacagcctgaacaaccgtaccgttgtgatgcgtgaggccaatcggatcaagcgcaatcgcaccccttggcaagcgcgtgaggactttgaggcgcaaggctggagctacgacggcatattgctgcgggccgaacgcatgtccaagtacaaacgctaccggttcgctgccgatggctacgaacgctggctgggtgaggacaaggactttcttgcgcgcgcgctgaacgacactcgctacctttcgcgtattgcggcagagtatctgcgattgatcgcgccgggaagtgcgacgcgtgtgattccaggccagatgacggccatgctgcgggccaagttcggtttgaacgacgtactgggtctgaacggtgaaaagaaccgcaacgatcatcgccatcatgcggtggacgcatgtgtgatcggcgtcaccgaccagggcctgcttcaacgttttgcccgcgccagttctgatgcgcgggagggcggcttgacgcggctggtcgacgacatgccaatgccctggccaacctatcgcgagcatgtggaacgtgccgtgaatgccatctgggtcagccataagcccgatcacggccatgaaggcgcgatgatggaagagacgagctacggcattggtcgcgatggatcgatcaagcaacgtaaaaaggccgacgggacagcgggtcgcgaagtcagcacgcttgtccgaatttcagagccgtcacaaccgcaacggcacggcgttgatgcgcagggcgctccacttccgtacaagggctatgtgggagggagcaactattgcgtggaaatcacggtgggcgagagtggcaaatgggagggcaaagtcatttccacctttgaagcctacgccatcgtcgctgaatggatgcgcaaaggaagtaacgcggctgaggcgcagcggaaactacgacagtccgatgtaggcctgaatggcagaccgctggccctgcgattgatgattggcgactgcgtgcgcctggagcacgagggccaagaacgcacattgcgtgtcgctacgatatccgctgccggacaggtctacatgtcaccactcaatgaagccaacgttgacgctcgcaaccgttcgcgagaacttccgtacatatcaaagatggtaggctcatttcagaaagccagagcccggcgtgtcacgctgtcgcccatcggcgaattgcgagactcaggtgggaaagagtgagcaaccatggtgggccgcatagtcgaaattgcagacgaccggcgccatctgttcgtcaatcgcggcttcatggtcgtgcgcgactcggaaggcgagcgcaaggaactcgggcagattccgctcgacgatattgccgctgtcatcgccaacgcgcacggcatcacttacaccaacaatatgttggtcgcattggccgagcgcggcgcaccctttgtgctgtgcggtgccaaccacaatgtggtcggcatgcttttcacgctcgacggacaccatgtgcagtccaagcggatcgaggcacagatcgccgcgagccagccgatgatcaagcggctttggtcatcgatcgtcaaagcgaagatagagcaacaagccgccgccttggaggccgcaggcgctctgacggtgcctctgtcggccctggttggcaaggttcgcagcggcgatccggacaacattgaggggcaggccgcacgccgttactggggactgttgttcggcccggacttccgccgtgatcaggaaggcggcggactcaatgcattgctcaactacggctacacagttttgcgctcggccacggcgcgtgcggtggttgcagcgggtctacatccgagcatcggcctgcatcacagcaacgacgcaaacgccatgcgactcgttgacgacctgatggagccatttcgtccggtggtagacctcaaggtctggcaattgaatagaacgggtgaatctcacgtcacgcccgaaaccaaaagggcattggttcgagtcctgtacgacgacctgcctaccaacataggcgtcacacccgtcatggtctgcatgcagcgcctggcaacatctctcgcgcaggtgttcttgggagaacgcaacaagctggatctgccactgccgggactgccgctgtcgctggcaggcagcttcgagccggactgagcagccaaggctctcaacccctatgcggagtcattcatcatgctttcagggtaccgactcatgtggatgctggtgatgtttgatttgcccgtgatcacaaaagccgaacgcaaggctgcaaccgggtttcgcaatgcattgctggacatcgggtttcagatgagtcagttcagcgtgtatcttcgcttttgcaccagccaggcccaggtggacaccttgtgcaaaacggtggagcgctcattgccgaacggagggaaagtgcatatcctccaattcaccgacaaacagtacgaacgcaccatcaccttccatggaaaaagccagcaagcggctcaaaaaccaccggatcagttcgatcttttctaactttttccatgatttccccaggcgcaaaagcgaaaaaccccttgaaaaatcaaggggttatcgcggacacagtttagttcactgggatatgtgcactggccggaacgctgacgtgtggccattgatcaagggcgatagtttagttcactgggatatgtgcactggccggaacagggtcgtcagactggactgcctgagcggcagtttagttcactgggatatgtgcactggccggaactcctgacttgcaggcacggtgtcgtagcccagtttagttcactgggatatgtgcactggccggaacctccgaatacgctccatctacttcgcttccagtttagttcactgggatatgtgcactggccggaacgcgcgtagttctgtctcatacgcctcgcgggagtttagttcactgggatatgtgcactggccggaacgtcagtattggcactaaccacggatacgccagtttagttcactgggatatgtgcactggccggaacctgattagacgccgcagcttggtcgaaaccagtttagttcactgggatatgtgcactggccggaacaaaccgcgcgctttccagactgcgtcctcaagtttagttcactgggatatgtgcactggccggaactgccacgaagtctgcccatgacggcgcagaagtttagttcactgggatatgtgcactggccggaacacccggcttcatgccaagcccgctagacccagtttagttcactgggatatgtgcactggccggaactcccccgaggctgcggagaatggacgcgcaagtttagttcactgggatatgtgcactggccggaactgctgcgcctgttggcgctcgcgccatttgagtttagttcactgggatatgtgcactggccggaaccagcgcagccgctggttgaagccgccgacgagtttagttcactgggatatgtgcactggccggaacggcacgagcgttgagtacacgcccgtgagcagtttagttcactgggatatgtgcactggccggaacaccggtggatctcgcagttcgcgccggtggagtttagttcactgggatatgtgcactggccggaacactttgcccgctgccctacgcgaatacgcgagtttagttcactgggatatgtgcactggccggaacagggcgtatttgccgaatctggcgtgctttagtttagttcactgggatatgtgcactggccggaacttctggcgtggttcggcgcgccggtgttgttagtttagttcactgggatatgtgcactggccggaacttgtcgctggtgcggcaaaaatctgttggtagtttagttcactgggatatgtgcactggccggaactcaacgcgcaatcgctgcgcctgcggctcaagtttagttcactgggatatgtgcactggccggaaccaggacttcgacgtcgtcatcgtcaaaggtagtttagttcactgggatatgtgcactggccggaacgacgccgtgcgacttggcaatcgcggcaaaagtttagttcactgggatatgtgcactggccggaacgcttaaaggaactatgcacctgctcgcaacagtttagttcactgggatatgtgcactggccggaacaccgcagtgcaaacgccgacagcgcctcgcagtttagttcactgggatatgtgcactggccggaactccacgcacggttgcaccaatatcttcgccagtttagttcactgggatatgtgcactggccggaacaaccgctcacatcggacacgcgaacaatgaagtttagttcactgggatatgtgcactggccggaacagtagcgccaagtgtccacacgatagagccagtttagttcactgggatatgtgcactggccggaacttcaatgggccggtgaccttgtcaacggcaagtttagttcactgggatatgtgcactggccggaactctgggtgctttcttaaatttgctgcgatcagtttagttcactgggatatgtgcactggccggaacccagccgtcgcaacagtgaacggcgggggtagtttagttcactgggatatgtgcactggccggaacacgaacgcagcagcttcgctccatgtcgtgagtttagttcactgggatatgtgcactggccggaactcggagggctgctaccttgatgcggcgcagagtttagttcactgggatatgtgcactggccggaacagcccgcccaaagcgaagcggccaaagaaaagtttagttcactgggatatgtgcactggccggaaccgccggagcaacacatgctacgtgcgtcccagtttagttcactgggatatgtgcactggccggaacaatcgcggccatggccgcgagagacggcctagtttagttcactgggatatgtgcactggccggaacttgtcagcagcgctggcgatccgcacgaaaagtttagttcactgggatatgtgcactggccggaaccttgtctgccatcgggaacagattgcccgcagtttagttcactgggatatgtgcactggccggaacggctacaaccacgatcagcggcttgccgagagtttagttcactgggatatgtgcactggccggaacggctacaaccacgatcagcggcttgccgagagtttagttcactgggatatgtgcactggccggaaccgaagctgacgacaggcgcgcgtgcttcacagtttagttcactgggatatgtgcactggccggaactatcaccgaatctgtgatgatcaatgatatagtctagttcactgggatatgtgcactggccggaaccggaggctaagcaatggcaaatggcgaaaaagtttagttcactgggatatgtgcactggccggaaccagacaggcccagccaccatcgagcagctcagtttagttcactgggatatgtgcactggccggaaccatcagttcgtcgcggtcgatttcctttgaagtttagttcactgggatatgtgcactggccggaactcgggagcgctgcccgactatgtggtgccgagtttagttcactgggatatgtgcactggccggaaccgcggccagcatcgagtctagcgtggacgtagtttagttcactgggatatgtgcactggccggaactccgaggcttctcgcagcgtgttcatttcgagtttagttcactgggatatgtgcactggccggaaccccgtgagcggattccctgctgttgatcctagtttagttcactgggatatgtgcactggccggaacaacgtgcaagcgaaggagacgaagaagcgcagtttagttcacggggatatgtgcactggccggaaccatagggcagcacaaggcagcagagcaaaaagtttagttcactgggatatgtgcactggccggaacatgggcggctacatccttagcttggtcaacagtttagttcactgggatatgtgcactggccggaaccttgtttgttgatggtattcttcgcgctaagtttagttcactgggatatgtgcactggccggaacgagggtctgatcatggccatcgaggatgtaagtttagttcactgggatatgtgcactggccggaaccggcgcaacgtgattttctaggggaacgtgagtttagttcactgggatatgtgcactggccggaacccggccaaaactgttctcccgcgctctacgagtttagttcactgggatatgtgcactggccggaaccagcggagcgcgagattcgtgcgctgtcggagtttagttcactgggatatgtgcactggccggaaccagcggagcgcgagattcgtgcgctgtcggagtttagttcactgggatatgtgcactggccggaacagacaagataaaggccaaagcgcagaaagtagtttagttcactgggatatgtgcactggccggaacccgtcggtgatcattgcaaccaccaatcgaagtttagttcactgggatatgtgcactggccggaacttggcgggttttgaagttattgctcgtattagtttagttcactgggatacgtgcactggccggaacgcggcctcgaccccggaatcccgatgaagtagtttagttcactgggatatatgcactgccccaagcctcatcgccaagccatagcgcgcaacagcgctccttgaccaagctcccgcccagaacacagctggctcccaacgccgctgcaacagcaaaccaccacgacgcacatcacatgcgcgtcgcgtccttttatcgccctacgccgtggccggataaaaaacctgccgcgtcttcacctgccccacagcttttccaatcgctgctatgtgatccggcgtggtaccgcagcagccgccgacgacgttgaccaagccttccgccgcgaattcgtggacgaggcgggaggtgacgtcgggggtttcgtcaaagccggtgtcgctcatcgggttgggcaggccggcgttggggtagcagctgatgaaggtgtcgggggcggccttgttcagttcctggatgtaggggcgcatcagtgttgcgccgagtgcgcagttcaaaccgatggacagcgggttggcgtggcgcacgctgtgccagaacgccgtcacggtctggccggagaggatgcggccggaggcgtcggtgacggtgccgctgatcatgatcggcaggatttcgccggtggcgtcgaaggcttcctcgacggcgaacagggcggccttggcgttcagggtgtcgaaaatggtttcaacgaggatgacgtctgcgccgccctcgatgagcgctatggtctgttcgaaataggccttgcgcagttgctcgaacgtgacgttgcgggcgccggggtcgttgacgtcggggctgatgctggcggtcttgggtgtggggcccagtgcgccggccacgtagcgtggcttgtcgggtgtcgaatatttgtcgcaggctgcgcgggccagttgcgcggaggcgaggttcatctcgcgtgccagctcggccatgccgtagtcttcctgggcaatggtggtggcgccgaaggtattggtctcgatcaggtcggcacctgcggccaggtagcgctcgtggatgtcgcggatcacgtcggggcgggtgatcgagagcaactcgttgttgcctttgacatcgcgtgcaaagtccttgaagcggtctcccgcggtgccggggccgttgtagccttcgccgcgatactgtgcctcaccgagcttgaagcgctggatcatcgtgcccatggcaccatcgagaatcgcgatgcggttctccagaatctcgggaagctgctgggcgcgggtgtagtgaggcagggtcatgccgtgattgtatggaagcgggaggtttcgcaggcgcgggaacgcggagtccctgtttttgcgaggaatactcgcgttccttcgtgcgctgcacgaattgccagggcttgatccagccgagcgcccgatccggcgcgagcagtagcacaatagagggtttggggtgatgggcggatgtgcgttcagccgtgccaccggccgccccaggatcacggtctgcaatcctttcatcgacaggagcggcatgctatcgaaaagagagagttctggtttgtctcctgcgcattttgttctcaatgatgtcttcggctacgagcagttccggggctcgcaggaggcgatcatcgagcatgtgatcgctgggggtgatgcgctcgtgctcatgcctaccggtggcggcaagtcgctgtgctaccaggtgcccgcgatcgtgcggcgcgatgcgggcaagggcgtggcgatcgtggtctcgccactgatcgcgctgatgcacgaccaggtcggcgcgctgcacgaagccggggtcgacgcggcgtttctcaattccacgctcgactggccctccacactggatgtcgaaaaccgcgtggcgcgtggcgagatcacgctgctttatgccgcgcccgagcgggtcaatacggatcgttttctttccttgcttgatggcctgtaccagcgcgggcaactgggattgttcgccatcgacgaggcgcactgcgtgagccaatggggccatgatttccgccccgaataccgcatgctgacggtgttgcacgagcgatatccgggcgtgccgcgcattgcgctgacggcgacggccgatgcgctcacgcgggtggatatcgtcgatgggctccagttgcaggaggcgcgccagttcgtcagcagctttgatcgcccgaacatccgctacaccatcgtcgagaagaaggagccgctcacgcagttgctcaaattcatacagaacgagcatccgggcgatgcgggcgtggtgtattgccagtcacgcaaacgcgtggaggagttggcgcaggcgctcagccatgcgggtatcaccgcgctgccatatcacgcgggactgtcgagcgatgtgcgccagcagaatcaggaccgctttttgcgcgaggatggcatcgtgatgaccgccaccatcgccttcggcatgggcatcgacaagcccgatgtgcgctttgtggcccacgtggacatgcccaagaacatcgaaggctactaccaggaaacgggccgcgcgggccgcgacgggttgcctgcggacgcgtggatggtctatggccttaacgacgtggtgaaccagcgccgcatgatcgatgaaagcccggcgaccgaggaattcaaacgcatcatgcgtggcaaactcgatgcgctgctcggccttgccgaggccaccgattgccgccgcgtgcgactgcttgcgtatttcggcgagcattccgagccctgcggcaattgcgacaactgcctccatccgcccgaggtatgggacggcacggatgctgcgcgcaagctgctctcgacgatctaccgcgtgcatgaggccagcggcatcagctttggcaccggccacatcatggacatcgtgcgcggcaaggacaccgacaaggtacgccagttcggtcacgaaaagctctccaccttcggccttggcaccgagtactccgaaccgcaactgcggggcgtgctgcgccagttgctggctacgggcgcggtgggcctgcaaaaggtgatgcttgagagcgggcacagctttgacacgctgagcctcacgagcggctcgcgggccgtgctgcgtggtgagcaaccggtgcaactgcgcgaagccatggcgggcgcgggcaagcgcacccggaaaaagagcggcgtcaagctgtcggtggcggcggaaaacctggatcaggacgggcaggttcgcttcatcaacctgaaagcctggcgcgccgaagtggcacgcgaacacaatcttccggcctatgtgatctttcacgacgccacgctggcggcgattgccgaacgcaatccggcatcgctcgaagaccttcatggcatctccggtttggggaccaagaaactcgaggcctacggagccgatgtgctccgggtgtgcgtgtcaccggcttgagttgcgtgcctatcggcttgcgtgctgaatatcgcccggcctattcgagcaacacgaccccccgttcggtttattagcagcccttgatataatcctaggtttaccaaccaggttctgtggttgagaattggagaaatcaatgttgaagaagcttctactgattggcggattgttgggtgccggtgtggcgcaggccttcgcacctcaggccggtgcctgggtgatcacgagtgaaaacaatggcggccccggtcgcggcatggcgctggatgtccaaggctcgacactcgtgatgcagatgtatgcgtacgacatttccggcgcaccggcgttctacctcgcttcgggcgctatcaaggacaacaagttcaccggcaagctgcatcagtaccgcggtggtcgctacttcggcggcggtgccgagaatgcgcaggaagtgggcgatgcgggtgaggtgaagttgcgtttcgaatcgggcaccaagggctatgtgactttcccgaacgaaggcgagaaggaaatctcgcgctaccaattcacctacgacaccaagcctgaaagcctcaagggccagtggctcatgactgcggtgggcgatctcggcatcagcaccgagttctacaagctcgatacaccggtcgacggttccggtaccggcacgggcatgatgtccacgtccgacaagcgtttcggctgcgagaacatcatcttcggtgagaacgccggaaacgtgcagtgcatcaagcgcgatgccaactcccagatcatccgcgtctatcgcttcacctacagcgtgaacgaaggcgaaggtgttgcgggcacgttgtccaagccaggtacggacctgctgtatgtgcgtcgcctcaccacggccgattccgtcggcacgggcatcgcgcccaagggcctggtggctcccagcgtcgaaagcctgaacaaggcacaactggcgaacgaaacgaagtaattcaaacttcaagcgccgctgaaaatccgcctgactgcctggcagtgaggcggattttttcctttgtccgccagaaatgcgatgctgtatataaaatcagtgtccgatgccaacgatctcgccctgcccgccgctttcccgtcaccaccgcacgcgcctgatgcagatctggcgctctgcgggctggccgtgtcaggacgcgctcgaaatcgagttgctggcggcggggctggcctgcctgcaggtgactcccgagggccat

SEQ ID NO: 1816 - DNA, 23144 bp, synthetic construct
  source 1..23144: mol_type = other DNA
  misc_feature 1..23144: note = Synthetic
ggcggtagcaggcttaccgcaacgcggcctccatccagtggaggtagaggcagcaaattcagcaccattaatactacattgatcttgatacctgcttcgcccatcaaaatcaagggcgtcgagagctcactctcaggcaggtcgaggccaatcttgatcatgaacccccatagcaatgccatgaaaagatttgcacccggcccagccagcgccacccagagcatgtcctgcttggggcggcgcaatgccgcgaagttgaccggtaccggcttggcccagccgaacaggattccgcccagccacagcgttaccaagggaagcagaatcgtaccgataggatcgatatgccgaagcggattaagactgacgcgtccctgtgaataggcggtgagatcgccaaagtgcttggccacatacccatgcgcggcttcatgcagcgtaatggcaaaaattaccggcagcgcataaatggcaatactctggatgatgctatccatgcatctttccgaagggttcaaggctgcccttgccttgccggatgacttccggcgtgtccccagtcaagtccaccacggtactcatctccaggccgcaagcgccgccgtccagcaccagttcgacatgatgctgcaggcgcgcgcggatttcctccgcatcattcaggggaagctcatcccccggcaatatcaaggtcgaactcaacaggggctcattcaactctgccagcaatgcctgaaccacaggatgatcgggaatccgcacgccgatggtgttgcgtttcgcatgcagcaagcggcgcggcacctcgcgggtcgcctggaagataaaagtataactgccgggtgtgctcgccttgagtagcctgtgttcgcggttatcgaatttcgcataacgggaaatttcagccagatcccggcacatcagggtaaagtgatggttttcacccacctgacgaatggcgcggatgcgggtcatgacgttcttgtcgcctagttggccccccagtgcataacacgaatcggtagggtaagcgatgacacccccggcgcgtatgatagctgccgcctgtcgtatcaggcgcagttgcggattatccgggtgaatggaaaagaattgagccacgtgagaaacagtttttaattataattttaggggacctgcaaaaaatcgaatgcttcaggcaggttcatttgccaactggtacgaccgctaaggcgcaaacagaagtcgctgagatgcagcagcgattctggagatgtttgattaggtcacatagcttcccattacgccgctcctttccagtcgtgccataccggcttacagtaatcaggcaatggcggcatccggcccagatcgaaatagctctcgcccggtccgtgaaaatccgagccgcgcgaagccaataaacccagccgctggctatggcgcgcaaacagcatggactgttccggcgtgtggctggcggtgataacctcgatagcttctccgccaagcgtacgaaattcaagcagtagttcgtccaatgcacccttgcccagtttgtagcggcccggatgggcaatcacagctctgccaccgctgttgcgtatccaatcgatcgcgtcgctcaagggcgcccactggtgcggcgcatacccgggtttgcccttgaccagatattttttgaacaccgatctgacgtctttggcgtaaccctgctggaccagaaagcgtgcgaagtgcagccgacctatcaggtgcccattgccggcatttctgcaagcgccttcaaaactgccgtgaatgccgaatttgtcgagttgcgctgcgattttgccggctcgcaccgtccggccctcgcgtatggaggtcaggccctgcgcgagctgcgggtgttcaggatctattccaagcccgacaatatgcaaggtctggccacgccaattaacggagatttccactccattgataaagacgatgtttttctcgaccgcggcccaacgggcttcatccagtccagccacatcgtcgtgatcggtcaacgccagcaccgccaccccctgcgtggccgcgtgttccaccagttgcgtgggcgacagtaagccgtcggaagccgtggaatgacaatgcaaatcgatgttaagcatgaagccggttcgcgcgaagcaagagacgcatcatagcaaataagaaggggtatgaaaaatgaaccgcagaaaagaatcaaaaagaatgcggcgcttgtattccagtcggaggtgtacgcgcaagactgacagctgcaaaaccagcgatcaagcagaggcaacatctctcctgtgaaagcggagatcttccagaactactggcgtaccgattccatacacctaaaacggttctatcgcccaaacgcccaaaattataagcgcttcttcggggtgttcccgtagcggcaggttatagctcaaacttatcggccagctcattttaatacgcattttcaggtaaagtacgagaatacagtcgtcgaactcgaatggaacaaatggattttctaccgatttttttcaacatcagaaaccgtaactgcgtggtaatcggcggtggggaagtggctgcccgcaagatcgcgttgctgttgcgcgccggtgcgcatatcacgctggtttctccacagctcggcgccgagatgcagatacaaatggatggagcattgcgcgggcaacttgagcagggcaggatcacctatcgcgccgaagccttccatgcgggccacctcggcgatgccgctctggtcattgccgctaccgacgaccccgtggtcaacaggaaggtatcagaggccgccgaacgattgcatattcccgtcaatgtcgtcgattctcctgctttatgctctttcatcatgccttcgatcatagaccgggcgcctattatagtcgcggtttcgagcgggggtgcatccccggtactggcgcgattgctgcgagcccgtctggaaaccatgataccggcggcatatggacgcctcgcggcttacgcagcggagttccgggagcaagtgaaactacgcttcacgcgcccggagaaaaggcgaagattctgggaagatgcgctgcaggggtcgtttgccgagatgatttttgccgggcgggatcaggcggccaaggcttatctggagcgtctgctggaaaaccaggctgacagctcaggaaaggaagaggccggggaagagatgcagggagaagtctatctcgtcggcgccgggccgggagatcccgaattgctgacttttcgcgcgatgcgcctgatgcagcaagcggacgtggtggtgtatgaccgtctcgtttcgcctgaaatactcgatatggtgcgccgcgatgcgcttcgtatttatgcgggcaaggaacgcagcaagcacgtcatgccgcaggaatccattaatgagttactggtacggctggcgaaagaaggcaaacgcgtgctccggctgaaaggcggcgatccgttcatctttggccgtggcggggaagaaatcgaaaccctgtccagccagggcgttccctttcaggtcgtaccgggcatcacggcagcaaccggggcggcagcttatgctggtatcccgctcacgcatcgcgattatgctcagtcgtgcgtttttgtgaccggtcatctcaaggacggcagtgtggatctggattggccaatgctggctcggccacatcaaactattgtggtctacatggggttgcttggattgcccgtattgtgccgccaactgatcgcgcatggcctgcctgctacaaccccagccgcaatcgtgcaacagggaaccactcacaaacagcgcgtactgaccggctcgcttgagacacttcccgatctcgccacttccgccaatctcatcccgccgacactcatcatcgtgggtgaagtcgtgaaactgcaccagaaacttgcctggtttgagccagagggagacctgcacgttaacgaggccgcggtacataaaaagaagtaaataaaaagaagcagagcgccagtaagcgaagcgcattgggccgtatgaaaggaggcagtatgttaatcctcatattcaagcttgtcttcattgcatcccgcccagtctgcaggataaatacccttttcaaccaatcgatgaaaagtggaatatggccattcgttcaccatttttaccagaccatgcttgagcggattgatgtgaacgtaatccatatgcgcccggaaatcttcctcatcacgaatcaaatgttcccagtaacgccgttgccatatgccgcgttcacctcgcgctattcgaatcgtggaacgctgctcggtaagtggtaatgctttggaaaacgtcattttgatcaaccgccaccgcgttgcgaaatcggcgtcatcaggcggaagttcgatgatgcaatggaggtgctctggcagcaccacccagccatgaatgacgaaaggatgacgttgccgtatcaagcttacggctttccgcagcaaatcgatatgtcgagtcagcaggtcgttgccttgccgttgcagcaggttgacggtaaagaaataggttccgcccggatgccaggcgcggcgataatcaggcatgcggtaatattgaggatattttcatacggcgcaatgcgcttcgcttattggcgccctaccttatatgcataagggcgacaattattcgaccgtgttgcatggattgaggttattggtttgggctcttcatctattaccccatctcgcaagaagtaataagaagtagggcgacaataagcgaagcgcattgcgccgtatgatgcgattcccggtgctgtaacggattccgaacaccaaaagcgcccaaaactcgggcacttttgtgaatagactttacacaggcagatgccgcaggctatttgatagctatttatccggttgcggcgtgatgcgcagatacggacgaggcgccttgtaacctttcgggaatttctggttgatgacctcttcatcctttatcgtcaggggaataatcacgtcatcgccgtttttccagttgcccggcgtcgccaccgtatatttatcggtcaactgcagcgcgtcgataactcgcagaacctcgtcaaaattgcggcctgtgcttaacggataactgatgatgagccgaactttctttttcggatcgataatgaacagcgaccgaaccgtcacggtatccgactgattcgggtgaatcatgtcgtacagcgtcgcaacctttttgtccagatccgcgatgatcgggaaatcgacgctgcagttttgcgtttcctcgatatccttgatccacccagcatgtttctccgatgaatcgaccgataatccgattgccttgacgttgcgtttgtcgaaatccgacttgagctttgcagtcaaccccagttcggttgtgcacacaggcgtgtaatcggcgggatgcgaaaacagtaccgcccaggaatcgcctatccattcgtgaaacctgatctttccgatcgtggaatcttgctcgaaatcaggtgcagtatcgcctaagcgtaaggtcatggcatcctcctaagttaacaatggattaaaagttcgtgggaaattgataagctcaatatagcctgactgctgtaatgactcaacaattattatttgcgcaaaatggatgaggtggatagcaccacatcattttctccatcccatgaataccgcgggcagcgtttaccgaaagctcgctacggtagcgatagcgagccaacctcaccgcttgatcggaaagccccaagaataaggccgttcatatttctgcaatatgttgtagtacgtacgtaccgattccgccagtatgaccgcttcgccgcctcgcccatagccatgcttcagattgcgaaaatatttgctctggcttagtagcggtaatgtttgtttcaggtccacccacgaatccgggttaagaccaagacgctgggccagaatgcgcgcatcctcgatgtgaccggagccctggttgtatgctgccagcgcgatccaggtacggtccggttccttgatacgtgtgggtagtccatcttttagcagcatcaggtagcgcgcgcccgcaagtatgctctgccgggcatccagtcgatcggtcaccttcatgcggtcggcggtaatttccgtcaacatcatgatgccgcgcacattagcgggcgaaaccgcaagtcgatcccagtgcgattcctggtaggccaacgccgcaatcagccgccagtcaatgcctgtcaactcctcggcctcatgaaagtagtcgcgtaaatcgggtagtatcgtgcgtcttttattcagaatgccaatcacatccgtttggagaagccgctgagtgtgtccataataccggtcgagcaagcgcactaaagtgccgtcctgttcgatgcggttaaagaacttccgagtcctttccaataattcgcgttctgcatagggtgaaaaggcccatgccttgccggctggctcacctaaatcaaacgctacgcccaaattggggaagaaattctttgccaaattgatttgggtggagtctgctatcacgtaatcgacttttccctctgccagttttgccagcaggtcttcgggcgtaatatccacttcagcccatttcagttccggaacgtactgctttgccttattcagtggttcggtataggtggcgccaccggcaatttcgacggttctccccgcgaggtcgttcatatttttgggcttcgggtagtccgtattgtaggcaacctggggctggacgagctgatagaccggaccgaagcgagcgcgcaacgcatgcttgggggtaatggtcaagccagcggcaaagtgtccctgatgcttctccaggctcaacaaaccgtcatccagtttcggcactattttaaacctgactttcatacccaggtcgtgcgcgaactcggacgcaagatcgaactccaatccggcatgtccgccttcggcattctcataataggtatcaggactgtttaccgtaataaccactagctcatcggttttgtcgaatggcgataccgatttttcaaatgaatcacaggcagcaaaaatgaggccgcaaccgaaaacaacaaaaagcaaacgggggagaacgtgcatgggagagagacaagcagaattcataaacattctgccatgttgttctgaacgagcgtgagataaactgataaaatggtataccacaaggagaggtaccgaagtggccataacggcgctgactcgaaatcagatggtcagggtaacctggcacgtgggttcgaatcccaccctctccgccaatttagcatccgagttcctcccgtaagctcctgtgaaaaagggcacaccgacttcaagcggcaatatgatcctcggcattcgcccgtaatgtttcggataaaacagaagtggatggcgaaatgtatccggcgaccacagcgacagtcagcggatacgcccggctgatgagggaatacgacacttctggagggttcaatgattttcgacgaaaagaactggacggcaagagtagggaaggcaaaaacggacgcagatatttcgatgcggtaatggagcttccgaatcgcggcccgcgatgcctctcaacttccttgacgcacatcactgcttttaaagtgtgaaccacttccaccaggtctgcctggtttgccatcacctcatcaatgtccttatacgatgagggtatctcgtccaacaccattttatccttgcgacactcgacccctttggtctgctgaaccaggtcggccacggtaaatatccttcgcgcctgacttcgggacattttcggcccgcaccgtgtgaacaggagcagtaggattcaagtttgcccttcccccgcactatatagctccgctggcccatcgagccgggaataatacccagatcgtccacccgcgcacgtattgctcccttgcgggtcacccataaatttctcccaaaatgcgtttccttttccacgtaattgtggtgacagttaatggcttcccgggtaagggtaaaattaatgggaatgtggcggcgtaacgctgctattgtcgtctccatcatgatccgccggttctcgagcgcatagtcttgtgcccagtcaaccgcttttacataatcgtcgaagtcatcctcgccttccgccagccatgcaagatcgccatccggcaggtgaatggaaaggcgttccatccggcgccgggctttttcgatgaaatagcttccaatcatgttgccaataccccgggaccccgagtggagcatcacccacacgtcctgattctcatctgtgcacaactcgatgaagtgattgcctgagcccaaagttccaagttgtgattcggccttttttagcaaactgatttcatcggtctttcgactctgcgcgaaacgcccgaaccatctcttgtagccacggccttcatttagcgctaaggaaagcttgcccagtgcaaccggctttttgcggcttccgccagcacccaggggaacatcgcgttcaatctggcgacggacagcgagcagcgaatcgggcaggtccgacgctttgagggaaaggcggacggcattcatgccgcagccgatatcgacacctaccgcagctggaatgatggctttgtccgttgcgataacggtgcctaccgtcgtacctttgccaagatgacaatcgggcatgagggcgataccgtgtcgatcgacgaaaggcagtcgcgcaagattccgggcttgggcaagtgcgtcgtcttccacatcagtccaggccttgataggtctggatccttcctcgctataaatattcttcattgcaagagggcctcgatcacgtgaacgcgtttttacgacgggggtacgttgtggacaaaggcgactgtttttggttcgaggcctaatacttccccagagcgtgatctctgcgaaatatttactgatttaaccggacactactgatagaagagatactttcatgatagttttggaagataaaaaagtagggaaaccgaaaggttttctggcaggcgttatccccgaaaaacgaccgttttgaagacagaaatcaaacagacgggcaaacgcttgggcggcgcattggagtacacatactcggcgatgggtgtacttcagtacaattgtttgctgattcataaaaatgaaaaatagaagttaggcgaacaagtccgggctgtgctctgatcttttaaggctttgttttatgaactaattactctatagatccaccttcttagctcttttgtatacaatcttcagcaaactgctgagctttagattctggttacaaacaaacccagtaccgatttttcgccaatgtattgagagattaggccgtttcttgtgaaccccgaattgaattttactttgctaaagaagaaggttttgggtatacgggcgcaggattccaatgtttggctacgcgctgacgaaacgtgtgcaatggcagatgccccatcaattaagcaaacaccagtttccctgcgcgcatgtgcgaactcatgacaaaagtcagaagtttgacgcaagttgaaatcggttacagagaaatatgtcatttaatgatatatgctcaacgagttactacgcgtttaaactcaaatctccggacagtagtgaaagaagagaagcttaaacgtaaacgaggcagacccgcaacagataggaatcgcgtaaaacatctatagcggaatacaaaaggcgaagcagggaaagattgactgaaggcgaagcagggaaagattgactgaagaaggccctgtagaggttcatcactatctaaggccgttcaagaaatgcgctttaatcgttgtaatcggaaagagtgaggacagcatgagagctaaaaaacaaggggccgcatatagcgaccccttcatttggtgcatctttcagcttgttagcgtccagagcgcaaatcccaatctactgatgcggcgtgaattctagtgatggaataccatctagtcaagaaaattatgctgaatctcagcaagtcaaggagtaaatcatgtcacataggatgcggtatcggttagcgctcgatttaggatcaacctcgcttggttgggcgatgatacggttaaacgcaaacaaccgcccctgcgcggttatcaaggtgggtgcgcgtattttctcgaatggccgtaatcctaaagatgactcttctctcgctgtgacgcgacgcgacgcgcgtagtatgcgccgtcgccgcgatagactgcttaaacgcaaggcgcgcatgatgcgcacgttagtggaatatggttttttccccgccgaagaagcgcagcgcaaggcaatggaaactatgaatccttttgccttgcgtgccaaaggactagattcagcacttactccagcggaattcggtcgcgcgctatttcacatcaatcagcgtcgtggattcaagagcaaccgcaaaacggataaaaaagatagcgatagcggagcgctcaaaagcgccatccataagctgcgcacgatcctcgatactgaaaattctcgtacggtaggcgaatggcttcacgcacgcaacgttacagggcagcccgttcgcgcccgtttccgccaaaatagaatcctcaaagacgacggtaaaattcgcattgacaagagctatgatctttatattgaccgatccatgatcgagcatgagtttgacaggctatgggctaaacaagccgaattgaatccggtattgttcactgaaacagcacgtgctgaccttaaagacgttttgttgcatcagcggccgctcaagcccgtcaagccagggcggtgcacgtttctacctgaggaagaacgcgcgccgcttgccctgcccagcacgcagcgctttcgcatctatcaggaagtcaaccatttgcgcatcctgagagatggatttaaggaggagcagctcacattgcaacagcgtgacaatctcatcgcagaactggaaaaaaaaggcaggtgcagttttatacaaatgaggaaattgctcagcataggcggagcagtacagttcaactttgaagacccaaaacgccaagaacttaaaggtaatatcaccggcgccattctcagcaagaatgaatatttcggttcagcatggtttaactttgacgatacgaagcaggacgccatcgttcttcggctgatagcggaagaaaacgaaaccaagctaatgcggtggctgcaagaggaaacaggtgttgatgaaaagcgtgcagaagccatcgccaatgcagcactgcccgaaggatatggcagtctgtgcacgagggccctggcgcgcatcctgccggaacttcgcggtggcgtggtgacatacgataaagcagtacaagctgccggatttgatcatcatagccatatcagcccttccgccacaggcgaaatctggcctgaactgccttactatggacagcctttacagcgtcatgtgggcttcggcagcaacgaccccagagacagcgatgaaaagcggtatggccgcatagctaatcctacagtgcatatcgggctgaaccaggtgcgtctggtggtaaatgccctcatcaaacgctacggccatcccagcgaagtcattgtggaactggcgcgtgacctcaagcaaagcaaagatcagcgtgacgaggagaataagcgacaggcagaccatcaaaaacgtaacgcgaggctgcgtgccgaaattgcgaccattctggatatcagtgaagaaagagtaaaaagtgaagatcttcaaaagatgattctttgggaagaactcagttttgatcccgcagaccgccgctgcccctattcgggcacacaaatcagtaaaagcatgctaatgagcgacgaggtagaggttgagcatatcttgccattttcgcaaacgctggacgatagcctgaataataaaaccgttgctcttcgtagagcaaaccgcatcaaggacgatcgcacgccctggaatgcctttggcgcgcaaagccaggcgggcttcgattacgaaggcatcctcgcaagggctgaacaaatgcccaaagccaagcgctatcgctttggtgaagatgggtaccagcggtggctaaaagacgacgctggcttcttgccgcgtgcccttaacgacacacgctacatgagcaaggtggcgcgggaatacttgagtctgatttgcccaaatacacgcgttattccgggacgcatgaccgctatgctgcgtggcaaattcggtctaaatgatgtgctcggcttgaatggcgaaaagaaccgaaatgatcaccgtcatcacgcggtagatgcctgcgtgattggcgtaactgatcaatatttattgcagcagttcgccaatgccagcgccagcgcgcgcaagcaacacctcaatcgtcttgttgaaaaaatgccgctgccatgggaaaactatcgggagcatgtcaaacgcgccatcgagcatgttttagtcagccacaaacccgaccacagtttcgagggatccatgttcaaggaaacaagctacggtatccggcgggacggatcaattgttcagaaaaaaaacggcgaaggcgaaaaaggaagaatggttgaatatatcgtcccaattacggagccgggacagactaaccggcacggactagatatcaacggtaaaagccgtgcctacaaaggctatgcgccggatggcaattactgcatggaaattctcaagcaggcaactgggggatgggtaatggaggtcatcccgacatataaagcttatttattggcacgtgatcttggttggggaaaggaagattccttagcggtcctaaaacgcatgcgtactgtaaaactggcaacagccgatggcacgctcattacaaaactgatgcctggcgacacgattcttgctcatttcaaaggcaaaaacagattgctccaagtggttaaaatgagtgtacagggcggtacgacatttactgaactgaatgaagcaaatatcagcggtagatatgaagccaggcgaaaagctcgtttgaagctgaagaatgagaagactgaagtcatactgacggctgaggacgtgctcgcgttgggagatcagtttgtgctttcacaaataggtattgaagacttgcggcgaggaaaagcccggcgagtaaccatttctcccatcggtgagctccgtaatcctggtttcaaggattaataggtgatcggtcgaattgtcgaggtggccgatgaccggagacacttattcctctctcgtggttttcttgtaatacgggatactgaaggtgatcgcaaggagctggggcaagtgccgctggatgacatcgccgccgttattgccaatgcccatggtctgagttatacaaacaacctcttagtggcattggctgagcgcggcgtgccttttgtgctgtgcgcagcgaatcacaatgtagtaggaatgctgtggactattgatggcaactaccagcaagccaagcgattcgatgcgcaggtcgctgctagccagccactgataaaacgtctatgggcagagatcgtcaaatccaagctccagcagcaggccgctgcgctcgaagctactggtgctccggatattccactttcttccttgattaggagggtgcgttccggcgacccggacaatcttgaagcccaaggagcacgacgttactggggattgctattcggtaacgacttccgccgcgatcagcaagcgggaggactcaacgctatgctcaactatggttatacgatcttgcgcgctgccactgcacgcgctgtggttgccgcaggacttcaccctactttagggctgcaccacagtaacgaagggaatgccatgcgattggtggatgacttactggagcccttccggcctatgattgacctgaaagtctggcaactgcaaaagcagggtgaaaacctcgtcacgccagagagtaagcgggcattagtaagaactctttacgatgatatgcaaaccagcgtgggtgctacccctgtaatggtctgtgctcaaaaactggctatctcattggcgcaaatctttatgggtggaaaagagaagctcgatctgccattgccgggcttgcctcttaccctggccgcagcgctatcaaatgactgatatctcatgctttcaggatatcgcctcatgtggattatggtaatgtttgatttaccagtggtcgaaaaaactgagcgcaaggctgcgaccgagtttcgtaatgccctacttgacatgggttttgagatgtctcaattttctgtttatatgcgcttttgcagcagtcaaagccagatagatacctactgcacacaggtagaaaggaatttacccgctggtggaaaggtgaatatcctacaatttaccgacaaacagtatgaacgcatcatcgcttttcgcggaaaaaccaaacaactctgcaaaaaagccccggatcagtacgatcttttttgatgaaaatcccgctttcttattctcataaatgcgttaaccccctgaacatcagggggttaacgcgcagctagtttagcagattgggatttgcgctctggccggaacggactaacgggcaataaaaaagccacctcaagtttagcagattgggatttgcgctctggccggaacgtctatcgcgcccttgttatcattcgccgcagtttagcagattgggatttgcgctctggccggaactagtgtcgagaagtaccccccaaagaaaccagtttagcagattgggatttgcgctctggccggaactaccgtcaaccgtgccacagtgcggacaagagtttagcagattgggatttgcgctctggccggaactctacgtgcgagggagcgcggtgtccaagcagtttagcagattgggatttgcgctctggccggaacttgatgagctgctgtgccgcagcgaggtctaagtttagcagattgggatttgcgctctggccggaactgtggcgaagtccagggcatcccataccaaagtttagcagattgggatttgcgctctggccggaaccactgagtctgatttgttttcggaatgcctagtttagcagattgggatttgcgctctggccggaacagacccaccatatctgcattcgacgcgagtagtttagcagattgggatttgcgctctggccggaactcgttgaagttcaccgtgaaggcccgcccgagtttagcagattgggatttgcgctctggccggaacaggcggtactgtcgcctactcaaatatgaaagtttagcagattgggatttgcgctctggccggaaccccagagtggcaatgtcgcgcattgcctcgcagtttagcagattgggatttgcgctctggccggaacgtgaatatcaactgggataacggcgccaacagtttagcagattgggatttgcgctctggccggaacgcattgcacggtacgtctcatcgtccaggcagtttagcagattgggatttgcgctctggccggaacttccacggttcgcccaataactctatacgtagtttagcagattgggatttgcgctctggccggaactggataatttagccatctcgatcctgttacagtttagcagattgggatttgcgctctggccggaaccggcgtgcgtatccactccggcaatacggcagtttagcagattgggatttgcgctctggccggaactatcctgctttacgcgggcgaattccttgtagtttagcagattgggatttgcgctctggccggaacccacgtaggtgatgatcgtggcattgctcgagtttagcagattgggatttgcgctctggccggaaccaacgccttcaggagtcgaaacgctgtattagtttagcagattgggatttgcgctctggccggaacgtactccgcgtactcgagcgcgagttttacagtttagcagattgggatttgcgctctggccggacgtacggtctgcggtagtgcagcaaaggtcttgagcaggcatttgggtattttggtggcgttcccgagcatgtcttgtttgataacgctggaacgattgtcgttgagcaggacgcctatcgatggagaaggcaggttcttgtaaactgcttcttcgatatcgaagaagcagtatttgacatagctagatcagagtgttttgaggtactccagcaatgcctttttctcgtcagccgaaagtgtagtgccaaattcatggccacagcggctgttgccggaatttcgatcactgcaatccgtagtctccagcgtatagtcgaacttggtttgctcaatggcaaggcctacattatctgtatcgtaagccggaccgatcttgaaggaactcacccgttcagccgccggtttcagcagctccgccagcgtgggaactgatccattgtgaagatagggagcagccgcccagatcccctcaaggacgcgcgattcatacgcgtaggacggtgtggcagccggtaggggcgcaatgaacgcatcccgaagagattctgtttccggcggaaaaggagactgtgcgcccttcatccgagcttcgtcttcggttttcataaggacgggaacgtagtgctgaaggatggagccgaggacggctgtgctcagaacattgaaggcagtatcgacgggctttagcggcttggcgagaagcggaattttcgcgccgtcaagtacacccgtcttgaccgtccggccgagaacctcgtactccctggaatccgtaccgacatccattacgggcgtggcccaggttttttggttgagaaactgggttttccccggtttgatgccgtggcaatcggcgcagccaccctgtccagtattgcgtgcaaagatctccttgcctttatccgcaagttgctgatctaccttccatgcccatttgggagggcctattttttttaccaaattttccaatgcgcccagcccctgaaattcagctgagtttttgtgcaggtagtcgattccgagtaaatgccccgcatctttctttggacgaaaaatcccaaacacgccataaacttctccaagattcctggcaaggccaagaatatcattgccattgctggcgaaaccaggccattgggtcttgtcctggattgcggcattccaaaggaacggatagcgtaccggcgcgatggctggctgaatgttttcgggaataatacgggtaggcgaagaaccgatatcgaggccggcgagccggttgaagatcatcgataccgcgtcgagtcgcgcgggcccccaaggctgtgcaggaagtgaacgctcaatcaacgtgtgatagggcaaataccaggccttcactgattcccgcaacatctccttgttctttgcagtcgccgactgacccagtacagcgtgcgcgaaatccgtgaacgcctgtttgtttgtcaggatggcgcctacggcaacatcgaggtcagctagaaaacgctggaaatcgacaattcccggcccaccgtcgatcagatacgcggtgccgttaacctcaatttgacgggtatggcaggcggaacaattcatgccgatttcctgttcctcgcttccgcttgcaacggtaaatccgataggtagtcctgcgggcttgctggttttattgggcaggaagccgtatcggctcaggctatcagccatgaattgctggccgtctggttgcttcaatgcggagatccagcgtagcggcatgatacgcgacccctggtcacgactatagaaatcctttcggtccgaggccgtccatttcgtgccctggtccatgagcacgggttcggcggcagatgaagccggggacgcgagcacggccaaggcggatagaatgctgccgatacaggatagaacttttattttcaagatttatctccctctggattaatgaatcgggcatctcacggatccgtcgcgttcctgctgcccgctcctgctgcctcggttgcatgaaagttttgagtgtcaacgtgactacaccaacacttacatccttatgagcaagggtcacaagttatcgacgaatttcggaaacctcccggttgaatggatcaagctgacttggatgccgggtcaccccggaatgccaatccagttgatgcctggcggtacaattgcgcagtgcgctcttattaattattgattttcgactccctcgccacgagggcgtaggggcttgtcaccgcctccttaacggagggaaactggaaaatactgtcgccggtggaaagtctgagggtccagccgcatgtgctgccctggctgatctggagatcagaattcaaaaagattgaaagaagtatggaacaggtgaaacaggggtaatcagcaaagaagaaaggcttttttctcgctattcgagccttagataatcacttctgtatgggttaagttgttacaaggcagcccgatccacgctctatcacaaaatgtgtatcggcctcttgcttccggcgatacgtcatatttagagttaaacctctccgccgctcccacctgtaatttcttacagctgtttttatctgcaattctcgtgcctaataaataactgccgcctaaagaaggttgtcggccacgtattctcaatttatcgatggctgggctgccgacacttcggcacttcgtctggctcagggaaactcaccaatgcgcgtatgttttatttctcattccgctgggcggtacggtgcggaattggctttgctcgagttgctgcaggggctgcttcgctcgggtgtcgaggccctggtattggttcccaagaagggtccgcttctggacgagcttgaccgcctaaacattaaatggcgaatcatcggttatccagtctggatgtctcgcccaagggcgcttccatatcgtgtaatgcgcctcctgaaaacagcgctcatgagtatccgcgtggcccaggtaattaaaaattggaatgcggacgttgtctataccaatacggtggtaaccggggtcggcgcgttcgccgcgcggcttctacgcctgccgcacatctggcattcgcatgagtccttgcgccataatcccagccagagattcgatctgggcgaacccgctgtctcgtatctcatggatcgtttgtccaatgcgattattgtcacttcccggtctgttggggatgattacaaacatctccgtaatgcggacaagatccgcgtaatttaccagtcggttaccccacgccccaatgttgggaattcaaccagcctggtcaaggatcgaatatttttccagtgcgtcattatcggctccctgcatcgatggaaaggccagcaccaggcaatctctgcgcttgcggaactggtcggaaagaacatcaatgttcatttgttgctggtgggggacgatggaaaacgctaccgcgcggaactggtgcggctggcaatgaccctcgatgtcacccgacggataaaatttcacggctatgccgaagatccgatgcccctcatacgtaacgccgatgtcgtgcttgtgtgttcccgatgggaggcctttggccgggtggcggtggaagcgatgcttgcgggaaagcccgtcataggaagcgccaggggggcaacagcggagatcattcagcacggcaagacgggtcttctctatgaatgggaaaatgtaaaagagctggctgaacgaatacggttcctgcacgacaacccgaaggagagcctcagcatcgggcatgctgcccaacaatgggcagcgaacaggtttacgcaggagcgatatgcacgggaggttcttgagatactgtcagaggtgacttcaaaccgctccggccccaaagtcacgcgtttgccgcagaataaaattctggatgccgtagcggaggcaaaaatccagtcaggcacatccggccgggaatgatctcaaacaggggaaacagtcgggtgggattatttctaccttatttctaacctcgaccttctaccctgagccttctacgttgaaccgcttgaaaatgaatatttaattgacgaaatatgttttttcaccagcgcccggtatggtttgggcaataaacgcttatagcgtttggccattgtgtctgtcacccatgcccaggcgcggtagcgcaacgttaaatacaagaagttctctggaagatgccgccaaacctgataacggttcaagatcaaatcgcccaggcctattcttaacggatgcgatagcaggatctgttcagggtggccggcgttaacaggataaggggacgtgaggattttccgcgtggaaaaataccggttaatcactttggctggatcatcgccaaagtagcgcgggtgactgacccacaggttcggcctcatatcagcctcgaaaaaatatagcttttgatccagatcggaccggatggaactgatatttatgaaaccatcggcacccaatgccctccccagtaacccgagatcctcaaaaaccttttcgtccaattgagaaagttgtacatatcgcctcactgaggtgggtccgaatttgtatttgtatttttccggtgtcgagcaggcaaaatgaataagcttgccattttggtaaaaagcctccatggacacttccgcgccttttatcttcttttgcaccaaaacgggataggtctttatgttggttatcaaattatcaaatccgtcatcgcctgaactttcaaatattcccttgccacccgaggatgaatcgagtttgataatgacgggatgacccaattcccttaccgcatttttcagttcatgttcgtcattggcgatccggaaatcaggcgttagaaccccacttcttttaaaagcttgggataagccaattttagaaaaaatatgtgcaaagtgcttctccgacaaaaccggaagcaacgctaatttttcttccgtggacagatcggaattcaatatttttcctaatgtgggatcgtctccgataacaactaacgtgtattctttttttatcttttccgaggcgattttcacgagtagatcatttttttcagcaaggaaataatctcgtattgatctgttttttttaaaaaaagcattggtcgaaatcacatccacggtaaacccggcccgtgttaataaacccagtaccgtcatcatcagttctggccagtatccgccaattaaaagcacttcaagcttatgcattcttttactacctgtgtaaggggggccgggggctggatcaagccttcggtatcaacggggtccaaaagccaagtggggacatcaaggctagtcgcggattctaatccttcgtttgaccctaacaagctgtatgttcctacagctattttttccagtcctcttccttaagtaaaaaatgcgcttgcacttggtctttaagaaaaactcgccatttcacaatcccggataagagatggcagtaacataaggaagcgaaggcgcttgcggcgatcgggattaaagagattgatatttgaatttcaatcgctatcatgaactagcgacgcaagcagcttgtcggacttaaagaatcgcagcgaaaaagtgactgggtgagggcagattttgaggattttgaaggccaatagttattctattggccgaaaaagcggcgaaatatgaaccggccagacgcttttgcagccgatttcctttaagtccgacaggttgctagataaggagataatgatgcgcgaatacaagatcacatttcatccgatcgacccatccgaggccccggccggtccaatcactgttatggcacaatggctggatgaagcaatcgacctggcggtggagagactgaaggttgactatccggaccggtcacacgatcttaacgattacaaacctcttccacacgcgacatggcgcgagcttctcgaatagcatgatcggtgggaaatctgtaattggttctatgagtcgaccgagcggcaatacgaccgcaggaagaattagcgtggggtccagtgaagcgaaacgccatgaacgggaatacgaccgggaccgccagcaggaccatgaaccgggctattaaattttgaaaggagaagtatgaaagctgtcgtaacagttttgctggtggcctctttgtttgcgggttgtgctagcgcacccgagtatgagcagacttcaaagaaattaaatgatgggacgcactatttcatcaagactaattataaaccttgtcaaataagtcgggattgggcgatcagaacattgacgaaccgggctaataagatttgtaaatcagaatacatactcattaatgagcaaacgccggtgattttgcaaccgatcgaagcggaatctgcaaccagggagcttttatgggaaataaaatgtaaggatgctacctgatacttaacttgtcgcgctttggcaattgaactatcgcgatttaactatcgggtttcagcgttggcactcatggttagccggatgtcgtggtgcgaatataaaaaagtccgacagcggtgtagcagagtaatgaaggcctgcaggtgcagctgaagcgcagccaatctggaaggctttagcttcccgtaatcgttatttttcctatccggagactcaatggaaaagcagcttactcccgaaaatattttgcagaccggcatggccttctggccagcgaaaactttgctatgtgctgtggagataggggtttttacggaactggcgcaaggctcggcgagccttgcttcacttcaagaacggctgggcctgcatccccgcgcgtcgcgtgattttcttgataccctcgtagcacttggcttcttgaaacgggagggcgaccgttatagcaatacgccggaaacggacctgtatctcgaccggaagaaactctcatacattggcggcatccttgagatggcaaaccgacgcctctacccgatctggaacaacttgactgaagcgcttcgtaccggtcaaccgcaaaacgaatgcaagaataacgaagcggatcttttcgagactctttatgccgatgctgcaggcttgagcgagtttcttagggccatgaccggcatcagccatgcgtccaatacggttatcgcgagctctttcccatggcaaaggtaccagaccttcgtcgatatcggtaccgcacagggggacctcgctgtgcagatcgcgcttgtgaaccctcacttgcgcggcctgggattcgaccgtgcggaagttgaaccggtctttcagcagtatgccgtggcgactggtgtcgcggaccgggtc

SEQ ID NO: 1817 - DNA, 23138 bp, synthetic construct
  source 1..23138: mol_type = other DNA
  misc_feature 1..23138: note = Synthetic
ctgcgcttcttttgccaaggcttcgatgcaacgaggcaataacgtcgatacggcctcactaccagccgccgtcatgccaggcaattgcgcttgcaaaattcgtaagatctgtgcagcactcggcttgctggccagcgccgcctggatcagcgcggcctgctgttcctgtaacagcgggtggcgcaacattaaatcaagcaattcaacataatgataggtctgctgccactccactaattgcgtcgcccaggtggcttgaactggcgccgcgtcaaagcccggcaaacgctgccagtgctgccactcgcggggcagcaaggttaaaagctgaggggttaattggaccaactttttccaagccgccaagacgtcgggccattgaccttgctcggctgactgtcgcgcttgtatcaaccagggacgagcagaatccggtgccagttgttgggccaaggtgattttttcttgtcgctgcgccgggctcagggttgcccaagcctgctccagcagctcacaggccaaatgactcaagcgtagctggctgtaacggggagactccggtgttgacgcgctggcagaagcatcgccctgtgccgcaatactcaagcccatttccaaagcccgcgcgtaatcacgggtgctctgataaatttgcattagcgcccgtttggctggcaccgcatagtgactctcttgcagcgccaacatacaagtttcagcgcggtctaataggcccgctttgataaaatcctgccccaactcatattgcgcatgttcacgctgcaaagccgacaaatcgggacgatcgagtaagttttgatggactcgtaaagcgcgatcaggctcaccgcgctgtcgaaataaattacctaaggccagatgcagctccaccatttctggctttaacttcaccacctcaataaacgcatcggcagctaagtcgaattcattgtttaacaaatgatttagggcgcgaaaataggcccgaggcaaggcttcttgctcgcgctggctatgtcgcttatccaagtgacccgcaagccaacccaacaaaaacaagagcggcaaaattaataaccaccaccactcaaacgccatggggattcccttcctggatatcggtgcgggccgctggcggcacgagggcgggctcagtggctgacggtggtaccggctgttccgcctgcgcctgccatttgcggctggtgcgacgccagtgccagagacgcggcagtaaagccagaataccgagcgcaacccccaatacaaaaaagctgaataacactaaggccagcggtgcttgccagtgccagatagaaaaaaaggtgagctgaaccacttgtgtgttttgcaaggcaaacacaaacaagagaaaaaaagcgagtagtttactcagcgttaggaaccagcgcatgacacgctttctggacagtgtacacaggccatctgcaactaattgcccccggcgagcaaatcgactttctctcgcaactctttaccgggcttgaaatgaggaacccgcttgccaggaacgctgactttttctcctgacttcggattacggccaatccgcggtggccggtgattaatcacaaagctgccaaagccgcgtatctctacccgttcaccgcgtgccaaggcttgtgaaatcgcttctaataaggtgcgaacggcatcctccgcgtccttcgccaggaggtggggataacgttcagccaatcgagtgattaattctgattttgtcatactgaaaaaataccccccaacccggcttgtagacccagatggggggtaagtcagtttcttacctttaaggtcagcgtcgattaacgctgcgcgttgtccaacttggctttcaacagtgcgcccaggttagtggtgcctgtggcggcttgattgtcagccattttacgcatcgcttcactggtgtctgcattgtctttcgctttgatcgacagattgatcgaacggcctttgcgatcaatgttaacaatcatcgcttcaacgctatcgccttctttcaggacattacgtgcatcttccacacgatcggtcgagatttcagaagcacgcaagtagccttctacctcgtcagtgatctgaatggttgcgcctttggcatccaccgccttaacggttccagtcacgagtgcgcctttgtcatgcgtggcggcgaagttattgaaaggatcgccttccaactgtttcacgccgagggagatacgctctttctcaacgtcaatcgccaacacaacggcagtcagctcttcgcctttcttgaagttacgaattgccgcttcgccagtgtcgttccaggacaggtcagacaaatggactaagccatcgataccgccaggcaagccgataaacacgccgaagtcagtaatcgacttgatcgcgccagtgactttgtcacctttcttgtgaccagccgcaaactcatcccaaggattaggcttgcactgcttcatgccgaggctgatacggcgacgctcttcatcgatctccaagaccatgacttcgacttcatcgcccaactgaacgattttgccgggggcgacattcttgttagtccaatccatttcagacacgtgtaccaagccctcaatgccttgctcgatttcaacgaagcagccgtagtcggtgaggttcgtgactttaccgaacatgcgggtgctcgtggggtaacggcggcccaaaccaacccagggatcatcacccagctgtttgatgccgagtgatacgcggtttttgtcttgatcaaacttcaatactttggcttcgatttcctgaccgactgtcaacacctcggaagggtgacggacacggcgccaggccaaatcggtaatgtgtaacagaccgtcgatcccccccagatccacgaacgcgccgtagtcggtgatatttttaacgatccctttaaccacggtaccttcaccgaggttagccaataatttctgacgctcttcacccatgctggcttcaaccacagcacggcgtgacagcacgacgttgttacgacggcgatcgagtttaatcaccttaaactccatcgttttgccttcatagggggtcgtgtctttgatcggacgcacatccaccagtgaaccgggcaagaatgcacggataccgttagtcagaacagtgaggccgcccttgactttgccattgaccgtgccactgaccagttcgcctgattccagcgctttttctaggctcagccatgcagacaaacgcttggctttatcacgggacaaaatggtgtcgccatagccgttttcgagcgaatcaatcgccacactcacgtaatcgccgatgttgacatccaactcgccagcatcgttataaaattcttctaccggaatatagctttccgatttcaatcctgcattcaccaccacaaagttgtggtcaatacgcacgacttcacccgtaatcacttcaccagcgcgcatttctttgcgggctaagctttcctcaaacaaagcagcaaatgattcagcaccagaaacgggggcagatacaactgtagacataatcagactttctctccactcaagcaggccatcggctgccggcgggtgttaacaataaaaaagttaaaaaaccagcacaccatcacaacgcaatttgcaacgcaggaagggactggaccttgtttcgcaccccgatgccaaacgctaggcatcaagctgcgcaaactgggccagaataaattcggccgcatcttcggctgacattgcactcgtatctagcagcaccgccccaggcgccggcaccaatggcgccactgcccgcgtgcgatcccgctcatcacgttgttgcaagtccagcaaaagggcatctacgttagcagaaatccctttattaatcaactggttatagcgtcgccgtgcgcgctcttcgacgcttgccgtcaaaaatactttcaaatctgcttccggaaagatcaccgtacccatatctcggccatctgcgaccaggccaggcggctgggcaaaagcccgctggcgggccaccaacgccgcccgcaacggcgcatgcacggcaatcgccgacgccaaattaccgacctgttcagcccgaatcgcatcactgacttctacgccattgagccaaacccggtaatcggcaaactgcacctgcaaatttgccgccaaatcagtcaaactcggcacatcatccgcagccaccccttcttccaaggccgccagcgctgtaagccgatagagcgcgccactgtctaaaacatgaaagcccagcttatcggcaacccaatgtgccacggtgcccttgccggaggccgtggggccatctatggtaataatccaagacattcccaaaccctttgccaatcaggcactaacttgcaagtgaatacccacttgctgcgccagctgcgcaaaccctgggaatgaggtcgccacatgctgacaatcatgaatctgcatcgccgtcttggcacacagcgccgctaccgtaaaggacatggcaatccgatgatcgccctgcgcgtgaatggtggcgccctgatactttgctgtccccaccggctggttaggttggcccaaaccgacaatccgcatcccatcgggcagtggctctgcctcaacccccagcgcccgtaagccatcggccatgacctgaatccggtccgactctttcacccgcaactcggcggcgcccgtcaggagcgtggtgccaatcgcattagcagcagcgacaaacaacaccggaaattcatcaatcgccagcggtaccaggtgttcgggaatcgttatgccgcgcaacaccgaagagcgcacgcgaatatctgccaccggctcgccgccgacttcacggacattctccagggtcaggtccgcacccatgagctgcaaaatatcaatgaccccggtccgggtggggttgatacccacatgctgaatcagcaccgaggcattcggcgcaatggcagccgccaccataaaaaaggcggcagaagaaatatcggcaggcacatcaatttgcgttgccttgagctgccccccgccctgtacgctgatttgcttaccctgggcactctgctgttccacgacggcatagccgaaggcccgcagcatccgctccgtatggtcacgcgtaggggcgggctcggttacgaccgtttccccttctgcatataaacctgcgagcagcaaggctgacttaacctgcgcactggccatgggcaaagtgtagtgaagccctttcaacgtcggtactgggcgaatttgcaggggtgggcgatcaccctctgctgtgtcgatttgcgcccccatcaagcccagcggcaccgtcacacggcgcatcgggcgcttgctcaagctggcatcaccaatcaaggtcacggccaggttttgcccggccagtaagcctgcgagcaggcgcatggcggtaccagcgttgccgcagtctagcggctgagtaggtgcttgcagaccgtgtttccccaccccatgaatcaccacacgcccttgggttgggccttcgattggcacgcccatggcgcgaaaggcttgcatggttgaaagcgcatcttcgccttccagaaagcccgttacctcggtagtgccttcggcaatcgccccaaacataatggcgcggtgagaaatagatttatcgcccggcacgcgaaacgtcccagtagcggtgccacctggctgcaccagatagctcaaattatcgtgagaatgcgacataaagcagccaaaaagagagtccagcagccaccgcagcgacaaatcgcgccagcaatgcggtaaaactactgcaaagattgaatcagttcgttattctaactgtcccggctgacgctttttccgtcattcccttgttttttggataattgaccatgccctttgaagtctttgagctaaccccaaaaggggagcaatatagccattctttagaagtgcgacttgacccgcgtttgcgggctattttgttacaggtagatggcaaacgcaccattgagcaactgagcagctatgcaaaaaagtttggcctgggggcggatgatatttggcagctcgaaaaagcgggcttgatcgtcgagcgaaaattaattcccgacccgacccccgttgcaccatggggtgattttaccgattccatcatgtatgacggtgtggttgaagaaaccggctcagccgacttttacaacaccatcaccgataccagcctgattcatcatcccggcgctcagcaaaacaccgcagccaagcagcccgcacccagccccgccaaaccagagaaaatggcgggcttgagtatcagcgaaaaactcacggacctcgccgaagcctttttcaacaaactgcctgatcacctcaaaccgcatcacaccatcaaattgcatccgcgtatctttaatcggatagagctgatgcaccaacacgccaaagatacgattgattatctcgacaagctgttgctgttaaccgaagatactaatcgccaagggttttcatttaatgtggtgattgagctgaccaacctcaaagagcatttagaaaaacacggcaaatttttctgagtgccaagagcttttgcatggcaatgcctcataccggctgcaccaccccggcaagcgtggcgcagccgagtgcatgaagattacaaatgccaagtgcggcgagcgccgctgatttcggtaaaccgtgcttctaaggcagcgctatcgccagcctgcaataaatcgattagctcacccaagctggcttgaaaagcctgcgcacattgcaatacattcgcccgattcgccaagctgatatcaacccacattttcggctcactgcccgcaatgcgggtgaaatcacgaaagcccgtgcctgcttgcgccagtagagtggcggcattgggcgcttgcaaaatctgctgcatataggcataagccaaaaaatgcggaaagtggctgacctgcgcaaacacggcgtcatgctcatgcaccccgagctcactcacctgtgcgccgcaggcttcccacaccgcacgggtcagcgctagcgcggcgccatcggtttcgggggtcggggtaagaatcacccgccgcccgacaaataaccctgcctgggcggcttgccagccactttgttcgctgcccgcaatcgggtgggcaggcacaaagcgcgggtaacgcgccccaagcgccaagcgggcagccgcgtccacatcttgcttggtgctgcccgcatcactgagcacaacttgcgcggaaaaccctggggccagcgtttctagcacggcctgcgtggctgacacgggggcagccagcaacagaaaatcaacgtcagtcacactcgcagggctaatcgggcggcagtcatccaccacccttgccgcctgtgcggggctcaggcgcgctggctcacgggctaacccaaccacctcaagcgtaggcacagcctgcttgattgcccgtgcaaatgagccgccaatcaggcccacccccaacacggcaacgcgctgcaagcgggcgaggctcattgcccagccccttgcgcaatctctgccagcgccgccagaaaacggctattttcctcaggcaagccaatcgagacgcgcagccactgcggcaagccatagttagccacgggccgcacaataatgccgcgctttaacaaggcctgataaacctgcgcgccggcattggcggcaccagcggcgaggctgtccacatcaaacaaaatgaagtttgcataggagcggatatacggcagccccaacgccgccaagccggccccgactgcttgtaacccggcctgattgagcgcatagctttgcgctaaaaacgcctgatcttgcaaagcagccaacgcggcagcctgcgccaaggcattcacattgaagggctgacgcactcggtttaataaatcggtgatctctggctgtgccagggcatagccaatgcgcaaacccgccaagccataggctttagagagcgtgcgcgagacgatcaggtttggatattggcgcacccacgccacggtatcaaaccgtaactcgggcggcagatactcggtgtacgcttcatccagcaccacaatcaccgtgggcggcaccgctgccaaaaaggccgccaactctgcggcgggaataaacgtgccagtggggttatttgggttcgcaataaacaccagatgggtgtgcgggttgtttttgatggtgcgcagcatggccggtaaatcgtgcccaaagcgatttgtgccgctggtgagggcaggcacctcaatgcactctgcacccgtggcctgtgtggccagcgggtaaacggcaaaagcatgctgggcatagaccgccgcccgccccggtgagagcaccgcccgcgcggccaactccaaaatatcatttgagccgttgcccagggtaatccagctttctggcacggcggtttgctggcttatcagcgctttcagtgcaaagccattggcatccgggtaacgtcctaaatcatgcatggcagcctgcattgcctgctgcgcctgagggctcatgcccaaggggttttcattggaagccagcttcacaatctgcgcttcatccaggccatactcccgcgccacttcactgattggcttgccggcctgatacggcgcaatcgcccgaatataggttggtgctacatctaaaagcgacatcgttagattccttttgccttagctcaatgtttttaccggatacgaacccagcaccttgcaatacgccgcctcttgttgcagctcggcgagcgctgcctgcacctgtggctgcgcttggtggccctctatatccataaaaaagtaatactcccaactgcctgtgcgggctgggcgagattcaaaccgtgtcatggagacctgatgcttggccaatggcgcgagcaacgcatgcaccgcacccgctttatttgccactgacaaaatcagcgaggtatggtcttgcccgctcggctcggcctggtgctggccaatcaccgcgaagcgcgtgcgattatgcggatcatcttgcacatggcgcgccacaaactgcaagttatagcgggctgccgcttgctcgccggcaatgcccgcgaccgttgcatcgaggctggctaggcgtgcggcctcggcattgcttgccacggccacccgctcaagctgcgggtaatgctggttgagccaactattacactgcgctaacgcctgctgatgcgcacagactttctgcacgccttgcatggtgccgctctgcgtgagcacattatgatgaattggcaaggcgatctcgccgctgattaacaaaggcgactctaggaataaatccagcgtgcggttcaccacgccctcggttgagttttcaactggcaccacaccaaaatcggcggtgcctgccgctacggcccgaaacacttcatcgatggtggcacacggcaccagttcgaccgactggccgaaatgcttaaacaccgcttgctcagaaaaagtgcctgcggggcctaaataggccacaaacatccgctgctctaaggcgcggcaagccgacataatttcccgaaaaatggtttcaatatgctcaccgtgcagcgggccaggattgcgctcgcgcaagcgggcaatcacctgcgcctcacgctcggggcgaaacacgggcgcttgtgtggccgctttatgttggccgacctgctcagccacctgcgcccgctgcgccagcaagcgcaaaatatcttgatcaatcgcgtctatttgcacgcgcaattcagaaagtttggtttgccaaccatcgctcatggagtgtactcagcgaattaaggaagatagaggattgtacaacctcaaaactaggccagaaaagacgaaagccgcatatagcggctttccatttggtgcatctttcagcttgttagcgtctagagcgcatatctcaatgatttagaagttgcaatgtaaattagttttgggtaaaaatcaagcacacaaaaaaacaattcattgattaatcttgggtacaacataaaggcagatgtatgaaaaacaaaatgcaataccgtttggcccttgatttaggcaccacctcacttggctgggccatgcttcgtgtaaaacccaatcccgaaggccgtttagagccttttgccgtcgtaaaagcaggtgtgcgaatcttttcagatggccgcaacccgaaagatggttcctcattagccgtgacccgccgcgaagcgcgtgccatgcgccgccgccgcgaccgcttactgaaacgcaaagcacgtatgctgcaacagctcactgcctttggctttttccccaccgatctggccgagcgcaaagcactggaaacgctcaacccctacgaactccgcgccaaaggcctagatgaaccactcagcccttatgagtttggccggtcgctcttccacattaaccaacgccgtggctttaaaagtaaccgcaaaaccgacaaaaaagaaaacgatagcagcgccctcaaagccgccattcggcgtgtggcgagcgaaatcgacggcaatcaggcgcgtaccgtcggcgaatggctctacaagcggatgctcaatggtcagcccgtaagaggtcggtatcgcgaaaccaaggtacaaaaagaagacggcaaaaccaaaatcgataaaagctacgatctctacatcgaccgcgccatggtagaggccgaatttgaagcgctctgggccaagcaagcctcgctaaatcccgccgtctacagcgagcaagccaaggccacgctaaaagatgttttactgttccaacgcaatttgcgcccagttaaacctggccgctgcacactgattcccactgaagaacgtgcgccactggccctaccgagtacgcaacgctttcggatttatcaagaagtaaataacctgcgcatactacgtgaaggtttaaaagacgaagcacttacactggtgcagcgtgatgcgctcgtcaccgcgctggaacagaacaacaagcggacttttgctcaaattaaaaaattgctcggtcttgatgggcaaacccaatttaattttgaagaccccaaacgccaagaactcaaaggcaataccaccagcgctattctgagccaccccaaacattttggtgacgcttggtttggttttgatgaagccaagcaagacgggattgtgtgtcagcttctcaacgaagaaaacgaaagcgcgctgattcgctggctgatggatcacacaggggtggatgaggcccatgccgaagctattgccaatgcggcactccccgaaggctatggctcgctcagccgcgctgccctcgccaagattctgcccgagctccgcaaagcggtgattacctatgacaaagcggcgcaagccgccgggtttgaccaccacagccacattagccccagtaccaccggcgaaattttgcccgaacttccctattacggcgaggcgctgcaacgccatgtgggctttggcacgggcaaccccgatgatgtgcctgaaaaacgctacggcaaaatcgccaaccccaccgtacacattggtttaaaccaagtgcgcaaggtggtgaatgcgctcattaaacgctatgggcaccccagcgaggtgattgtagaagtggcacgcgacctcaagcaaagcaaaaagcagcgcgatgaagaaaacaaacgccaggccgaaaaccaaaaacgtaatgagcggattcgtcaagatattgccgccatgcgtcctgatagaagtgaagagcgcgtgacccgtacagatattcaaaaatggatcttatgggaagagctaagctttgatccagcgaatcgatgctgtccctactcgggcgtacaaatcagcgctgaaatgctaatgagtgatgcggtggaaatcgaacacatcttgcccttctctcgcaccttggatgacagcctgaataacaaaacggtgtccatgcgccaagccaaccgcattaaaggcaaccaaacaccctttgaggcctttggtaaagacaatgctctgggcgtgaactacagcgacattctgatgcgcgcgcagcagatgcccaaagccaagcgcaaacgtttcgctgaaaatgctttggaagaatggctgcaaaatgaaaaaaattttcttgcccgcgcgctgaacgacacccgctacctcagccgcgtggcacgcgaatacgtcagcctgatttgcccacaagccacacgcgtgattccgggacaaatgacggcacagctccgcgccaaatttggcctgaatgacatactcggtttagatggcgaaaagaaccgcaacgatcaccgccaccatgccgttgatgcctgcgtgattggcgtcaccgaccaaggcttgctccagcgatttgcctatgccagcgccagcgcccgcgcaaatggactagcgcgtttggtagacaccatgcctgacccttggcccagctaccgccagcacgtacaacgggcggtacaaaatatttatgtcagccacaaacccgaccacagccatgaaggcgcaatgtttgacgaaaccatctacagcgccactgggaaaagtcgcagcgcagctaaagatcgcacagtcattccttttattgctaaaaattggagccatcctgacgaccacaacaaacagcgtccgttcaagggcttgataacagatgtttctcaacggcatcaaaacaaaccctacaaaggattactatcaaacagcaattactgcatcgaaatttattcggatgaagcaggctggggtgggcatgtactcaaaacttttgatgcctatcaaatcgtcagggcacacaaaaatgctagtgagggtatgcaagcgctacgtaataaacatagcagccagaatgggcacccactagttatgcgtttgatgatcggggactacattcgcgcagaaatagatggtttcttattgctgctccaagtacttaaaatcaatagttcaggctcgatcaccttcattaagccgaatgaaaccaatatcagcgcacggtacttagcaaagctagcagcacaaaaagctcaaaaagaaggtaagccattcgatgacattgcgctgaatgatgttttctttcagaaagcaatatctgccgatagtttacggttatttaaagctaggcctgtcaccctctcccccatcggtgagctacgcgaccccggctttaaaggctaaaggcctgcgccatgataggccgcattgttgaagtggctgatgatcgtcggcatttgtttatgtcgcgcggttttatggtggtgcaagaaaccgaaggggaacgcaaagaactcggccaagtcccgctagatgatattgccgctgtgattgccaatgcacacggcctgagctacaccaataacctcttggtggcgctcgccgagcgcggggcgccctttgtgctgtgcgccgccaaccacaatgcggtcggcatgctgttgcccatacaaggcaaccactatcaagccaaacggattgaagcacaaattgccgccagccagcccacacataaacgcttatgggcggcactggtacggagcaaactcgaacaacaagccgccgcgcttgaagccgcaggccgccccaccgcaccactcaatcagcttgcaggcaaagtaaaaagtggcgaccctgaaaaccttgaagcgcatggcgcacgcaaatactggggactactgtttggcgaagatttccggcgcgatcaagaagccacaggtgcgcatagcggcctgaatagcttgctcaattacggctatacagtgttacgtgccgccaccgcccgcgccgtggtcgcggcaggtttgcaccccagcatcgggctacaccacagcaacgacagcaatgccatgcgtctggtggatgatgtgatggaacccttccgccccgtgattgatttaaaagtatggcagctacacagccaaggcgaaagctacatcacccctgacactaagcgggcactggtgcgcaccctgtatgacgatatgcaaacgcccagcggggccacgcccgtgatggtgtgtttacaaaaactggcagtctccattgcccaagtgtatttaggcgaaaaagaaaagcccgacctgcccctgcaaggcctaccgctgatgctggccagtagcttgcgggatgattaaccatgctaacggggtatcgactcatgtggatggtggtgatgtttgatttacccgttatcaccaaggctgaacgcaaagccgctaccgacttcagaaacaccctgctcgatttgggttttgaaatgagccagttcagcgtatacatgcgcttttgcaccagctacgcccaagtagatacctattgcagacaggtggaaatggccttgccagaaggtggaaaagtcaacatactgcaatttaccgataaacagtatgagcggattgtgacttttcacggtaaagctaaacaacccgccaaaaaatcccccgatcaatttgaccttttctaaatatgccgctcattttcatggcccataaagcgaaaaaccccttgaataatcaaggggttatcgcactgcgagtttaaatcattgagatatgcgcactagccggaaccggcgcgtagcttgggtgcgcgatgtacaaagtttaaatcattgagatatgcgcactagccggaaccatccagacccgcacgtcgtcagaagttgtagtttaaatcattgagatatgcgcactagccggaactggtttgatgcgatacttattgactttatgagtttaaatcattgagatatgcgcactagccggaacacaaaaaaatcaaagtggcaaatctgcataagtttaaatcattgagatatgcgcactagccggaaccaaaatccacggctgggtaatactcaggggagtttaaatcattgagatatgcgcactagccggaaccggaactcgctaaggaactcgacctgtctcagtttaaatcattgagatatgcgcactagccggaacgcattcgggcattgcctccagcttgactacagtttaaatcattgagatatgcgcactagccggaacttatatctgtttgtgagcagttagctttaaagtttaaatcattgagatatgcgcactagccggaacatactctctttactctcgactttaatcttgagtttaaatcattgagatatgcgcactagccggaaccgacgtgtttgatgtgtacgcaaaccgtcaagtttaaatcattgagatatgcgcactagccggaactgcaagctggttaacaatatttgcaatttgagtttaaatcattgagatatgcgcactagccggaaccgctgactatggaacaagttgcaggtaagcagtttaaatcattgagatatgcgcactagccggaaccagtcaagcaacgaggttgctggaaataccagtttaaatcattgagatatgcgcactagccggaaccaatgctgaagccattacagcagataaatcagtttaaatcattgagatatgcgcactagccggaacttagctcaagcaattgcgacttatacagaaagtttaaatcattgagatatgcgcactagccggaactctggcatgtctgacgtggcaattggttgaagtttaaatcattgagatatgcgcactagccggaactggtttgatgcgatactcattgactttatgagtttaaatcattgagatatgcgcactagccggaactttcctgtatgcaatccaccgcctccgcccagtttaaatcattgagatatgcgcactagccggaacacaagtcaccgatgtacgcacgattacccaagtttaaatcattgagatatgcgcactagccggaactaatcgtctttaatgtaaggcgttaaaacgagtttaaatcattgagatatgcgcactagccggaacgactggattaaattggttacgcttggccacagtttaaatcattgagatatgcgcactagccggaacagtgaacattgtcactggaatgtgggctgaagtttaaatcattgagatatgcgcactagccggaacgatgcatctacggacaactgggacaagtggagtttaaatcattgagatatgcgcactagccggaacaaatgtatgcgccgtaccgctattgatgccagtttaaatcattgagatatgcgcactagccggaaccttacccgcccgcaagacaatctttctttgagtttaaatcattgagatatgcgcactagccggaacctaatcccgccatttaacgcctcatccagaagtttaaatcattgagatatgcgcactagccggaactgtaaatcccgcatgctcaaaagcagctaaagtttaaatcattgagatatgcgcactagccggaacgggcgctttggataagccgctaaagtcactagtttaaatcattgagatatgcgcactagccggaacggtatgcctgaaattcctaatttgttttgcagtttaaatcattgagatatgcgcactagccggaactatcaatagatggtgttttaccgacgcttgagtttaaatcattgagatatgcgcactagccggaaccgcaacgaaatgatgaacattcacactgagagtttaaatcattgagatatgcgcactagccggaactcaaaggagacgagaaaggcgctttcggacagtttaaatcattgagatatgcgcactagccggaacgcttgaggtcctggaacgacaaagcgttttagtttaaatcattgagatatgcgcactagccggaacagataaagctaaaccgtacttttcaatgcagtttaaatcattgagatatgcgcactagccggaacactctagtttcggttctggttctggttctggagtttaaatcattgagatatgcgcactcatcaagcgaatttaagcctgatcacttttcttgatcaaccctgccaatagcttattgacgggtttatttttttgggtgccgtttcctttgctatcgcgggcgctggcttgtttttgctggttttcaattttcttgccgcgctgcttttgcatgtcggtaaatttcatggcgggttcctagtctgtctttggctgatcagcctttattgtactggatgggggcgctgcggccgctgtcggcaagcgctgaatctcttgtcgcagggcggcgatttcggcgtgcagggtacgcatgttgtggtgcagctcacgctggagctttttttcatcttcgccaatcagcaaagcggcgaaataggcagtaacgaccgataaaaacgtaaagcccgaaagcacggtaaacacagccagcaagcgcgccgcatggctggtaggcacaatgtcgccatagcccactgttgagccagtgacaaaggcgagccagagtccatccaggtagctggttgcggttggctctagccaataaaaacccaagccggcgagcagcatgcctgctacggcaagtaacaagatcaggctaatgccacgctgggccaacagttgccgcacacactgtaagagcgccacaaacacgagtagcgagtaaagcacccgagcaggccaaagcaagctatcgggcaggggtagccaaagcagggccaccatgccgcatgcgcccagccaaagcagccagtttaggccgtgctgttgccaccagcgatgctgcccctgcggccagtagccagggtagagtaagcctgtccagagcagggcttgcaggccatataggctggcgcccaacagttccaagcgggggctgggtggcgcgagtaacagataaaacgcgggcgtggctaatagcaaggccagtaaacgcgttgcgatgtgtaacggggtgtgctggcttgtcataggcggtcagggttgatctagcgcaatagcatgcatgatgacgcgcaaccacccgctgtcctttgcggtatatcaaatccaagccttacccggcagctagcatgtaagggcacgatcttgataaggagcagaccatgtttaagaaaatcttagtgcccaccgatgggtccgagctggccgaaaaagccgtgcaaggggcaattgcctttgcccaaagcacaggcgctgaagtggtgggcttaacggtgattgacccttacccaacgcaaggggcgattgagtatgtgccggtgcaatcgtttgatgtgtatttggcaaaaatggaagatgtcgcgcaaacacgcttgcttgccgtaacccagcgtgcccaagcggcacaggttaaagcaaccacggtggtgaaaaaaaccttcagcccctatgaggcgattattgaaaccgccgaagcggaaggctgcgatgtgatctttatggcctcgcacgggcgctctggcgtcggggcgttgttactgggcagtgaaactcaaaaggtgctagcgcatacctcgctgccggtgctggtttaccgctagggggtggcgttgcccgcaaggcgctgttggcagcgtaaaatgcgggcatgcatacttatttaattggtgatctgcaagggtgttgtggcgatctacagcgcctgctcgacaccctgacctttacagcacaagattcgctctggtgtgtgggcgatttggtgaaccgtggccccgcgtcactggcgacgctgcgcctgctcaaaagcttgggcggcagggtgcaatgcgtgctgggtaaccatgacttgcacttactggcggtggccgcgggcgtgcgcccggcgaatgcgagtgataccttgcaagcgattttatcggcacccgaccgcgacgagctgctcacatggctacgccaccagccgcttgcccacttgggcgagtgctacggcgaacggttgctcatggtgcatgccggggtgttgcccagttggtcggttgccgacaccttgggctatgccgccgaggtcgccagcctcttgcgcgggccagactatgtcgattttttgcgagaaatgtatggcaatacgccagcgcaatggcagcctgatttacgcggtgcggcacgctggcgagcgatagtcaatgcgctaacccgcttgcgcttttgtcggccaactggcgaaatggatttcgccaccaaagaaggcgcaggcagtgctccagcgggcttcctgccttggtttgaagtcccagggcgggccagcgcggacactacaatcgttttcgggcattggtcaaccctgggtctgcgcaatgtgccaggcttaatcgcgctcgatacgggctgcgtttggggggggcagcttacggcttgccgccctaatggcgatgtcaccaaacgacacttttttcaggtttcgtgcgcccaacatcaacgcccgagttagcctaaaatagggccagcccgtttgctgtgggcacacttactatttttggagtttaactatggccagcctaccctcgaccttgagtttcccccgcctgcacaccgctaccgcgctgaagtatgccggcatcagttttattgcgggggcagttaaccacggtttcttttcggaaagccgctcctttgtcaccgccgccatcggtatggtggcctttgtgttgggcacttggcttgatcatcagcatggggaagaaaacgcccgctcgctattccagcaaattttgattggggcgctattttcaatcgggcttggcttttttaccggcggcttgcaacattttcctgactcgccagggcgcagtctgtgggtcgtgcccttgggcttcactgtctctatttttgctttggcacaaatccagcaaatccgctggcagcgccgcgcttggctgtatgccgtgctggcaagtgcggtggtgttggctggctcttatgcaacgtatcgggtctatgctggccacgcagacgaccacagccacagcctgattggcgagccagggcaggccgcgaatgtgacgcatacgatgtcgatggacatgaacgacaccatgcgtttcagccacgatgacattgaggttacgcagggcgatacgatccgctttgtgatccgcaacacaggtaaattgccgcatgagtttgtgttgggcacgcgtgaggagcttgctgcccacgcaaaagaaatggctgagcacgcggctcaagggcacgctatgccgcacgatgaaccgaatatgctgagtgttgcgccgggcgaaacgaaaacgctcatttggcaatttacccaacccggggtggttgatttcgcttgtttgattgcaggccatttcgaagccggcatgaaagggcgcgtggtggtcagagccaatcctgcgctacaggccagcggcgggcatagccacggtgggcatagccactaaagccttatgcgtggggtttggtaggctcgtggacgacgaaacccgtttgcgccacaatcgcttcctgcgcagcatgagccagctcatggcgtgagctggcgctggcaaaggggggcagcacatccagccgtgccgtcaggcccccttggctggccgcgccccacatggcgcacatggtttgccacatggtgatttggccggaataatccaccgccttggcgagctggccctgtgcgttgaagtagcgcagggccacaggcaccagcggcacgccagcatcaagtgcgggttgtagcaagttggcatggaagggtaagaggtgcatgccgttcgtggtggttccctctggaaaacaggcaatccgcgccccttgctgcaataggtgacgggttttctcattcactgcccgcaccgcatgtcgtttaccccgttctataaaaatggtgccggtgcgggcacagagatagccaatcactggccagcgcgcaatgtcggctttggcaatgaagtaaaccggccggaagctgttcaggacgtaaatatcaatccaggaaatatgattgagcaccagcaatgcgccgccgggcggcaatgcttcggggtgattaacctgcaagcggatgctgaagattcgcaaaatatgccgcgaccaccaacgcacaaggctaagccgggctgactctgggagcagggggaagccaaaggtcaccagaaataaacctagcatcaataacccgagtagctgtgttaaaccagacaagcgccggaggaaaatacgcattgggttggcctcgggttagtgctgcttgcgctgaaacacgattcgaccttctaccagcgtatgggtgacacggccctgcaattcgtaacccaaaaatggcgtattacgcccctggctgacaagctcactgggctgcacggtccaactggcgtggggatcaaaaatacaaatatcagcccgtgccccaagttgcaaagtgcccgcaggcaaaccgagtatgcgcgctgcctgatgggtaatgggtgcgagggcagtggcccaggcagccgggccttgctgcgcttggctgccccacttcaggctaagcggcaggagcagctctaaccccgtggcgcccgcttcggcttcgccaaaaggcagggctttttggtcgtcatctacgggggtgtggtcggagcaaatggcatcaatggtgccatcgcgcagaccggcatgaatggcatcacgatcccgctgttcgcgcagtggtggcatgagcttggcttgggggtcaaagtagccaatatccatatcggtcaaatgcacatggtgaatgccaacatcggcggtgacgggcaggccttcggccttagcccggcgcacgagctcaatgccagcggccgatgataaacggcataagtgaacacgcgcctgggtttgccgaatcagctcaaacaaggtgtgcagggcaatcgtttcagcgctaactggaatgcccgacaagcccatgcggctggcaagcgcgccggcgtgggcgaccccgccgtgtgctagggtggcttcttggggcctgagccaaaccgggtagtcgaaggttttggcatattgcagcgcgcgttgcaacacttgtaaatcacccaggggcgcatcggcatgcgaaaacgctttacaaccggcttcggtgagctcggccatttcggtgagttgtttgccttgcaacccaacagtgagcgcccccaccgggtaaacctgcgcttgcgccagctgttgggtgcggtgtttgagcatttcaaccaagccgggttcatcgagtacgggatcagtatcaggggggcaagccaggctggtcacaccaccggcgacggcggcttgcatttcggattcgagggtagcgcgatattcttgcccaggctcacgcaagcgggccgccaagtcaaccaagccaggggcgaccacttggccttgcgcatcgatcacgaggtcagcgtgaaagccggctggcgccgcgccatgtgcggcaattttaccgttggccagatagagatcatgttgcgcacagaggggttgcgagggatcaatgacccagccatttttaatctgaacattcatcttgtctgtctccacgcttctagcggcaagtgttggtcttgagaggctttaagtattggtattgcccgccaaaatgctcattaccgccatgcggcaggcaatgccaaacgtgacttgcggcaaaatcacggattgcgggccatcggccaccgccgagtcgatctcaaccccacgattcatcgggccagggtgcatcacgattgcgtctggtttggcgagggcgagtttttcgggggtgaggccatagtgtttgaaatattcgcccgccgagggcagcaaggcaccgcgcatgcgttcgtgttgtagccgcagcatgatgattacatcaacatcgcgcagcccagcggccatgtcggtgtagaggtgaacccccatgctggttagggtactcggcaccagggtacgcgggccaatcgcgcggatttccggcaccccgagcgtggttaaggcatgaatatcagagcgcgccacccgagaatgcagaatgtcgccgacaatcgccacgcgcagttgagtgaagtcttttttgtagtggcgtatggtgtacatgtcgagcaaaccttgcgtggggtgcgcgtgccgcccatcgcctgcattgataacatgaatatgctgctggccggttttattgagatgctgagcgatcatgaatggcgcgccactctggctatgccgaaccacaaaggtatcggcttgcatggccgccaggttatcaatggtgtcgagtagggattcacctttcgcggtgctagaggtgctgacatcgagattcaccacatcggccgacaggcgcttggccgcgatttcaaaggtggtgcgggtgcgcgtggagttctcga

SEQ ID NO: 1818 - DNA, 23138 bp, synthetic construct
  misc_feature 1..23138: note = Synthetic
  source 1..23138: mol_type = other DNA
tgctcctgctcctgctcctgctcctgctccagagccagagccagagccagagccagagccagagccagagccagagccagagccagagccagagccagagccagagccagagccagagccagagccagagccagagccagagccagagccagagccagagccagagcccgtcgtgcctgcgccgcaggccaccgcgcccagcttggcagaaggtgacacgtcgcctctttcagcagccacacccgtgtctgcccctgaagcagcgcaagtccctgccgccccagtcgctccagtgatccctgctgcgccagaggcgcctgctccgtcggctccgccatccaaagccccggctccagcgccctggcctttgccgccagagcctgcagcgcccgaagcgcgcggctcggctgccaaatatgcagcgctcggcctggggggtatcgccgtggtcgccgggctggcctggtggctgctgggcaccaagcccgcagccccatcggccagcgtgcagccaccggcagcccaggtcagccccgcggcaccggccgacgccagccccgcagcggtgccactggcccccgctgcgccccccgccgccgcggtagagccgccgcccccggtggcacccgtgaccgctgggcctgccgtggcgtcgcccgcggtgggcagcgctgcggctccagcccaggcggcaccagctgcgcggcccgcacccaagacggctgacgcagcgccaaagccagcccccaagcctcgcgccaatgcgcagacccaggcgcccgccgccaacgagccgccttggcagcatgacggcccgcgcggccccgcaccggccacgttgtcgcagcccagcgcggcaccagcccccgcgcctgcgggcgaaggcctgggccctttgcgtgcagccctgcgccagtgcgacagccaggacaacatgctgagcaagggcgtgtgcgtggtgcgtgcgcgccaccagcactgcggcagcaactggggcaaggtgcccgagtgccctatgagcaaccgcaacaacgacccttacagcaactgatcgggtcgagtccacacaacgggcccgctgcagcgggcccgccatgcataccaaaccaaccgagggaaaaccatgagccaaccacttgtccgagcggacaacccgtattccatttttcgcctgcccgaggcactgacctgctggcctgccgtctctgtgatggcggcctctttcctggtcgccgccctggtgtttgcgctgggcggggccctggcccgcgtgtggatggggttcacggtgctgctggcactggtggccatcgtggtggggctggctggcatcagtggcgctggcgcctgcttgtcagacctggcgcgcaagcgcccctaccggggtctggtgggttacttcatcgccgggttgctgtgcctgcccaagctgctgggcgccgggctgctgatgatgctggcggcgctggccctgttcctggccctggccgtggtgtttttcatctgcaagatcccggtgctgggccccttgctgctggtggtggtggtgcccgtggccgtgctggcgatggccgcgctgatgctggcgctgtacgtggcctcgtccatcgtcggccccgcgctgtgggatggtgagcgcgtgatgcactcactgtcgatcacatggcacatcacccgcaagtacccgttcgccgccatcggcaagatcgtgggcggcatgctgctgtcggccatctttgcttcgatgctgttcggcctcatcacctcggcctcgttcacagtgggcggcatgtttgctgccgtggtgggtatgggcgggggctttggtggcggcatgggttatggaatgggtggcttcaaccccatgtccatcatgatgggcagcgcctcgggccacatggtgggcgcgggtgtgggcttcagcctggtgtttgcgctggcttcggctttcgtcttcttgctgccgctgatggtgggcgtgctcacctggtgcgagttttctgaaaaggtcgatctggacagcattcgccaggcggccgatgaaaagctgcaggacatgaacaacaagatggccgacctgaaggaaaaggcccaggtccaggccgctgctgcggcagctgcggccgcagccgccacgcagaaggcgcctgctgcgagacaggatgcagaacaagcccccgctgccacgcctgctgggtctgccgcgccctcaacggtggtagccaccgcttcccccgcaccagcggcgccccccgcaccagcggcgcccgctgcaccggcctgcccccagtgccacggcacggtgcaagccggtgaccgtttctgcgaacactgcggccacaagctggtgtaagccattgccgccaacacccagcggggggtgtggcggtcctgtccgggggcgtcttgcccccggtcactccaccgtgaaatgctccagcgccgagtcgcccgcggggtagcgcagctgcagtcctttcagcacttcgcgcaccagtgtggcgatcatcaggttgcggtgtgtcttggagttggctggcacgatggtccatggcgcccaaggcgtgtgcgtggccgccagcagcatttcgtacgccttctggtactcgctccactgcttgcgtgcctcgatgtcgctcatcgagaacttccagtgcttggccgggtcgtccaggcgttcctgcaggcgttcgcgttgctcctcagcgctgatgtgcagcatgaacttgagcacgatggtgccggtgtgcgtgagcatgcgctcgaaatcgttgatgtgaccaaagcgctgatggtgttgctccttggtgatccagccgttgactgcgggcaccagcacatcctcgtagtggctgcggttgaataccgtgatctcacccgccttgggcaccttctggtgaatgcgccacaggtaatcgtgggcgcgctcttcctcgttgggcgcagtccagcccacagcgtgcacgcccagcgggctcatgcggccaaacacgccccggatggtgccgtccttgcccgatgtgtcggtgccctgcaggatcaccagcagtttgtagcgcttgtcggcgtagaacaggttctgcagtgtgtccagctcctgggcgatcagttctgtgactgccttgtccttgagcttgtcgcccagcgaaaaaggcttggccgacgggtcaaagtccttcagcgacaccgtgcggcggtgtttgccggccttgcgccgctcgggctggccatcggggcgcttgtcatcgtcgtgctgcggcgcgtccggctgccattgcgaccagcgttgggccacatctttgttgctgctgtgaaacgggtggttcatgcggactccttcggggcccatggtaagccagatgctcagccattgccctggaaaaccaatttctcaatgctattgaaaatatagctacaacggcatcgctggttggcgctagcacccaataaacgctctcatcaaactgtctcggtctgcagtgcctggttgtcattcatcagcgccacaaagcgccgcgcccccaggcccaagggccgctctttggaccacaccacgtccacccacagcgcggcgccgttgctcaggttctcaaacggcatctccatcagcgtgcctgccgccatgcggggctgcaccagggcgcgcggctgccagccccagcccaggcctgcttcgattaggcccagcgcggccaggtggttgtcggtgcgccagtggtggcgggcaaacacaaagcgcgggtcggtctgcgccaagtcgcggctggccaccacgatctggcgcgtggtggtcaggtgttcctcgcgcagcatggccgcctcgggcgctgcgccgcgcgccatggctgcggcgcgggcggccaccagcactgggtgctgcggcgccatcacggccaccagggtctcggtgcccacctcctgaaaaccctcgcgcccgtcgatgctgggccgctcaaacaccagcgccagctgggcgcggccactgtgcagcagcgccagtgcatcgacttgcggggcggtgagcacctccacctgcagcagtggatattcatgcgccagcgcggccagcggcgccgtccagcgcgaggccagcagctctggcgcaattgccagggtcaggcgctcttccagcccctgcgtcagcgccagcgcctgggcgttgagctgctgcaactgcccggccagcagccgcgcctggggctccagcgcccgcgccgcagcggtgggccggggctcgcgcccgctgcggtcaaacagctgcacggccagctcggcctccaggtgggcgatggtcatgctcaccgccgaaggcacgcgcgacagcgcccgcgcagcggccgagaacgagccgtggtccagcgccgcgaggaacacttgcacgctgtcggaggtgaatgccatggttgatttatcagaatttctgaaagaagctgattttatatatcagcctaaggcacataaagtacggcccatggcaacttccaaccctgtttccagcctgcaaggcattcgacgccgcgtggtgtacgtcacgctgtatgaactcatcgccatcgtggtggccaccttcgggttggccgcgctcacggggcaaaacgcatcgcacgcgggcgtggcttcggtggctgcttcggtgatcgctgtgctgtggaacatcgggttcaactgggcttttgagcgctgggagtcgcgccaggcggtgcgggggcgcagcgtcaaacgccgcattgcgcacgccattggctttgaaggcgggctggtgttcacgctggtgccgctgtttgcctggtggttcaacgtgagcctgtggcaggcctttgtgatggacctggcgctcatcgtcttctttctttgctacacctttgtcttcaactgggggtttgaccaggtgtttggcttgcctgcttcggccatggctgcatctgcgcaggcgtaagcacttaaaatcgctgctccgcccaaggagcgttgcagcggcagcctgattccaccccacgatggtggccggctgccgtcaggcttgggcgccctgccttggccccatcgcaacgacgctcacctgttttgtccgtgtttctgcacaggtgagccctatgtctgctatctccgttcctcccatgaaactctctggcctggagcccgtctccatcggtcaggacaccctgttcgtcaacgtgggcgagcgcaccaacgtcaccggctccaaggcgtttgcgcggatgattttgaacggccagtacgaagaggccctggccgtggcgcgccagcaggtggaaaacggcgcgcaggtcatcgacatcaacatggacgaggccatgctcgacagcaaggcggccatggtgcggttcctgcagctcatcgcctccgagcccgacatcgcgcgtgtgcccatcatggtggacagctccaagtgggacgtgattgaagcaggcctgcgctgcatccagggcaagggcatcgtcaactccatcagcatgaaagaaggtgtggaagccttcaagcaccaggccaagctggtcaagcgctatggcgctgcggccgtggtgatggcgtttgatgagcaaggccaggccgacacctttgcgcgcaagatcgagatctgcgagcgcgcgtaccgcatcctggtggacgaagtgggcttcccgcccgaagacatcatcttcgaccccaacatcttcgctgtggccaccggcattgaagagcacaacaactacgcggtcgatttcatcgaagccacgcgctggatcaagcagaacctgccgggcgccaaggtcagcggcggcgtgtccaacgtgtcgttcagcttccgcggcaatgaccccgtgcgcgaggccatccacaccgtgttcctgtaccacgccatcaaggccggcatggacatgggcatcgtcaacgcaggcatggtgggcgtgtatgacgacctggagcccgtgctgcgcgagcgcgtggaagacgtggtgctgaaccgccgccccgacgccggtgagcgcctggtggagattgccgaaaccgccaagagcggcgccaaggacgagagcaagaagctcgaatggcgcggcacgcccgagcaccccaaaaccgtcaacgaacgcctgacccacgcgctggtgcatggcatcaccgacttcatcaccgaagacaccgaagaggcctaccgcgccattctggccaagggcggccgcccgctgcacgtcatcgaaggcccgctcatggacggcatgaacgtggtgggtgacctgtttggcgcgggcaagatgttcctgccccaggtggtgaaaagcgcccgcgtgatgaagcaggccgtggcccacctgctgccctacatcgaagaagaaaagcgccagatggaagccgctggcggcgacgtgaagaccaagggcaagatcgtcatcgccaccgtcaagggcgacgtgcacgacattggcaagaacatcgtcaccgtcgtcttgcagtgcaacaactttgaagtggtgaacatgggcgtgatggtgccctgccacgagatcctggccaaggccaaggaagagggcgcggacatcgtgggcctgtcgggcctcatcacccccagcctcgaagaaatgcagtacgtggcgggcgagatgcagaaagacgagcacttccgcaccaagaaaatcccgctgctcattggcggcgccacctgctcgcgcgtgcacacggccgtcaagatcgcgccgcattacgaaggccctgtcgtctacgtgcctgacgcctcgcgcagcgtgagcgtggcgcaaagcctgctgggcgacggcgtagagagctacgtggccgagctgaacgccgactacgacaaggtgcgtacccagcacgccaacaaaaaggccacgcccctgtggcccctggccaagatccgcgccaacaagacaccggtggattggtcaacgtatcaacccgctgtgccccgcgccctgggccgtcgcgtgttcaagaacttcgacctggccgagctggccaggtacatcgactggggcccgttcttccagacctgggatctggctggcccgtaccccgccattctgactgacgaggtggtgggcgtggaagccacgcgcgtgtttgccgacggccaggccatgctcaagaagatcatcgagggccgttggctcagcgccagtggcgtgatggccctgctgccggccaatagcgtgggcgacgacatcgagttctacaccgacgacacccgcaccgaggtggccatgacttggtacggcctgcgccagcaggccgagaaacacaccatcgacggtgtgacccgccccagccgctgcctgtctgactttgtggcgcccaaagacagcggcattgccgactatgcgggcctgtttgccgtcaccgccgggctgggtgtggagaagaaggaaaaggcgttcattgacgcgctggacgattactccgccatcatgttcaagagcctggccgaccgcctggccgaagcctttgccgaatgcctgcaccaccgcgtgcgcaccgacctgtggggctacgcagcgggcgagcagttgagcaacgacgacatgattgccgagaagtaccgcggtatccgccccgcccccggctaccccgcctgccctgaccacagcgccaagaccgacctgttccgcgtgctgaacgctgaagaaatcggcatgggcctgaccgaaagcctggccatgacgcccgccgccagcgtgagcggcttctacatcggccatcccgacgcggtgtacttcaatgtcggcaagatcggcgaagaccagctgcacgacatggcccagcgccgtggcatggatgagaaggtgctggagcggctgctggcgccgaatttgtgatgctatgaattggatagctgcctgcgcttatgggacgggcgctgcagctattttttatagacgcttcttgccagaggctggtagataaaacccaagccacagcttttggtttgtatttctgaaaaacatcttttgatttgttttttggatatcagaaaacgcactatagtttgtattttgaaaatacaatccaaagtatgttttttgccgagactaatctgtgcccatggacgacaccttcaccgttcgcaccactgaacagttaccgcagcttctaaaagcctttcgcaagaatgcgggcttgacccaggcggatgtggccctgcgcctgggcgtgacgcagcagaccgtatctgccctggagcgcaacgccgaggctgtgagcgccgagcggctgatgcgcttgctgaacatcctgggcgtggagtgggtattgcgcacccgcagtgcctccccaagcgaaccatcagcgccgggcgacggcgcccactggtgagcgccatggccagccagcaacgcagccgcaaggcgctggggctgtggatgaacggccactttgtcggtacctggagcctggaagctggtggcgacgtgctgcagtacgacagccaatgggtgcaatcgccccagcgccgtcccctgtcactgtctttgcccttcacgccgggcaaccgcccacacaaaggccacgcagtgcgtttctactttgagaacctgttgcccgacagcaaggacattcgcgagcgggtagcgcgccgctaccaggtaggtgccacagacgcctacaccttgctgcgtgaagtggggcgggactgcgtgggggcgctgcaaatcctgcccgcgggcgatgagccgcccaccgacctgcgcgtgcaggctgaacccatgagcgaccacgccgtggcacagcgcatccgcactctggcccagcccggggcattgggcgatgcgggcatggcggatgatttccgcatctcgattgcgggggcgcaggaaaaggatgccttgttgttctggcaagggcgctggtgccgccccttgggcgccacacccaccacccacatcttcaaactgcccctggggttgatcggcaacctgcaactggacatgcagcattcggtagaaaacgaatggctgtgcgcacagttgctggccgcctatggcttgccagtggcaccgtgcgaaatactgcgctttgaagacctgaaagtgctgagcgtgcagcgctttgaccggcgcgtatggaacggcaacacgctgctgcgcctgccgcaggaagacctgtgccaggccaccggcacatcgcccgtgctgaagtacgaggccgacggtggcccgggggtagaacgcatcatggccgtgctggatggctcggcccagcgcgagcgtgaccgctttcacttcttcatggcgcagttgctgttctggatgctgggcgcaaccgacggccacgccaagaacttcagcctcttcctgcgccctggcgaaagcttcgagatgacgcccctgtatgacgtgctctccgtctacccgctgctgggcgaggggccgggcaagctgtcgccccacagggcacgcctggccatggcggtgcgtggcaaaaatgcgcactggcatctgaacaagatcctgcgccgccactggcaagacgttggaacgcgctatggcattgcatcacccagcgggctcacggtggatgccctgatcgccaaagtcgttcagcacaccccgactgcggtgcacagcgtgcagcaaaagctgccgcaaggcttcccgcagcaggtggcgcagtccatattcgatggcctcatccaggccgctgagcgcttggggcgggtgtatgggtgatgaaaagcggctctcgggcgtgcttggcgacaggcgcatgcgccaacttagcgatcaccttgatctcacacggaatgccgggtctgatggagcaggacgcttccgtgttggtaattgctattaaattactagctgcttgcgcttgatagataagcgctaggagtgaatttgactaaaaagacgaaagccccgcatgcggggctttccatttggtgcatctttcagcttgttagcgtccagagcgcatatcccagtgattgagtggttgcgattgtaaaccaatctgttacaaatgcccttcggaattcacaatgaggtgacgaatggcgatatcaggagcgtatcggttggcgttggacttgggatccacgtcgttaggttgggcgatgtttcggttaggcgaagacgggagccccaccgccctcatccgctcaggcgtgcgcatcttcagcgatggccgcaacccaaaagatggctcctctttggccgtgacccgccgcgctgcccgtgccatgcgccgccgccgtgaccggctgctcaagcgcaaatcccgcatgctgggccagttggtgcgccacgggttttttccggcggacgaggctgcgcgcaaggcgctggagcggctcaacccctatcagctgcgggccaagggcctgcgcgaggcgctgacacccggcgagtttgcccgcgcgctgttccacatcaaccagcgccggggctttcaaagcaaccgcaagaccgaccgcaaggacaacgacagcggtgcgctcaaacaagccatccaccagttgcgcgaacgcatgacggccagcggttgccagacggtgggcgaatggttttggcaagtgcgcatgcagcagcggcccgaaggggttgccgggcagggcgtgcgggcacgctaccgtgaaacgccctacaccaccgatgacggcaaaaagcgcatcgacaaaagctacgacctgtacgtggatcgcgccatgattgcgcaggagttcgatgcgctgtgggcggcacaggcagcgctgcagcccgcgctgttcacagaggtggcgcgggccgacttgcgcgacacgctgctgcaccagcgcccgctgcgccccgtgcgccctggccgctgcaccttgctgcccgatgaggagcgcgcaccgctggccttgcccagcacacagcgctttcgcatcctgcaggaggtgaaccacctgcgcctgctggatggcacgctgagcgaggtgccgctgacgttggcccagcgcgatgcggtggtggcggcgctggaggcccatagcaaacgcagttttgatcagttgcgcaagctgctgaaactgtcggggtctgtgcgcttcaacctggaggatgccaagcgcactgaactcaagggcaacgccaccagcgcagccctggcgcgcaaagatctgctgggtgcggcgtgggcgggctttgcggcggagctgcaggacgagatcgtctggcagatcgtgaacgaagaaggtgagggcacgctgatcgcctggctgcagcagcacacgggggtggacgaagcccgtgctgaggcgattgccaacgtggccctgcccgaaggctatggcagcctgagccgcaaggcgctggcgcgcatcgtgccggagttgcagcgcgatgtggtgacctatgacaaggcggtgcaggcctccgggtttgcgcaccacagtgacctgggctttgactttgaccacgacagcgacgaagtggagcgggtgggcgagcgcaccatcgcatccaccggcgaaatcaagcccgtgtatgccttcaaagagttgccctactacggccgcgcactgcagcgccatgtggcctttgccaaagacaagccgcgcaacgacgaagagcgctacggcaagattgccaaccccacggtgcacatcggcctgaaccaggtgcgcgtggtggtcaacgccttgatccgccgctatggccgcccggcagaggttgtggtggagctggcgcgggacttgaagcaaagccgcgagcaaaagcaggaggcgcaaaagaagcaggccgacaaccagcgccgcaatgcccgcatccgcgaacgcgttgccgagaccctgggcatcagcaccgagcgcgtgcgcgccagcgacatccagaaatggatcttgtgggaagagctgagctttgacgtggccgaccgacgctgcccctacagcggtgtgcagatcagcgccgccatgctgttgagcgaacaggtggagatcgagcacatcctgccgttctcgcagacgctggacgacagcctgaacaaccgcaccgtggccatgcgccaggccaaccgcatcaagcgcaaccgcacgccgtgggccgcgcgggctgactttgaagcgcaggactggagctatgaaggcatcttgcagcgcgccgagcgcatgcccctgcgcaagcgctaccgctttgcgcacgatgggtacgagcgctggctgggagaggacaaggacttcctggcccgtgcgttgaacgacacgcgctacctgtcgcgcgtggcggcagaatacctgcggctggtgtgccccggcagcgccacccgggtgatcccggggcagatgacagccatgctgcgcgccaagtttggcctgaatgatgtgctggggctgaatggcgaaaaaaaccgcaacgaccaccgtcaccacgctgtggatgcctgcgtgatcggcgtgacagaccagggcttgctacagcgctttgcccaagccaacgcccaggcccgcgaaggtggcttgacccgtctggtggagagcatgcccctgccgtgggacacctaccgcgaccacgtggaacgcgccgtgcgtcacatctgggtgagccataaacccgaccatggctttgagggcgcgatgatggaggaaacctcttacggcatccgcaaagacggcagcatcaagcagcgccgcaaggccgatggcagcgcagggcgtgagatcaccaatctcatccgcattgcagagcctgcacagccgacgcgccacggtgtggatgctgcagggcggccattgccttacaagggctatgtgggggggagcaactactgcattgaaatcacccgcaatgcacagggcaagtgggagggcgaggtgatttccaccttcaaggcctacggcatcgtgcgggccgggggttgggtgcaactgcgcaatcccacgcaggggcagaacggacagccgctggtcatgcggctggtgattggcgacagtgtgcggctggaggtggaggggcgagagcagacgatgcgtgtagtaaacatcaatggcaataacgggcagatgttcatggccccggtccacgaggccaatgtcgatgctcgaaatcgagacaagcaagacgcctttgcctacacatccaagtacgcaggctccatgcaaaaggccaaggcaaggcaggtcaccatctctgccatgggtgagctgcgcgacccaggctttcagggctgacccccatggtaggccgcatcgtcgaaatcgcagacgaccggcggcacctgtttgtgcaccgcggcttcatggtggtgaaagacaccgaaggcgagcgcaaagagctagggcaggtgccgctggatgacattgccgccgtcattgccaacgcccacggcctgacctacaccaacaacctgctggtggcactggcagagcggggcgcgccctttgtgctgtgtggagccaaccacaacgccatcggcatgctgctgactttggacggccaccatgtgcaggccaagcgcatcgaggcccagtgggcggctgcgctgcccttgcacaagcgcctgtgggcagccgtcgtcaaatgcaagctggagcagcaggccgcagcgctggaggccgcaggcgcacccacggcaccgctgcaggcgctggtaggcaaggtcaaaagcggcgaccccgagaacatcgaaggccagggggcgcggcgttactggggtttgttgtttggcgcagagtttcggcgcgatcaggacggggacggtatcaacgcactgctgaactacggctacaccatcctgcgctcggccacggcgcgtgccgtggtcgctgcgggcctgcatcccagcattggcctgcaccacagcaacgatgccaatgccatgcgcctggtggatgacctgatggagccgtttcgcccgatggtggatttgaaggtgtggcagctgcatcaggctgccgagtcgcatgtcaccccggacaccaagcgcgctttggtgcgcgtgctgtacgacgacatgcccacggctgcaggcgttacaccggtgatggtgtgcatgcaacgcctggccacttcactggcccaggtgtacttgggcgaacgcaccaagctggacctgcccttgcccggcttgcctctctcgctggcgggcacttttgaggcggactgaactccaccaacgccagcccattgctacaccatgctgtctggataccgacttatgtggatggtggtcatgttcgatttacccgtgatggagaaggcggagcgcaaagctgccacgcagtttcgcaatggcctgctggatctgggttttgaaatgagccagttcagcgtgtacatgcgcttttgcaccagccaggcgcaggtagacaccctgtgccgtgccgtagaacgcgccttgccacagggcggcaaagtgaatatcttccaattcaccgacaaacagtacgaacgcgccatcacctaccacgggcgcagcaaacagccggcacaaaaagcaccggatcaattcgacctcttctagctaccaaaaggaggccccccggctctgccggggaggcagtagaagtttgacttttcaggaggttgtccaccgtagagactttcaatcgtgagccgccaagcaaacgaaaggaagaaacacgatggacaagtatgaaagtttgagtcccacggcctgggattgcaaatatcacgtggtcttcatccccaagtgtcgaaggcgaacgctgtacaagcagctacgcgaacacctgggtgaggtattcagaaagttggccgcgcaaaaggaatgcagggttgaagaggggcatctgatgcccgatcacgtgcacatgatgctgtcgatcccaccgaagtactcggtgtcgcaggtggtgggctttatcaaaggcaagagcgcaatccaccttgcgcgggtgtacggagagcgaaagcgcaacttcgtgggtcagcacttctgggcgcgagggtacttcgtctcgacggtgggacgcgacgaagcggtgatacgggagtacatccgaaaccaggagaaggaagacgagaggttggaccaactcggtctatggaggtgagtagccaccgataggtggccccaagaatgaggggccgcgttagcgaccccttacagccgctttgagcggctcacatcccgaatgcccccggctttgccgggggatggttaccaaatggcgcggttttatagtcctctgaaagcgaaaacttcttttgttatcaagaggttatcgcgatcagagtctagatcactgggatatgcgcactggccggaacaccgttaaaggctcaacctgcgaggtcgttagtctagatcactgggatatgcgcactggccggaacaggaactcattgaagttgatgaactcgagtagtctagatcactgggatatgcgcactggccggaactgattgaagtcaacaccgccaggtgagttcagtctagatcactgggatatgcgcactggccggaacctgtctgttgcggacttcacaaacctttctagtctagatcactgggatatgcgcactggccggaaccgctgtaaagcaagcctgactgacggatagagtctagatcactgggatatgcgcactggccggaacgttcaggtggcgataccaaacaagctgatcagtctagatcactgggatatgcgcactggccggaactcagccattcccaagcacctcagccagcttagtctagatcactgggatatgcgcactggccggaactggttgcgccctacgtgatcgccacgaatagtctagatcactgggatatgcgcactggccggaaccaggctttggcaagaccgctgcacagatggagtctagatcactgggatatgcgcactggccggaacgctgcgcttggctgatggcgtcatccaggagtctagatcactgggatatgcgcactggccggaactggatgtcagagttgaaggcgtcgaggcgaagtctagatcactgggatatgcgcactggccggaactactgcgccaaggagctgggcgtgtcgcacagtctagatcactgggatatgcgcactggcctagcagaatggcgtggcatatgagctattgtttttcagccctacggcaaccgcgccaccaccttgatctcgaactggaacccatacagccagctcacccccatgcccgtcagcgtggggtagggcgcctcgccccagaactcgggcaccacgctccacacggtctcgaagttcgcctcggggttgaccacgaacatcgtcacgtccaccacgtcatcaaacgtgcagcccgctgcctgaagcacctcgttgaggttgctgaatgccaggcgcacctgcgcggccaggtcgggctcgggcgagccgtcttcgcggctgcccacctggcccgagacaaacagaaagccgttggagcgcacggcgggcgaatagcggttgcgctcgtacagcgcctggcggcctgcggggaagacaacatcacgggcgggcatggaaggttctttcagggaagagtggttggtgatccaggcactgtagaagtgcgcgctgttccgataaacaggctaatctgcgcagcactgttcttcattgccaaacaatgggccgcgctgtgcccccatcgccatggaccgttttgatgcccttcaggcctttgcccgcgtggtggaatcgggcagcttcaccaaagccgcccacaccctgcgcatgagccgcaccaccgtgaccctgctggtgcagcagctcgaagcccgcctgcgcgtgaagctgctgcaccgcaccacgcgcagcgtgcagctcacggccgatggggccgcgtattacccgcgggtggtgcgcctgctggcggaccttgaggatgcggacgcgagcctctccagcgccgtggctgcgccccgggggcggctgcgggtggatgtgcccagcccgctggccagcctggtcctcatcccggcgctgccggcctttcatgcgcagtaccccgacatccagctccacctgggcgtgagcgaccgcgtggtggacatcgtgagcgaccaggtggactgcgtggtgcgcggcggcacggtgaccaacccttcactcatcgcgcgccatgtgggcgacctggctttgcgcgtgtatgccgcgcccagctacctgcaacgttgcggggtgccgcaacaccccgcagagctggaagagccgcaccagcacaccgtgggctttgtgtgggcccgcaccggcaagcccctgccctttgccatgcgccggggccacgagcaggtgcaggcacagggccgctatgtgtgcgcggtggacgatggcaatgcctacctggccgcaggcctggcgggcctgggtgtgctgtggttgcccgactacatggcgaagccgcatgtggccgcgggcaccttggtgccgctgtttgctgactggcagatggaccccatgcccttgcacgtcgcctacgcaccgcaccgccacgtcagcgccaagctgcgcgtcttcatcgattgggtggcggcattgatggcggaacacgcgccgctgtaagcccaacttgctattaaataaatagctgtaggcgcttgttaggtaagcgtctgagtcggttctggtgcagagttgcttgcctgccggtgagggagcgcggctttgcggcgcctcctcctacaccggcccaacggcgtgcgggggtatggtgaaacgccttccaaagcctgcccatgctgacccccagagtcgtcctcgtagaagacaacaccaccattcgcgaaacgctggttcctgcgctgcaggagcttgccggggcgcgcgtggtggcaatggccgatggcgcccaggaggccctggcaaccctgcgccaggtgccgtgggatgtgctggtgctggacatgttcttgcgcgagggcacaggcctggaggtgctggcccagttgcccggcgaactggcgggccgcaaggtgtatgtgctgacgaactacgccactgcagatttgcgcgaggcctgcgtgcgcctgggggcggatgcggtgttcgacaaatccaccgagctggacgagttcttcgcggcctttctggcgtgatgctgtggggttggtctggtcaaccgcaggcggctttgcgtgggggcacagggcgctggccgccttcgcattcgctcacgtagttctccaaggccagcagggcccgcccgtcgggggtcgggccgtgcacggccaccacttgctcgcccgatgcggtggtgtagcactcgccacgcaccagtccgcgttgtgccagcgcgtggaagaggtcaatatcttgggggtcttgcaagaccatggggtgtgcggagcttgcgatggcccgcagcagcttggtttccatggtgaactttcattggccgctggtgcgcggcgaaactgaaatccaaagcgtgttgccaaggcgctcaagaagcgagagtccactctacgcgcatcgtgtggaaatgaatgtgtgaaaacgtatcttgattgttaacttcgaggatgcgccgggccctggccccggtgccacggggtgtgcggcaggggcctttgccaattcaccagcgcagcagtagtggcatgcccgcccaggtttacagcgcggcgtagaccaaagtggggaacagctcgcacagcatttccagctgccccggcgcctgcgtgagcaggatggcgaacaggtcttgcgccggatcgacgaagaagaacgtgccgcccatgccgctccagctgtagtgccccgcactgccgggccgcgtggcgccgcccgtggccaggcgcaccgctacacccagtccaaaaccgcagcctgcgggcaggatggtgcccgcgcgcggcagggtgccgaggtggtcggccgtcatgaaatccaccgtggcgctgctggccaggcgcacgctgccggtgggtgtgtgcaccgtgccgcgccccagcatcagttgcaggaagcgggcgtagtcggcagcggtggagaccaggcccccgccagcagattcaaacactgggggctcggccacgtcgatcagggtgacgccagcgccggtgagcgggtcgcgggcaaagggctcggccagccggtggcggctggaggcgggcacgctgaagccggtgtcctgcatgcccagcggctcaaaaacgcgccgctgcagcacctggcccagcggggcgccttcaatcacttcaatgatggcgcccagcacatcggtggcgcggctgtattcccagcaggtgccgggcgggtgcagcaggggcaggggggcgagtgcggccgccagttgctggttgctgtgcctgcgcgagcccacgcgggcgttgcggtactggtcggcaatggggccggtgtcccaggcgtagctcaggcctgccgtgtggcgcagcaggtcgtgcatggtggcttcgcgggcggcgggcgccagggtgccggtggcagcgtcgtacacctgctgccctttgaaggcgggaaggtaacgggacacggggtgcgccagcagcaggcgcccttcctccatcagcatcagcgccaccagcgaggcgatgggcttggtcatggagtagatgcgaaacaccgtgtctggcgccacggcgggaacggcgagccctggctgggctaggtttgcggggcgctgcaggcccacggcttcgtgcagcaccgtgcggccccggtgctgcaccagcgccacggcaccaggcaacaccccttgggtgaccagatcaagcaacactgtgcgcacgcgcgccagggcgaaagggttcatgggcaaggctccctcgggctggaaaatgccccattttgccgatgtggcggtgcggcacaaggctgcgcccaggttgcccctggctttgtgggtttgatgccaaaacgggctctagcgcccattcagcaagcgcagccagctattgttttgatagtgcttctgaggggcttgctggcgcggccggagggggcgccatctccagctgcatcatgatcatgttgaccagcgtctgcaccgtgggtcgaccggtttcgatcacgtaggtggctgcctcgcggtacagcgcatcgcgctgggcatacagctcgcgcagcttttgcagggggttgttcacctgcagcagggggcgggtgcggtcgtgcttcacgcgcttgaagatctcttcgggcgatgcccgcagatacagcacattgccaaagtcgcgcagcacctggcggttttccgggcgcagcacggcgccgccgccggtggacagcaccatgccgccgggccgcgccgtcacctttgccagcacctgggcctcgatgtcgcgaaaacgcgcttcgccttcggcttcaaaaaactggcggatgctggtcttcagcacctgttccagctggtggtccaggtcaatgaacggcaccccaagccgctgggccaggtgcctgcccacggtggatttgcccgagccgggcatgccgaccagtgcacagcgaatctgcataaatctcctgtcttgccccaacggaaccagggtccaagtttacggccccgggtggggtggcgggcccagcgcagcgggctgtgaaagccgccgcatggactggcgccgcccaaacaggtgcttacaagctttacggaacagccgctgcacaagccgcagagcctgtgtacctttaggccatcggggtaccgccatccatcgggcgccttacagcaaaggaaaaccatgcagaaaaacactgttctcaccgtacccgcaacccctgtggcaatgcccggcgctgccgccgctgctgccggcttcgcttctcccaagtggatgtgggtggccattggcagcctgggcgcttgcgtggtggccttggccaccgtgctggtggtagagcgccgcagcgcgccgcccaccgaagccgccatggcgcagaccacgcccgcagctctggctgcgcctgccgtggcgtcgtcgctgcaggctgcacctgtgggcacggcccctctggcaagcgccgccccgcagcgtggcgcagcaccagcccccgcctggccgcaaacgcccgccgcccgtggtgatgtggcccgccagcccgcaggcacacccgtggcgcagcgcgcggccagcatttgcagcacctgtggccgtgtggaatcggtccaggccatcgagcaggcagcgccggccaccggcgtgggtgccgtggccggtggcgtgctgggtgccgtggtgggcaaccagatcggcaagggcaacgggcgcaccgctgccacggtgctgggcgcggtgggtggcggctatgccggccacgagatcgaaaaacgcacccgcacccagaccacctaccaggtgcgcgtgcgcctggaagacggcagcagccgcgtcttcacccgctcgcaaccgcctgccgtgggcaccccggtggtgctgcaaggcaagggcttccgcgtggccgacgagggcaccctgccgcaggcgcagcagccccagccagcgccccagtaccagacggtttcgcagcccggctacgtggccatgcagcagtgagtgcgctggcgcggggttagaaaccggctgccgccttgcgcagatgtatgaaaaaagggagcccgtgggccaatgccgctcagttaagtctgagcggcatttttttgacgggatactgggtcttggtcatacgaacctcacgcggataccgcctgtgggatctgcgaggcggcagcacgaagcggcggatgttctttctcatggccgcaagcttggccgggatggccccaggggtgtgtgatcctgaactccacagccactcatccacgatgtagcgcagcgccgtgatgaagctgatgcgacagggctgcactttggcctcgtctgcgatgcgcgtgatctccaagcggatcaggttgtacatcaacaaggttgcccacagctcttgcttgaccccatcgggttgctggctgcgcaacgtcatcgcctggcccagcatgtccgtcttcatctctccataggccagctcaatctcccagcgttcgtggtacagcgcgaacacctcctcggccttgtagcgtgccggatccatcagggacgtgaacaaggttctgggtttgccatcgagttcacgggtgatggcgcgcacctcccacgtgagcggcaagccggggtctttcttgcgagcttggggcgagaccttcatgcgcaagctcacatcgccagggccatgcgtttgcaccacctcgcccctgagtccggcacgcgcagggatcagccagtgacgtccctggcggtgttgcagcggccacagcagacttgccgagtaaaaccctttgtccacaatcaccagcgagtcaggcggcaacttcggccacaagcgttcagccaatgcgtactcactggtgtcgtaggcatccaggctggcatctaccaataaacgagctctggcatcgagcaagcaggccatgcgcaccagggggaagggactttggtggtctgcgtggttgcgctggcaaccaaagtgctggcggttgtcttgtgtgtcgggggtacgccagaccacgccatccaatgcgtacagcgccaagccttgccagcggtggcgagcggcctgctggtgcgcccaatgggcagcagtgtggcgaaacagccattgcaggggctcactgcccagccgttggcgcgcctggctcagcgcgctggagctgatgggttcattgtgctgcccaggcagtgccagctccagtacctcggccacgttcacgatggagcggtctctaagcaaggccacacccaataccagccaaagtgcctgctccatgggcagtcgccgcttgcgcagcgtggctacacccgtcatctgcaaggcctgttcaatccactgctggggtatgttgctttgaacgacaccccattgttcggggctcgcaaactcatgggtatcgttcaggtactcttgcagcagcattggctatcgcttgacctctatggccaaagctcaattgatcaagcctgcactgtacaaacaacaaagaccccgaagggcctttgcttaacttactggcattggcccgtgggctccctttgtgtcgggcagcgttgccgccgcttatttctcgacgaaggcgcgctccaccacgaagtcgccgggcgtgctggtgttgccttcttcaaagtcgcgcttttccagcatgaccttcagatcagccagcatggcggggctgccgcacagcatcacgcggtcggtcagcgggtcgagcgggggcaggccgatgttggcgggga

SEQ ID NO: 1819 - DNA, 23135 bp, synthetic construct
  misc_feature 1..23135: note = Synthetic
  source 1..23135: mol_type = other DNA
  variation 14530..17402: note = n is a, c, g, or t
ggccggcctcatcgcctcctcgcccaacccgggcgagtaccgcatgctgcgcgacgtggtgctgcgccaggagccctacggcatcatgttccgcaagaacgatccgcagttcgaggcactggtggacgagaccgtcacccagctcatgaagagcggcgagatggagcgcctctacgcccgctggttcacccagccgattccgcccaacaacgtgaacctgaacttcccgatgacggacgccgtgcgcgaggcctaccgcaaccccagcaagaagggcgtgtgatggctggccacgacgcgatttcggcccgctacccgcagggcctgctgttcccggaggcggtgatgcgcgaggtgcgcggccgcttcctgcaggtggaccacgaccacgcggggcgcccgcggctgtatttcgacaacgcgggcggctccttccgcctgaaggcggcggtggagcgcttcgcgcagatcgacgccgtgcccgacaacaccgagcgcatccaccccgtcgcgcgcgagctgcaggccatccaggccacgggcaccgacgacctgcgcatgatgctcaatgccgagggcggcagcgtgcatgccgcgctcaccgcatcgggcgccatgttcgagatggtgcgtgccatcgcgctgaacgtgccgggcaccaacatggtcaccacggtgctggagcacccctcgtcctacgacgccatggagcgctatgcgcgcgagaccggccgcgaactgcgcgtggcgcccagcaatccggccacgggcggggtggacgtggacgccatcgtgcggctggtggacgaaggcacgacgctgctgaacgtgatctacgcctccaacatctccggcgccaagctggacctggagcgcatcgtggccgcggcccgcgccgtgaagcccgacctctacatcgtggtggatgccgtgcagcacgccccccacggcctgatcgacctgcagaagacgccggtggacggcatcaatctcgcgccctacaagttcttcggctgccggggatcgggcctggcctggctgtcggaccgcgcggccgcgctgccgcaccacaagctctcggccaagccggagggcttctgggacctgggcagttcctcgccctggcagttcgccgtggtgaccgagatcgccgactacgtctgctggctgggctgccaggccctgaaggaactgccggagctggccgccgtgctggacgcgggcgcggatgccggcgagccgccgcgccgggccctgttcgcggccggcatcgaacgcatcatgctgcacgagcgcggcctgctggcgcgcctgctggacggcgacggcgcggcccgccccggcctgcgcggcatgcccggcgtgcaggtgttcctggaccacccggacctcaccctgcgcgacctcatcatcgccatcggcatcgacggggtggactgcacccgggccgtgcacgaatacggcctgcgcggcgtgacggtctatgagcgcagcgtggcgagcctgtattcgcggcgcatgctcgaatccttcggcctcgccggcgcggtgcgcgtatcgccgctgcactgccatacggcacaggacgtggatgcgttcctgcgggtgacggaagacatcgtgcgggtgcatgcggcgctcgccacccgcgaggccgcggccctgtagcgcgcggccctacagcccgcagtccacgccccaggcgtggatgcgcaccacgtcgcaatccacctccgccgcgatgcggtcggccaccagccagaggccggcctgcagcgacagcagcgggtggtgccacacgccgggggccagttgcagcccctgccggccgtcggtgacgaaggcgcgcaggtgttccgggcccagcgcttcgggcgcgatgcccgcatcggccaccacggccaacagctgcagcgcggcgccgaagggcgcgaaggactggctgcccagccggtgccgctccatcagcgtgagccgcgcgggcagcgcggtggctgcggcatcgaacaggctgaaggccacggtgccggggccggcggcgaagggccgggccaggtcgtggtggcgcatgcagcggccgtcgttgatggggatctgccgggtgccgttgccgcccggtgcgatcacctggccgtagggcgcgaaggcttcggcggtgaggggccgcaccggcagcactactgccccgctcattgcaccgcgccgatgaagccggccagctccggggtgcgcggctgggcgaacaactccctggcgggcccgcattcatgcacgcggccctggtgcatgaacaccagctggtcgcccacgtcgcgggcgaagcgcatttcgtgggtgaccatgatgagcgtcatgccctcggtggccagttgcctgaccaccgccagcacctcgttgaccagctccgggtccagcgcggaggtgatctcgtcgcacagcagcaccttgggctgcatggccagggcgcgggcgatggccacgcgctgctgctggccgccgctgagctggtcggggtaggcgtcgtacttctcggccaggcccaccttggcgagcatctcgcgggccagctgccgggcctcggctttcttcgtgcccttgaccaccacgggcgaaagcgccacgttttcccccgccgtgaggtgcggaaacaggttgaactgctggaacaccatgcccacgttcagccgcagcgcgcgcagctgcgcgggcgtggcctgcgatcccttgagcacggcgtcatcgacgacgatctggccgtcgttgatcgactccagcccgttgatggaacgcagcagcgtgctcttgcccgagccgctgcggccgatgatggccacgacctggccgctttcgacgcgcagatcgacgcccttgagcacatggttgtcgccgtagtacttgtgcacggcgcagacgtcaacgagcggcatagagtttcttctccagatgggatgcacaggcggacagcggccagcacagcaggaagtagccggcggcgacgagcccgtagatgaggaagggctggaaggtggcgttggccagcatggagccgagcttggtgagatcctcgaagccgatgatcgaggccacggccgtgcccttgacgatctgcaccgagaaacccacggtgggcgcgacggccaggcgcacggcctgcggcagcaccacgtggcgcatctgctggaagtagcccatggcgaggctggacgacgcctcccactgcccgcgcgggatggcctgcacgcagccgcgccagacttcggccaggtaggcgctggtgtagagcgtgaggccgatggcggcggccgcccagggcgatacgtcgaagcccgccatggacgcaccgaagaacaccaggaacatctgcatgagcagcggcgtgttctggaacacctggatataggtgcggctcacgcgctgcaggccggggtgccggcccacgcgggcgaacagcaccaccaggccggccgcgccgcccagcgcgaaagccatgagcgacagcagcagggtggcccaaaggccttcggccagcttgagcaggatgggcagcaggggaatgtcggcgatcatgcggcgtctccggccggcgcgcggcgcgccacgatgacgtgctgcccgatccaggccagcgcctggcgcagcagcagggccagcgcgaagtagagcgccgtcaccacgatgtaggtctcgaacgcgcggaaattgcgcgactggatgaaattggcggcgaaggtcaggtcctgcgccgcgatctgcgacaccaccgaggtgcccagcatcacgatgacgatctggctgctgagcgcgggccacaccttctgcagcgcgggccgcagcaccacgtgccggaagcaggcccagcggcccatgcccagcgcgctcgcggcctccagctggccgcgcggcgtttcctggatgccggcccgcacgatctccgtgaggtaggcgcccaggttgaccacggtggtcagcaggcaggcctgccattcattgagctgcaggcccagcgacggcaggccgaagaacacgaacatcagctgcaccaggaagggcgtgttgcggatggcctccacatacagcttgaacagccagttcagcggcgcgatgcgccaggcgcggcagacgccgccggccacgccgatcacgccgcccagcacggcaccggccgccgtcagccccagcgtgaaggcggcgccctgcgccagctggccgctgtagtcgaagacggcgccgaagtcgaatgcatatgccatggaggaggtctcttccggtcaacgtggccctgtgcggacggtgcggtcccggccgcttacagcgtggcgggcagcggcatcttcatccagcgctgcgacatgtcgttcaggcggccgtcggacctggccttggtgatgatcgcgtccaccttccgcagcagcgcgtcctcgcccttggcgacacccacgtagcagggcgtgtcttccacggcgaacttggcatccagctggcgcagcctggtgcgctcgttcacggcgttggcgacgatgttgcccagcgtcaccagctgcacctggccggtgaggtagctctgcgccgtggcgttgttgtcttcatagcgcttgatggtggcagaggccggggccagcttggtgagcgacaggtcttcggtggagccgcgcgtcacgccgatggtcttgcctgccaggtcggcagggcccttgatggcggcctccttggggccatagacgctcttggggaagggcgcgtaggcctgggtgaaatcgatcaccttggcgcgctcggcgttcttgcccaggctggagatcaccaggtcggccttgccggtggtcaggtaggggatgcggttggtgctggtgacgggcaccagttcgaccttcacgcccagctccttggccaccaggttggccatgtcgatgtcgtagccctgcagcttcaggtcggtgcccagcgagccgaagggcgggaagtcctgcggaatggccacgcggaccacgccggccttctggatgttggccagcacgtcggcacgggcggacgccgcgccgcccagggctgcggccgcgaaggccgtggcggccagcagggcgtggagggcgccgcggcgggcggtcgaggggaaagtggcggtgcgggtcattggaaaactccttcagggaaagggggagaggggggaacgaggcgaaaggaagccggcgcgccggccgcgggggcctccggcgcatccatgtcgatgccgccgcggcgcgccgccgacagcaggtgggcgtgcatggcctgggcgctggccgcggcatcgcccgcgcgcagcgcctgcacgatcgcgccgtgctcgcgcgcgggctcgtcgtcggcacccgtgcgggcgaaaggcaggcgcaggctgtgggcgatggccggctccagctgccgcgccatggcgatcaggccggggttgcccgaccattgcgccagcagcaggtggaaatgcaggtccgcctcggcggcgctcagcaggtcgttgcgccgcagcgcttcggattgctgctgttgcagccactgcaactggtggtgcgcgcccgcgtcggcgcggccggcggccagggctgtccatccgggctccagcaccagccgcagctcgatcagctggcgcggcgagagggtgcccatctcgggcgtggcgaaggcgcggtgcgtgcgctcgccgctggcatgcgggccccgcaccatcacgccccggccgggcaggatgtccaccaggcccagcgtctccagcaccgacagcgcctcgcgcagcgaggcccggctgatgcccaggcgctgcgccagttcgcgctgcgcgggcagcgggctgccgctggcgtagtggccgctcaggatctgctgctgcagcgtctgcgcgacggaggagggaatgcggtgcatgggctcggtggatcggtggcctgacaggtcggaccagtgcccagccaaaagcgatttgcgtgccagtatcaaaaagaggagcaacccaccgagggtggataagttcgctggccggatcgtggaagaaacttgccggaacgcgcgggcatggtgcatctctgctccggcctgccgcgctgcctgcatttggtgcgctgcagcaccgcgcccgggatggagcgcacccggcgcctgcccataatccgcgtgtgatgacgaaggccgattccctcctttcccgccgctgcctgctggggcagggctgcgcgctggccggcgccctgctggccggttgcggaacgcccgcccataccgagcgcggcgaggtgcaggccgccgacatcgagcccaccgaactggcgcagtccgacgtgaaccgcatggccacgctgggcatgcgcgccaacctggacagcctctaccggctgatggacaagctctaccgccgcaacccggccgagtggcgcaagggccaggcaccggaccagctgccgggccgcatcctggccgcccagcgcgtgcgcgacgccatcgagcagcgccagccctgggcgccgctgcaggggcgccgcgacatcgccgcgctggcctactcgctcagccccgggttcacgggcgaccgggtggccgcggtcatccacgccacggccgacatgatcgtcaccgcccacggcggcaagacccgcttcttcctgatcgacgggctggatgcgcagcacctctacaacgccgcgcgcaacgtggaaatcgccgtctggctcatcgcccagcggcagggccccgacggccggccgctgctgctggccgacgagatcggcccggacgtgcgcaacgtgagcttcgagcgcgagttcggcaagatcatcgcgcggctcgacctgctggccggcgtggtggccgagaagtaccgccgcgccgccatcagctacgtgcagaacctggtgggcggcaccttcctgcagttcctgcccgtgcgctaggcgaagaggcctcccccggcggcgcaccgccgtccccgtttaaaatccgcccgccctccgaggagcgttgcagcggcccgtccgccggcgtcggtcacgaccgccgcgggtgcgccgtcaggctcggagcccgtgccgaagaatcgatgccaacgacgctcacctgtcctttcccaccgtccgcgcaggtgagccccatgtccgccccccattcccttcctcccatgaagctgtccggcctggagccggtttccatcggcgagggcacgctgttcgtcaacatcggcgagcgcaccaacgtgacgggctccaaggccttcgcgcgcatgatcctcaacggccagtacgaagaggccctggccgtggcgcgccagcaggtggagaacggcgcccaggtcatcgacatcaacatggacgaggccatgctcgacagcaaggccgccatggtgcgcttcctgcagctcatcgcctccgagcccgacatcgcccgcgtgcccatcatggtggactcctccaagtgggaggtgatcgaggccggcctgcgctgcatccagggcaagggcatcgtcaactccatcagcatgaaagagggcgtggagaagttcaagcacgaggcgcgcctcgtcaagcgctacggcgccgccgccgtggtcatggccttcgacgaggtggggcaggccgacacctacgcgcgcaagatcgagatctgcgagcgcgcctaccgcgtgctggtcgatgaagtcggcttcccgcccgaggacatcatcttcgaccccaacatcttcgcggtggccacgggcatcgaggagcacaacaactacgcggtggatttcatcgaggccacgcgctggatcaagcagaacctgccgggcgccaaggtgtcgggcggcgtctccaacgtgtccttcagcttccgcggcaacgacccggtgcgcgaggccatccacaccgtgttcctctaccacgccatcaaggccggcatggacatgggcatcgtcaacgccggcatggtgggcgtctatgacgacctggagcccaccttgcgcgagcgcgtggaagacgtggtgctcaaccgccgccccgacgcgggcgagcgcctggtcgagatcgccgagaccgccaagagcggcgccaaggacgagagcaggaagctcgaatggcgcaacgccccggtgcgcgagcggctcgcccatgcgctggtgcacggcatcaccgacttcatcgtggaggacacggaagaggcctaccgggagatcctggccgggggcggccgcccgctgcacgtgatcgaaggcccgctcatggacggcatgaacatcgtgggcgacctgttcggcgccggcaagatgttcctgccccaggtggtgaaaagcgcgcgcgtgatgaagtccgccgtggcccacctgatcccctacatcgaggaagaaaagcgccaggacgaactcgccggccgcgacgtgcgcagcaagggaaagatcgtcatcgccaccgtgaagggcgacgtgcacgacatcggcaagaacatcgtcaccgtggtcctgcagtgcaacaacttcgaggtggtgaacatgggcgtgatggtcccgtgccacgagatcctcgccagggccaaggtcgagggcgcggacatcgtgggcctgtcgggcctcatcacgcccagcctcgaagagatgcagtacgtggccggcgagatgcagaaggacgaccacttccgcgtccggaagatcccgctcctgatcggcggcgccacctgctcgcgcgtgcacaccgccgtcaagatcgcgccgcactacgaaggccccgtggtgtatgtgcccgacgcctcgcgcagcgtgagcgtggcgcagagcctgctgggcgacggcgcgcagagctacgtcgatgagctgaacgccgactacgacaaggtgcgccagcagcacgccaacaggaagcagacgccgatgtggccgctggccaaggcacgcgccaaccgcacgcccgtcaacttcagcacctaccagccgcagccgccccgcctgctgggccgccgcgtgttcaagaacttcgacctgggcgagctggccagatacatcgactggggccccttcttccagacctgggacctggccggcccgtaccccgccatcctcgacgacgaggtggtgggcgagcaggcccgccgcgtcttcgccgacggccaggccatgctcaggaagatcatcgaaggccgctggctcagcgcgagcggcgtgctggcgctctaccccgccaacagcgtgggcgacgacatcgagttctacaccgacgcatcgcgcaccgaagtcgccatgacctggtacggcctgcgccagcagaccgaaaagcaggtgatcgacggcgtgatgcgccccagccggtgcctggccgacttcgtcgcgcccaaggagagcggcatcgccgactacgccggccttttcgccgtgacggccggcctgggcgtggagaagaaggaacaggccttcatcgacgcgctggacgactactccgccatcatgctcaagggcctggccgaccgcctcgccgaagccttcgccgaatgcctgcaccagcgcgtgcgcaccgacctctggggctatgcggccggcgagcagctgaccaacgaagagatgatcgccgagaagtaccagggcatccgcccagcgcccggctaccccgcctgcccggaccacagcgccaagaccgacctcttccgcgtgctgcagtgcgaggagatcggcatgggcctgacggaaagcctggccatgacccccgccgccagcgtgagcggcttctacatcggccaccccgagagcacgtacttcaacgtcggcaagatcggggaggaccagctgcacgacatggccgagcggcgcgggatggacgagaaggtgctggagcggctgctggcgccgaatctctgatttgcgtcctgccccggaaaagacgaaggccccgcatgcggggccttccatttggtgcatctttcagcttgttagcgtccagagcgcatatcccagtgatctgagtgtttgcgaatctacccgaatccgctacaaacggcaaatagcagagcagagggggaacgcatgcagaaagaaaaaccgctggcctatcggctggcattggacctgggctccacgtcgctgggctgggccgtgcttcgtctgagcgcgccgggtgagccttcggccatcatcaaggccggcgtacgcatcttcagcgatggccgtaacccaaaggacggttcgtccctggcagtcacccgccgcgcggcacgtgcgatgcgaaggcggcgcgaccggctcctcaagcgcaaggcccgcatgctggccgcgctggagcggcatggtttctttccgcaggacgaggcagcccgcaaggcgctggaaaagctcaatccctacgagttgcgcgcccgagggctggagtccactctcaagccggaagaattcggccgcgcgctgttccacctgaaccagagacggggtttccagagcaaccgcaagaccgaccgcaaggacaacgacagcggtgcgctcaagcaggccatcggcacgttgcgggcacagatgcaggaatccggctgccgcacggtgggtgagtggttctggaaagcgcgcatggagcaaaagcccgaaggcgtgaaaggccagggcgtacgtgcccgctatcgcgaaaaccgctacaccaacgatgaaggcaagccgcgcatcgacaagcgctacgacctgtacgtggatcgtgccatggtggcgcaggagttcgatgcgctgtgggccgcgcaggcggccttcaaccccgtgctgttcaacgagaccgcccgcttcgaactgcgcgacaccctgctgcaccagcgcaagctgcgtcccgtccagcccggccgctgcacgctggtacccgacgagccccgcgccctgctggcgctacccagcacgcagcgcttccgcatctaccaggaggtcaacaatctgcgcctgctggagggtgaactgcgcgaagagccgctaaccctgacgcagcgcgaccagatcgtggcgctgctggagaagcaggcgaaagtgaccttcaccgcgatgcgcaaggcgctgggcttttcggctctcttcaacctggaagacgccaagcgcgatggcctcaaaggcaatgccacggcggcagcgctgggcaagaagcacttgttcggcccgcgttggacggacttcgatgcggccctgcaggacgagatcgtcacgcagctgatgaccgaggaaagcgagccgcgcctgatcgcctggctgcaggaacacacgggcgtggacgaggcgcgggcgcaggccatcgccaatgccggcctgccggaaggctacggcagtctgggacgcacggcactggcccgcatcgtgccggagctgcggcgcgacgtcatcacctacgacaaggccgtgcaggcggccggcttcgcgcaccatagcgacttgggtttcagcttcggccacggtgatgacgaggtggaatgcatcggcgaacgcaccattgcctctaccggagagatcaagccggtccccatcttcaggcaattgccgtactacgggcgggcgctgcagcgccatgtggccttcggcagcggcaaacccgaggacgcagaagaaaagcgctacggcaagatcgccaaccccaccgttcacatcggcctgaaccagatgcgcacggtggtcaacgcactgatccgtcgctatggccggccggccgaagtggtgatcgagctggcgcgcgatctcaagcagagccgcgagcagaagctggaagcgcagcagcggcaggcggacaaccagcgccgcaacgcgcgcatccgccgctccatcgccgaggtgctgggcatcagcgaggaacgggtgcgcgctctggacatccagaaatggatcctgtgggaagagctgagccgcgacgcggccgaccgccgctgtccctacagcggcgtgcagatcagcgcgaacatgctgctgggcgatcgcgtcgagatagagcacatcctgccgttctcggtgaccctggacgacagtctgaacaaccgcacggtggccctgcgcgaagccaatcgcatcaaacgcaaccgcacgccgtgggatgcccgcgcagacttcgaggcgcacggatggatctatgacggcatcctgcagcgtgccgagcggatgccgctgcgcaagcgctaccgcttcgcgcccgacggctatgaacgctggctgggcgaggacaaggacttcctggcccgtgcgctcaacgacacgcgctatctgtcgcgcgtggcggcggaatacctgcggctggtgtgccccggcagcgccacgcgggtgatcccaggccagatgacggcgctactgcgcggcaagttcggcctgaacgacgtgctgggcctggacggcgagaagaaccgcaacgaccaccgccaccatgcggtggatgcctgcgtgatcggcgtgaccgaccagcgcatgatgcagcgcttcgcccaggccaacgcgcaggcgcgtgaagatggtttgacacgcctcgtcgaagacatgccgctgccctggcccacctaccgcgcccacgtggagcgcgccgtgcgccacatctgggtcagccacaagcccgaccacggcttcgaaggcgccatgatggaggagaccagctacggcatcctgcgcgacggcagcatcaagcagcgccgcaaggtcgacggcagtgcggggcgcgagatcagcaacctgatccgcattgccgagccccgccaacccatgcgtcatggcgtcgatgccgaaggccggccgctgccctacaagggctatgtgggcggcagcaactactgtatcgagatcaccgtcaacgacgagggcaagtgggaagggcgggtgatctccaccttcgatgcgtatcgcatcgtgcgggaaggcggcctacagcagttgcggcatccaacccaaggccagaatgggcgggcattggccatgcggctggtgattggcgatagcgtgcggctggagacaggtgatgggaacctgcaaactttgcgcatcgcgaagatgtctgcggcgggacaggtcttcatgtcagaggtaaatcaagctaacgtggatgcccgcaacagaagcggcgatttgccctatgtctccaagatggctggttctttccaaaaagccagggcccgccaagtcaccatctctcccatcggcgaactccgcgatccgggtttcaagggctgacgcaccatggtcggccgcatcgtcgaaatcgcggacgacaggcggcacctttttgtgcatcgcggctttctcgtcgtgcgcgacaccgagggagagcgcaaggaactcggccagatccccctggacgacatcgccgccgtcatcgccaatgcccacggcctgagctacaccaacaacctgttggtggcactggccgaacgcggggcgcccttcgtgctctgcggagccaaccacaacgcggtcggcatgctgctgcccgtcgacggccaccatgtgcaggccaagcgcatcgaagcgcaactggccgccggactgccgctgctcaagcgcctctgggccaccgtagtcaaggccaagctggaacagcaggccgctgcgctggaagccgcaggcgccgccacggccccgctgctggccctggtgggcaaggtgcgcagcggtgaccccgagaacatcgaagggcagggggccaagcgctactggaacctgctgttcggtgcggatttccggcgcgaccaggatggcgacggcctgaatgcgctgctcaactacggctacaccgtgctgcgctccgccaccgcccgcgccgtggtggcggccggcctacaccccagcctgggcctgcaccacagcaacgatgccaatcccatgcggctggtggacgatctgatggagcccttccggccggtggtggacctcaaggtctggcaactgcatcgggtgggcgaagcccacgtcacgcccgagaccaagcgcgccctggtgcgtgtgctgtacgacgacatgcagaccctgcagggcgtgacgcccgtcatggtgtgcatgcagcgcatggcgacttcgttggcccaggtgtatctgggggaaaggctccggctggacctgcctctgcccgggctgccgctgtcgctggcagggaacttcgatcccgattgatgccgaccgacaggattgcaaaccatgctgacggggtaccgactgatgtggatggtggtgatgttcgatctgcccgtgatcaccaaggccgaacgcaaggcggccacggggtttcgcaatgccttgctggacgcgggcttccagatgagccagttcagcgtttacctgcgcttttgcaccagccaggcccaggtggacacgctctgcaggcaggtggaacaggccttgccgcccggcggcaaagtgcatatcttccagttcaccgacaagcagtacgaacgcgccatttccttccatggccgcagccggcaaccagcgcaaaaagcacccgaccagttcgatcttttctagccagacgccatgttttcctggaccgcaaaagcgaaaaaccccttgacgaatcaaggggttatcgcgatcagagtctagatcactgggatatgcgcactggccggaacnnnnnnnnnnnnnnnnnnnnnnnnnnnnnnnnnnnnnnnnnnnnnnnnnnnnnnnnnnnnnnnnnnnnnnnnnnnnnnnnnnnnnnnnnnnnnnnnnnnnnnnnnnnnnnnnnnnnnnnnnnnnnnnnnnnnnnnnnnnnnnnnnnnnnnnnnnnnnnnnnnnnnnnnnnnnnnnnnnnnnnnnnnnnnnnnnnnnnnnnnnnnnnnnnnnnnnnnnnnnnnnnnnnnnnnnnnnnnnnnnnnnnnnnnnnnnnnnnnnnnnnnnnnnnnnnnnnnnnnnnnnnnnnnnnnnnnnnnnnnnnnnnnnnnnnnnnnnnnnnnnnnnnnnnnnnnnnnnnnnnnnnnnnnnnnnnnnnnnnnnnnnnnnnnnnnnnnnnnnnnnnnnnnnnnnnnnnnnnnnnnnnnnnnnnnnnnnnnnnnnnnnnnnnnnnnnnnnnnnnnnnnnnnnnnnnnnnnnnnnnnnnnnnnnnnnnnnnnnnnnnnnnnnnnnnnnnnnnnnnnnnnnnnnnnnnnnnnnnnnnnnnnnnnnnnnnnnnnnnnnnnnnnnnnnnnnnnnnnnnnnnnnnnnnnnnnnnnnnnnnnnnnnnnnnnnnnnnnnnnnnnnnnnnnnnnnnnnnnnnnnnnnnnnnnnnnnnnnnnnnnnnnnnnnnnnnnnnnnnnnnnnnnnnnnnnnnnnnnnnnnnnnnnnnnnnnnnnnnnnnnnnnnnnnnnnnnnnnnnnnnnnnnnnnnnnnnnnnnnnnnnnnnnnnnnnnnnnnnnnnnnnnnnnnnnnnnnnnnnnnnnnnnnnnnnnnnnnnnnnnnnnnnnnnnnnnnnnnnnnnnnnnnnnnnnnnnnnnnnnnnnnnnnnnnnnnnnnnnnnnnnnnnnnnnnnnnnnnnnnnnnnnnnnnnnnnnnnnnnnnnnnnnnnnnnnnnnnnnnnnnnnnnnnnnnnnnnnnnnnnnnnnnnnnnnnnnnnnnnnnnnnnnnnnnnnnnnnnnnnnnnnnnnnnnnnnnnnnnnnnnnnnnnnnnnnnnnnnnnnnnnnnnnnnnnnnnnnnnnnnnnnnnnnnnnnnnnnnnnnnnnnnnnnnnnnnnnnnnnnnnnnnnnnnnnnnnnnnnnnnnnnnnnnnnnnnnnnnnnnnnnnnnnnnnnnnnnnnnnnnnnnnnnnnnnnnnnnnnnnnnnnnnnnnnnnnnnnnnnnnnnnnnnnnnnnnnnnnnnnnnnnnnnnnnnnnnnnnnnnnnnnnnnnnnnnnnnnnnnnnnnnnnnnnnnnnnnnnnnnnnnnnnnnnnnnnnnnnnnnnnnnnnnnnnnnnnnnnnnnnnnnnnnnnnnnnnnnnnnnnnnnnnnnnnnnnnnnnnnnnnnnnnnnnnnnnnnnnnnnnnnnnnnnnnnnnnnnnnnnnnnnnnnnnnnnnnnnnnnnnnnnnnnnnnnnnnnnnnnnnnnnnnnnnnnnnnnnnnnnnnnnnnnnnnnnnnnnnnnnnnnnnnnnnnnnnnnnnnnnnnnnnnnnnnnnnnnnnnnnnnnnnnnnnnnnnnnnnnnnnnnnnnnnnnnnnnnnnnnnnnnnnnnnnnnnnnnnnnnnnnnnnnnnnnnnnnnnnnnnnnnnnnnnnnnnnnnnnnnnnnnnnnnnnnnnnnnnnnnnnnnnnnnnnnnnnnnnnnnnnnnnnnnnnnnnnnnnnnnnnnnnnnnnnnnnnnnnnnnnnnnnnnnnnnnnnnnnnnnnnnnnnnnnnnnnnnnnnnnnnnnnnnnnnnnnnnnnnnnnnnnnnnnnnnnnnnnnnnnnnnnnnnnnnnnnnnnnnnnnnnnnnnnnnnnnnnnnnnnnnnnnnnnnnnnnnnnnnnnnnnnnnnnnnnnnnnnnnnnnnnnnnnnnnnnnnnnnnnnnnnnnnnnnnnnnnnnnnnnnnnnnnnnnnnnnnnnnnnnnnnnnnnnnnnnnnnnnnnnnnnnnnnnnnnnnnnnnnnnnnnnnnnnnnnnnnnnnnnnnnnnnnnnnnnnnnnnnnnnnnnnnnnnnnnnnnnnnnnnnnnnnnnnnnnnnnnnnnnnnnnnnnnnnnnnnnnnnnnnnnnnnnnnnnnnnnnnnnnnnnnnnnnnnnnnnnnnnnnnnnnnnnnnnnnnnnnnnnnnnnnnnnnnnnnnnnnnnnnnnnnnnnnnnnnnnnnnnnnnnnnnnnnnnnnnnnnnnnnnnnnnnnnnnnnnnnnnnnnnnnnnnnnnnnnnnnnnnnnnnnnnnnnnnnnnnnnnnnnnnnnnnnnnnnnnnnnnnnnnnnnnnnnnnnnnnnnnnnnnnnnnnnnnnnnnnnnnnnnnnnnnnnnnnnnnnnnnnnnnnnnnnnnnnnnnnnnnnnnnnnnnnnnnnnnnnnnnnnnnnnnnnnnnnnnnnnnnnnnnnnnnnnnnnnnnnnnnnnnnnnnnnnnnnnnnnnnnnnnnnnnnnnnnnnnnnnnnnnnnnnnnnnnnnnnnnnnnnnnnnnnnnnnnnnnnnnnnnnnnnnnnnnnnnnnnnnnnnnnnnnnnnnnnnnnnnnnnnnnnnnnnnnnnnnnnnnnnnnnnnnnnnnnnnnnnnnnnnnnnnnnnnnnnnnnnnnnnnnnnnnnnnnnnnnnnnnnnnnnnnnnnnnnnnnnnnnnnnnnnnnnnnnnnnnnnnnnnnnnnnnnnnnnnnnnnnnnnnnnnnnnnnnnnnnnnnnnnnnnnnnnnnnnnnnnnnnnnnnnnnnnnnnnnnnnnnnnnnnnnnnnnnnnnnnnnnnnnnnnnnnnnnnnnnnnnnnnnnnnnnnnnnnnnnnnnnnnnnnnnnnnnnnnnnnnnnnnnnnnnnnnnnnnnnnnnnnnnnnnnnnnnnnnnnnnnnnnnnnnnnnnnnnnnnnnnnnnnnnnnnnnnnnnnnnnnnnnnnnnnnnnnnnnnnnnnnntgtcagtctagatcactgggatatgcgcactggccgtgctcaccaacactgcgctggcccgtaaccgccgtgttacccaaacgtcactcccgcgcaatagtcggagagaagaatgcccagcctctccattcctctccccacgacatgacctcgcatccacggcccaccgtgccgtccctcctcggccgcttcctgctggccgcctgcacgctcgcgttcggcctgctgctggccggctgcggcggctccggctccgacgcctccaacggcttcatcgcccactgcggcaaccctgacacgcactgcgcgcccaagccctgagccgggcccgcgggcgctccggcgcctgtcctgccctgcgcctgccgcgacgccgcgcgcgcggtgcatgccccgtgcctttcttcgtacaacaaacactcctccaacatgaccgtcgattcctccaaacgcaagttcctctccggcgtgctcggcaccggagcggccgcggccacgctcacggccttcccgcccgccatccggcgcgcgctcgccatcgaggcgaacaacgccaccggcaccatccaggacgtgcagcacgtggtgctgctgatgatggaaaaccgctcgttcgacagctatttcggcaccttcaagggcgtgcgcggtttcggcgaccgcttcgccgtgcccacgccgaatggccgcaatgtcttctaccagacctacaccaagaccacgcccgccagcacctacgtgcccttccggctggacgaggcccagggcaacgcccagcgcgccggcagcacgccgcacacctgggtggattcgcaggcggcctgggaccatggccgcatgtcgcgctggcccgatgcgaaactgcccctctcgatgggctactacgagacggccgaggtctcgttccagcgcgccctggccgatgccttcacgctgtgcgaccactaccactgcggcatgcacacgggcaccatcgccaaccggctcttctactggacgggcaccaacggccccaacggcatcagcccgctcgacggctcccgcgtgcgcgtggcgggcctgaacaaccagttcaacggaggcaacgacgtcggcgcctccaccgaaggctggacgtggacgacctatgccgaccgcctggagaaggccggcgtgaagtggaaggtctaccagagcctgatcgacaacttcggctgcaacgagatgatgggctttcgccactggcgcgccgagatcgagaagatgcccgcggaccgcaagccgctctacgtggccaagaccgacatcacgcagccgcaggatctggccggccccacctacgacccggccatcgacgacgccctgagcccgctcgccaagggcttcggcaacaccatgccgcagggcttcctggagaccttccgcgaggacatccgccagggcaagctgccggcggtgtcgtggatcatcgcgccctcggtctatagcgagcaccccggcccgtcgagccccgcgcagggtggctggtacgtgcaggaagtgctggacgcgctcaccgccaatccggaggtgtggagcaagacggtgctgctcatcaactacgacgagaacgacggcttcttcgaccacctgccgtcgcccgccgtgccttcgcgcaacgccgacggcagcctggccggcgcctgcacgctgtccgccgccgacgtggccgtggaataccacgacttccagcccgccacctccagccagcctgcggccgacggcaagccctacggccccggcccgcgcgtgccgatgtgggtcgtctcgccctggagccgcggcggctgggtgaattcgcaggtgttcgaccacacctccacgctcatgttcctggagaagcgcttcggcgtggccgagccgcagatcagcgcctaccgccgcgcggtctgcggcgacctgaccagctgcttcaacttcgtcgacccgaacaccgaggccctgcccacgctggccggccgcaccagcaagacggccgtggacgcgcgcatcgccgcgcaggtgcgtgccgccaaactgccccaacccgccgcggccacggatgcggccctgccggtgcaggcgccgggcgtgcggccttcgcgcgcgctgccctatgaactgcacgccacggcccaggcgaatgccggcgcgggcacggtgacgctgctcttcgccaacacggccaagaccggcagccccgccgcggtgttccacgtctatgacaggaagcacctggacgcgatcccgcgccgctacgtggtcgaggccggcaagacgctgaacggcgtctggaacgtggcggccgacggcggcgcctacgacctgtgggtgctgggtcccaacggcttccaccgcgccttcgcgggcgacctcgcgcagcaggcctccgcaggcatgcccgaggtgcaggtctgctacgaactgtgcgacccgccgcaggtgcgcgtgaagctctacaaccgcggcaccgcggccatcggcttcaccgccgaggcccgcgcctaccgctcggacggcccctggacgcgcaccgtgcagcccggcgcggtggaggaactggcctgggccctgggcgacagcggcaactggtacgacttcaccgtgcgctgcagcgcggcccctgccttcgtgcgccgcttcgcgggccgcgtcgagacgggccggcattccgtgtccgatccggcgatggggcagggggcctgagccggagcggagcggtcaccgttgcgacgcgatgtccagcgatgcctccgccgccgatttcgcgctctccgccatggcgaacccgcccccgcgccgcttggccgtgtacatcgcctggtcggcccaatgcaccacctcggcgccgcgccgggagtgcgcgggggcgaaggcgatgccgatgctggtgcccacttcggccgccaggccgggctgcaggggaatgggctggcgcaccacctcgacgatggcggtggcgatgtgggacagcgtctgcgggtcgtcggtgcgcacgaggatcgcgaactcgtcgccgcccagccgggccagcgtgtcggacgagcggatgatcttctggatgcgggccgcggcttccttgagcaccacgtcgcccgcgtcatgcccgtaggtgtcgttgacggacttgaacttgtcgaggtccatcagcatcacagcgaagcccgtgcccgacctctgcagatcctgttcggcacgcagcagccgggcatcgaaagtgcggcggttggcgagcccggtgagcgcatccttctgcgccacgtcctccaggggcgtcaccacacggctggccaccaccttgaccgcgacgatggagatgaccgcgctcatcagcacgctgaaggcgaacagcgcctccagcttgagaaacggcgacatgaccggcgcgaagggcttggccaccacggcgctgacgggaagggggccggagtcgtccagcgtgatgaccttgacccggtagccggcgccgtcggggtcgctggcggagaaaggcctctggtccttggcgtgccggccgatgccgtccatggggatggacacgggcagggtactcgcgtggacgatgtagtgggcttcggcatcgtgggagaggaaagccatctgcagctgcgtcatgcgcgcgaactgctgggcgccggcgtgcgtgatccggaaggccaggtagatgtgcgccacgggcacgggtgcccgtaccgtcaccttgacccagttgtgcagcacgggcttgccgtcttccccgtccatggtgcgcatgttgcggctcgcttcgcggacgcttgccaccagcagctccagccggtggtccagcgccgcgtcccgctcgcgcaggaacccggacacggacgagcgcgcccgcagcgtgccgtccaggtccgtgagcacgatcagttcggcgccggtccgcgccagctggttgtagagcgccgactccaccgtgtcccggttggtctcgttgaagatgatgttctgcaggccgtagtcccgggagatcagctcggaggccacccgccgggattcgcgccgcatcgcggccgtgtactcgaaggtctgcgcgcccgcctccagtgcggcatccacgctgttcatggcgatccgccggttggaaaaatgcaggaagacgaaggccaccacctgggcggcgatcatcgtcagtgcaagcagggccaggaagcggcccgtcgaatcggatggcaggaaatccctcttcatgcgtgctcttcttgtgcaatgcgcgggcaagcgcgttccctcggcagggcgggtgcccgccgatggtgccctgcctgatctctttctattcccctgcgccccataatgcccgcctttggcccatccgtgcaatggcctgcggttatcccggcggtggggaatggcatagggagggccggtgtcccccctgcgggtgtgcaatggcgaagtgctccgacacccggcggctcgacgatgcgttgcaatggccgcatgccgtccccgttcctcacccgctgcctggagggcgccaagcgcgtcatccagcccatcatgccgctcgtgcgggccgtcaatctctggctcgacgccgacggcctgcggatgagcgcggccatgtcgttctacggcatgctgagcctggcgcctttgctgctgctgctggtgggggtgctgggctggtggatcgacaagtcctacctcgaaaccaacctgatcgcccaggtgcagtccgtgatgggcgagcgcggcgcggaggtcgtgaagctcgcactgtccagcgcccgggagccctccgaaggccggctggcctccatcgcgggcttcgtgctgctgctgtcgggcgcgaccggggtgttcgtggaactgcaatccgccctggagcggctctggacgtccggccacccccccgcgaccgacaacaaggcctggtggcgcatggcctcgctgcggctgcgcggcctggcgtacgtgctggccatcggtttcctgctgctgatctcgctggtcgtctccacggcgatccacgtggtggccaactgggcgagcgcgcgcctgcccttcgcctccgggcccctcctgcaactggtcaacgaactggtcgccttcggcatcgcggtgctgctgttcgtggggctgatgcgcatcgggaccgggcccaagccgccgatggcctgcctggtgttcggcgccgtggtgggggcgatcctgttcacggtgggaaaacaactgctggcactctacctggccacggcggccgtggtgtcggcctacggggccgcgggctcgctcgtcgtgctgctcatgtggatctatttctcgtcggcggtgctgctgttctccgccagctgcgcccgtgccctgcaggaagcgcgggccgagcatatggggcagcgtgtggacgccgcccatgccgagaacgtgcccgcctccacctcgccgaagccaccggcacccgccgcggcggccggcgcgcgctgaacacgggccggccgccggcggtcagcgcgccgccggccgcagcgtgtccggggaaaggcgaaggacccgcgccagttccagcgcgttgcggggcgcatggagcttggccgtgttgtcgaagaagcagaacacgtcccgaccgcccgcgggcggtgcgggcgctcctgcggcagggccggccagtgcgacgtcgcgcggcgccgcgccccggtgccatgcccggatgcggcgggcccatgcggcgatccggtcgtcgctgtagccgctgacgtacagcgcttcggcgcc

SEQ ID NO: 1820 - DNA, 23126 bp, synthetic construct
  source 1..23126: mol_type = other DNA
  misc_feature 1..23126: note = Synthetic
cgacggctctcccggcagtgtggtacgttgcaggcatcgtgatcagggccctttggggggcctgatcgccgctcaccctggaagccaccgcgtgtggccgtgaccttcgccggtctttctcctctccttcatcaccatgtctgcaactcaaacctcttccgttgccgatcgcaaggatctggccgctctggccgccacccacgccaagtgccgtttctgcggtacccagctgcgtcacactgtggccaacctgggcatgtcgcccatggccaatgccatccgcaagccggaagacctcaacaagatggagccgttcttcccgctgcacgcctacgtctgcagcaactgcttcctggtgcagctggaggagttccagagcggtgaggccatcttctcggactacgcctacttctcgtcctacgtgcaggccatgctggaccacggcaagcgctacgccgacgagatgaccgagcgcttcaagttgggcgctcacagcaaggtggtcgagatcgccgccaacgacggctatctgctgcgctggttcctgcccaagggcgtgcccgtgttgggtgtggagcccgcggccaacgtggccgaggaaggccgcaagctgggcatccccatggaagtgatgttctttggccgtgaaagcgcccgcaagctgcgcgacatgggccatgccgccgacctgatggccgcgaacaacgtggtggcccacgtgcccgacctcaacgacttcgtggcgggcttctccatcctgctcaagccgcagggcgtggccaccttcgagttccaccacgtgctgaacctgctgcagaagaaccagttcgacaacatctatcacgagcacttctgctaccactccttcctcaccttcagccgcatcctggcccaccacggcctgtcggtcttcgatgtggaagagatccccaaccacgggggctcgctgcgggtgtactgccagcctgccaagaccggcaaccagcccgtcagcccgcgtgtggccgagatggaggcccgcgagcgtgccgccggcctggatacgctggagccgtacctggccctggaagagcgcatccgcgccagcaagcgaagcctgctgcgcttcgtgctggatgcccatcagcagggcaagcgcatcgccgcctacggtgcgcccgccaaggccgccacgctgctcaactatgccggtgtacgttccgactacatcgaatacacggtcgaccgcaacccgcacaagcagaaccacttcctgccgggcacgcagatccccatctacggccccgagcgcatcctcgagaccaagcccgactacctggtcatcctggcctggaacctgaaggacgaggtgatgaagcagatgagcgccatccgcgaatggggcggccgcttcgtcatcctggtgcccgaagtccagatctacgactgaccgtcggcagggcaggccgcacaagggcctgcccgccacccgggcatcccgtcttctatccagatccatatccccgtcaccatgacccaagccatcgtcgttgaatcggctgctgccctggcccgccaggccgaagggcagggcgctgccatgcacgccttctgcacgcagctctaccccatgctgcgcagcatcaccgggcagggcgtgcgtgacacgctggccgccatcggtcagcacatcccgctcaccgtgaccgaagtgcccaccggcacgaagatcttcgactgggaagtgccggccgagtggcaggtgcggggcgcctggatcaaggggccggacgggaagaagatcgtcgacattgccgagcacaatctgcacctggtcaactacagcgctccgttccggggcacgctgtcgctagaagagctgcgcccgcacctcttctcgctgcccgaccggccggactggattccctaccgcacgcagtacttcaagcgggactggggcttctgcctgaccgaccgccagctgcagtcgctccagccgggcaactacgaagtgtgcgtggacaccgacttggtgcagggttcgctcaccttcggggaatgcgtgctgcccggcgagagcgccgatgaagtgctcgtctccacccacgtctgccacccctcgctggccaacgacaacctgtcgggcatctccaccgccacctggctggcgaagacgctggccgcactgcccaagcgccgctacacctatcgcttcgtgttcatcccggccaccatcggcgccattgcctggctgtcgcagcgacaggacgtgacgaagcgcgtggtgcacggcgtggtcatctccggcgtgggcgatgccggcgactaccactacaagcgcagccgccggggcgatgccgagatcgaccgcatcatggcgctggtgctggccgaaagccgtgaaaagcaccacctgctgcccttcatgccctatggctatgatgagcggcagttctgctcgcccggcttcaatctgcccatgggctgcttctcacgttccacctacggcagctacccgcagtaccatacttcggctgacaacctggacttcatccgtcccgagcacttggagcgatcgctgggcctgctgctggcagcgttcggcatcgtcgagcgcaacctcagcttcaacaacctcagccccttcggtgagccccagctgggccggcgtggcctgtactcgctcatcggcggccacaatgaagggcagaaactgcagctggcgcttctgtgggtgctgaaccagtccgacggcagcaagagcctcctggacattgccgagatggccgagctgcccttcgatctggtccatcaggccgccgaggcgcttctgcgcaaccagctgctggaagtcgttgtaaggtagccgcagatttctttgtttcgttgcggtcggtgccgtaatgttcagaatacgctccgacttccctatctcatcgccggtcgacatcccatgaacagtacccagaagccgaacgttcccggcatggtggaacgcacctgcttcgacaagtccgcagccctgcgcaagaaggtccacgacaccattccgggtggcgcgcacacctacgccaagggcgatgaccagtatcccgagcgctcacccggcttcatcgagcgcggcaagggctgccacatctgggacgtggacggcaacgaattcatcgaatacggcatgggcctgcgcgccgtcaccctcggccacgcctatccgtccgtcatcgaggctgcctaccggcagatgcagctgggcaacaacttcaaccgcccagcccccatcgagctggaatgcgcccagatgctgcagtcgctggtgcccagcgccgagatggtcaagtttgccaaggacggctccacggtgctgaccgccgcgctgaagctggcccgcgcctacacaggccgtgacctggtggccatctgcagcaacagccccttcttctcgtacaacgactggttcatcggcaccaccgccatggacggcggcgtctcgcgcgttgaagtcgaactcaccgtcaagttcaattacaacgacatcgacagcctgcagaagctcttcgaccagtacccgaaccgcatcgccatggtgctgctggagccggcccgtaccgaagagcccaaggacggcttcctgcagaaggtcatcgacctggcgcaccgcaacggtgccctggtcacgctggacgagaccatcagcggcttccgcttccaccagggcggcgcccagacgctgtatggcgtcaagcccgacatgtcgtgcttcggcaaggcgctggccaacggcttctcgctgtcggcactcaccggcaagcgcgaagtgatggaactgggcggcctctaccacgacaaggcgcgcgtcttcctgctctccaccacccacggtgccgaaggccccagcctggcggctgccatcgagaccatgcgcatctaccgtgatgagccggtcatcgagcacctctaccacgtgggcgagcgcctgcgtgccggcatcgagcaggtcacggccgctctgggcgtcagcgaatacctgtccgtggccggccggggatgcaacctgctctattccacgcacgatcacgagcacaagccctcgcagccgttccgcaccctgttcatgcaggaactcatccgctggggcgtgctggcgcccagcttcatcgtcagctactcgcacagcgaggctgacatcgactacaccatcgaggccttcagccgggccgccaaggtctacaagaaagccctggaagccggcagcaccgatggcctgctcatcggcgcacccaccaaggtggtctaccgccgctacaactgatgtccgtgcccatgcgtcatccccgatgacgcatgaacgacaaggcccggcctgccatgcagtgccgggcctttcgtttgccgggcctttcgtttttcagacttgccggaatgtcctggccgaagcggtctgcagatcattcgcagaccgtcgggcccaggccagttcctcttctgaatagccggcggcagatgcttccgtgtggcgtcctgaagccggttgttgatcgatgagcccgcgcagcgcaacaaaaaaggggcggtatgtccgccccttcatgtcacgcaacggttgtccggatgcttaccaggacttccagggcgccttgcccgaagcccacagctcttccagcacgtgcttgtcgcgcagcgtgtccatcggctgccagaagccagtatggcgccaggcttccagctggccatcggccgacagcgaacgcatcggctcctgctcgaacaccgaatcgtcaccgtggatgcggtccagcaccttgcgatccagcacgaagaagccgccgttgatccaggcgccgtcgccctgcggtttctccatgaacgaatcgaccagcgtctggtcggcctgcagactgaacgccccgaagcggcccggaggctgaacggccgtcaccgtcgcttccttgccgtgcttgcggtggaactcgatggaggcggtgatgttgacgttgctcacgccatcaccatacgtgcaaaggaaggtgtcacccttcacatacttggcagcccgcttgatgcggccgcccgtcatcgaatcctgacccgtctcgaccagcgtcaccgaccacggctcggactcgttgcggtggatctgcatctcgttcgtgcccaggttgaacgtcacatccgcacgcgagatggcgtattcgtggaaatactgcttgatgatgtggctcttgtagccgcagcagatcacgaagtcattgatgccgtgcgaggcatagatcttcatgatgtgccagagaatgggctgcccgccgatctcgaccatcggcttggggcgtaccgcgctttcttcgctgatccgggtgccgaagccgccggcaagaatgaccgcttgcatggtgagcgtagtcctcgtttgtcgatgcaagtgacatggtcgcccgacactgaaagggcgtcaaccaaaagcgacacacttccgccggaatgcagccaagaagcgatgaaatgcgttctcagtccagaagcgccgtggcaaattcgcgcgcgctgaacgcctgcaggtcctccacgccttcgcccacgccgatgaaatacaccggcagcgggttgtctcgccgcgtgtgtgccagggccgcaatggcgccgcccttggccgtcccgtccagcttcgtcaccaccagacccgtcagctgcaccgcctcgtcaaaggcctgcacctgcgccagcatgttctggccggtattgccgtccagcaccagcagcacctcgtgcggcgcaccgtccatggccttgccgatcacccgacggatcttcttcaactcgtccatcaggtggcgctgcgtgggcagccggccggccgtgtccaccatcaccacgtccaccttgcgggcctgcccggccttgatcgcatcgaaagccaccgcggccggatcgccgccctcgttggcaatcacgtgaacctggttgcgctcgccccagcgcgccagctgctcgcgcgccgccgcccggaatgtgtcacccgccgccagcagcaccgattggtcgatctggtgcagatggcgcgccagcttgccgatcgatgtcgtcttgccggccccgttcaccccggtgatcatcatcaccaacggatcggcccggtccacgtcgatgggcttttccagcggcgaaagaagctccgtcaggatgtcgatcagcgccgtcttcagcgttgccgcatcgttgattcggtcgcgctgcgcccgatcgcgcagctcgtccagcagccacgtcgtcgtgccatagcccgtgtcgctggccagcagcgccgtctccagctcctcatacagcgtctcgtcgatccggttgcgactgaagatgctgcccagctgcgagcgcgtgcgcgccagccccccgcgcagccgcgcgaaccagccggctcgcgccggccgcaccgcctccggcatcgcctgtgtgggcggcacgatctcgctttcgccatagaccgtggcctcaccggcagccggcgcaccagcatcctcggacactgccggaacggacgccgccgcttccggtgctggcacggccacctctggtgcgggggattctgcctccggtgcagacaccacggcgtctggcgcgggtgcctcccccaccggctcggcttgcacctggggcaccacagcctcgagcggggcaggggcttccttcgggacagccgtttccttcagggcgggggccacctcgaccggcacgtcctgcgcctgcagcgcttcaggtgcctgtgtagcgcccgctggctcaccgccttcggctgacgccccagccggctcggcagcagcctcatcagtggcggcaaactcggccgcagcagcctgggctgcggctgcatcttccttctctttcttcttgcgacggaaaaaaccgaacatgtcgtgcgtcctgtgtgagtctgctgcggtgtgtgttgctgcaattctagagcctgtccgtcccgctggcctgccggatatcggcacccaggaacaaagcgggcccatgggcagagccggtaaactaacggcttcgttccgagtacccctccatgtcctcccgcattcgcatcatcggcggccaatggaagcgccgcctgctgcccgtgcccgactcgccgagcctgcggcccacccccgaccgggtgcgcgagaccctgttcaactggctgggccaggacctttccggctggcattgccttgatctcttcgctggctccggtgctctgggcttcgaggccgcctcgcgcggtgccgctcgcgtgctgatggtcgaacagaactccgccatcgcccgtggcctggccgccagcgtccagcagcttggggcgggggcctgcatcgaggtcatccgcgccgatgccgcccgctggcttgaccagcggccgcccatgctgcaggatttgatcctgctggacccccccttccgggccggctggctgccgcgcatcctgcccgccgtcctgccctggctggcgccctacggcctcgtctacgtcgaagccgatcacgccatcaccgacgactggctggcccagcagggctgcaacagcctggccgtcatccgcgccggcaaggccggacaggtccattatcagctgcttacttccgaaccatgtccctcgtcgtctaccccggaaccttcgacccgctgaccctgggtcaccaggatgtcgtgaaccgcgtcgccgcccatcacgaatccgtcgtcgttgccatctccgacagccgctccaataccctgttcaccatggccgagcgcgtcgacatggccaaggccatcctggtggggctgcccaacgtgcgcgtcatgtccttctccgggcttgtcaccgacttcgctcgcgacatcggcgccaacctcatcgtgcgcggcctgcgtgacgccagcgacttcgactacgaacgccgcatggccagcctcaaccgcatcctgcagcccaccatcgacacccacttcatcatccccgacgaccgcttccagtccatcaccggaaccctggtgcgggaaatcgccatgatgggcggcgacgtgcgcgccttcgtcaaccctgtggtgcttgccgccctgcaggaaaaatacctcaagcgccagcaggaaccgcgcaaggagagccgctgacatggccctcatcatcaccgacgagtgcatcaactgcgactgctgcgaacccgaatgccccaacgaagccatctccatggggcccgagtactacatcatcgaccccaaccgctgcaccgaatgcgtcggccacttcgatgaaccccagtgcgcccagatctgtcccgtcgagtgcatccccatcaacttcgacctcaacgagagccgcgaacagctccacgccaaatacctgcgcctgcaggaagaaaaagaggcgctcaaaggcaccgtcctgagcggcaccgatggccagcccggacggatgcctgccgacaacccggtcagcggttgatcagcgtgctcttgccaaacaggctctccaccagatccaccaccagctctgccgtctgattgcggatatccagcgccggattcagctccacgatatccagcgacgccagccggcccgtgtccgcaatcatctccatgcacagctgcgcctcgcggtacgtcggcccgccgcgcaccgccgtccccgtccccggcgcaatttccggatccagaaaatccacatcgaagctcacgtgcagatgcgtgtccgcatccacatcggccagcgcgcggtgcatcacctcgcgcatccccagctcatcgatcgcacgcatgtcgaacgcccgcagccccagctgacggatcatccgcttctcgtgctcatccaccgaccgcagccccacctgacagaaatgctccgctgacagcgccggcgtctgccccgaaagcccgatcagcggctgcggccccagacccagcagattggccaccggaatcccgtgaatattgccactgggagaaatatccggcgtattgcagtccgaatgcgcatccagccacagcacccgcagcttgcgccccgactcgcggcaatgacgcgccaccgcactgagcgaacccgccgccagatggtgatcaccccccaacatgatcggcgtgcgctcttcctgcagctgcgccagcaccgcatcgtgcaccgcctgcgtccagaaaaccgcctccggcagattgcgcagccccgccgccttcggatcacgcccgccgcgcggattcaccggccccgccagattgcccgtatccaccacatccacccccagcgcccgcagcgccgccggcagctgcgccacccgcaacgcatccggccccatcgccgcccccagacggctggctcccacgtccgtgggggctccgatgagcgaaacccggtgggtggggggaggggtgagggaagaatccgtggtgggggtgaggggtgtgggcatggtgccttcctgggtttcagagacggaagggaacatagcacggatgggggcgtaagcgttccggttgggcggcttatgggcgataagcgcgctgatgggaacgcttattcctgttgagcgcatggctgctctcagcgtggcctgagcgaaaggcgactacagacgtagcggtggcgggagggcaaaggggctggcggcgactcttgcacgcatcggcagagtccaggccctcatggggcgccgtgcgcggaggagggggcgggaaacatgtaaagcgttgcccgaaaaagacgaaagccccatgtaggggctttccattttgtgcatttagccaaaaaagcatcagcttgttagcggccagagcacatctcccagtggtccaggaaggctgcattctaccatatttttcgcacagtaccatgcttccgataggcggctgaccccaggggatggatgataggtccgataacggagattaggccttggtgttgtaatgccgtcttgcatatggtgaatttgttgtctctaccttatctttgaaagcacgcatcctggggcaggaaagattgggtttggctggaaaataatcaagatatgaaggagtcgtcatgaggtaccgtctggcactagacttgggaacttcatcgttgggatgggcagtacttcgcttgaatgaggcgaagcaacctgtggctattgttaggtctggtgtccggatcttcagcgatgggcggcatgcaaaagatggtagttcgttggcagttcagcgcaggaatgcacgcgcaatgcggaggcggcgcgatagattgatcaggcgcaagaggcgcatgatgcagatgctgatcgaacatggcttctttcctgcttccaagacagaaagaaaggctctggagagacgttacccggatccttatgccctgcgtgcgaaggggctggatgaagcattgcctccagaggcatttgctcggttgttatttcatctaaaccagcgtaggggattcaagagtaaccgaaggacagacaaggcagacgctgaaggaagtgttcttaagaacgctatcggatcggtgcatcgagagcttgatgagcgaggcatgcgaaccgtaggtgagttgctctactacaggttggcggagcagcgtcgatcgacgcctggtcacgagaagggaatccgcgcacgttatcgagagacaaaaattgttgatagtgatgggaagaaccgtataaataaaagttatgatatatacattgatcggcagatggttgctgatgaattcgatcggatttgggaggtgcaggcttcgtttgatcctgatttgttcaatgagcgagctcgccaggatcttagggggactctactttatcaacgagacctgcgtcctgttgtccctggtcggtgtgtattgttgccgagcgagagccgtgcgcctttggctcttccaatttgccagcgttttcggatatatcaggaggtgaacaatcttcgagtacaagacgagtttcttcgagaggttccgttgaccttggagcaacggaatatggtagtggaggctctggaaaaatatagtaagcgtagcttcgaccaactaaggacattgctacagctgagtggaaactcacagttcaatctagaagacgtcaaacgccgtgagctgaagggaaatgccacaacagctattctttccggaaagaaatattttggaaaagattggcatgaatttagtcacgaaatgcaagatgaaattgtagagaagctttgtactgaagagagcgaaactcatctggttaagtggttagttgagagagctcatattgacgagagtcgagcgcgcgaagtggctaatgtcactttacccgatggatacggtagcctgagccatgctgctttgaagcggcttgtacctgtcctgaaagcatcggtttgctcctatagcgatgcagtacgtgaagcaggacttggtcatcatagtcagttcgaattttcttatgaagcagatgaggttgaggattgggttaatccagagaccggcgaagtaagtgttgctttcaagaggcttccatattatgcaaaagcacttcgacgtcatgtggcttttgggacgggagagccaggtgatcctgatgaaaagcgctacgggaagatagccaacccaactgttcatattggtctaaatcagttgcgagttgttgttaatgcgcttatggatcgttatggacgtccgtctgaggtggttgtagagctggcgcgtgatttgaaggaaagcaagaagcgccgcgcagagataattaatcagcaagcggataggcagaaaaaaaatgaggagattcgtaagaagattgcggatgcaaggggatgcagagaagacgaaataaagcgctgggaaattgaaaaatggattctatgggaggagctgagcaggaatccggctactcgttgctgcccctatagtggtgagcaaattggagttgagatgttgctttcaaatgaggttgagatcgagcatatcctgcccttctcaaggacgctagatgacagcctcaataacaagacggtgtgcacagttgctgcaaatcgagtcaaaggtaatcgaacgccttgggaggctagagatgactttgcgttaagagggtgggattactccggcattttggcgagggctagacagatgccatcaaagtcgaagatttctcgatttgctgaagatggttatgagaagtggaaaggtgaaggagaggggttcctggcgcgggcactcaatgatacgaggtaccttagtcgggttgccaaggcttatatgcagttggtatgtccgggtagcggtgttcgtgtcattccaggccggatgacagcaattctgcggcgccacttgggattggatgagcttttgagcgacagtggagttaagaatcgctttgatcaccgtcatcatgctgtggatgcttgtgtaataggagtgactgaccaaggtcttctgcagagatttgctaatgcaagtgcgcaggccagggaggaagggcttcggaaacttgtcaaggacttttctcctccatggccaacctaccgtgagcatgtgaagcgagctattgatagtttatgggtaagtcatcgtcctgatcacggctatcagggggctttcatgcaggaggaagcatatggtttttctcaagatggaaaggttaagaaaaaagccaaaggggaagattcaagagaggtaaagaacctgataaagatttctgactcgaaacagtctgaaaggcatggcgtaaatccagatggttcgccaaggccttacaaaggttatattggtggtagtaattattgcatagagatttttagaaatgatgaagagggctgggggggtgatgtaatttctcggtttgaggcgtatcaaatcatcagaaatgcaggtggtgagaaagagggggttgaaaaactacgaaacccatcacgtgcgcagaatggaaagcctttggtgatgcgcttgatgattgatgattcgcttagactcgagttgagtggggggcttgtaacgatgcgcgtagtgcgaatttctcagaatggacaggtttttatggcgccgttgaatgaagctaatgtcgatgctagagatcgtgacaaaggcgatcctttcaaactagtttcgagaaaacctggtacgctgtgggctctgaaagcgcgccaggttacggtgtcgccaattggtgagctgagggatcccgggttctcggggtaacacacagtgattggccgtatcgtcgaaatagcagatgaccggcgacatctgtctgtcaggcgtggcttcttggcggtacatgtcacgggggaagagcggcgcttggcgggacaggtgccgctggatgacatcggggcgctgatagccaatgcacatggcatcagctacaccaacaatctgcttgtcgctttggcggagcgtggctgtcctttcgtgctgtgcggagccaatcacaatgcggtcggcatgcttctgccagtcgagggacaccatgttcaggccaagcgcatggaggcacagatcttggccagcctgccaacccataaacgactatgggcggctatcgtcaaagccaagcttcagcagcaggctgcggtcctagcggctctgggggcgccttgcgcaccgctggattcgctggttcggaaagtgcgcagtggggaccccgacaacatggaggctcaaggtgctaggcgttactggggattgttgtttggtgacgacttcaggcgggatcagacggctggcggtatcaatgcactgttgaactatggctataccgtgctgcgtgcaaccaccgcgcgttccgtagtggcggctgggctgcatcccagtattggcttgcatcatagcaatgatgcaaatgccatgcgtctggttgatgatttgatggagccgttccgacctatggtggacttccaggtcaaacaactggcccagcagggcaagacggaggtcaatgacgagactaagcgatctctcgcactggtcatgttccaggacatgcagacggctgcgggcgctacgccagtcatggtgtgtacccagaaacttgccgtgtcattggctcaggtctatctgggggagcgccaggggttggagctaccccttcgcagcctgccactggacttctctgccatgcgttcaagcgacggttgaaatgctttcgggatacaggttgatgtggctgttggtgatgttcgatcttcctgtagtgttgaaggcggagcgcaaggcggcgaccgagttcaggaacaagctcctcgacatggggttcgagatgagtcagttcagcgtctacatgcgattctgtagcagtcagaccgttgtggagacctactgtcggcgcgttcaggagtgtctgccacctggtggcaaggtcagcatcctgcagctgaccgataaacaatacgagagaatactgaccttccatcgggggagcgttcaaccagcaggaaaagcccctgatcagtttgcattgttttaatttctgccactgtgggatgttgcgtggtggatgaatatgtgtcgatgtagtgagacaatacctcgcttctccttcccctctcgtactcgtttcatgtcggtttcaggcaacaaaaaacccgagaacttagctttcaaaagacgcttggaacgagcccaatgcgttcaagagaaagctgaaattttcgggtctttatcaggaatagtcctgaagtttcaacgggttagcgcggttggattctagatcactgggagatgtgcgctgtccggaacttgcgtcaatcaacggcaaaaccggccggaattctagatcactgggagatgtgcgctgtccggaacttttcaaaccatcggatgcggtatggtctaattctagatcactgggagatgtgcgctgtccggaacgaggagcctgataccgttccggagccaaggattctagatcactgggagatgtgcgctgtccggaacgatgatggcagcctcagaaatgaccttctgattctagatcactgggagatgtgcgttgtccggaaccgctgggtcagtttgcctgccatgctggtcattctagatcactgggagatgtgcgctgtccggaacaaggctggcggtcgagtatgggacaaggtgattctagatcactgggagatgtgcgctgtccggaactcgtccattgattgccatccgcatcgaatgattctagatcactgggagatgtacggcctagagtgcagggtctattctcctcgaaggattcaatcatcatctgaaagcgcccattggtctgaacgcgaatggcaacgtagcctttagatacatcgtgtttggcatgcccatgcacttatccagcaaggcccaacctacctcaccccctcaaacctcaaataaaactcccgcacactcaggttttccggcgtgggttcgccgctgatgctggtcaggtagtcggcggcgtagcgtcgggtggcggcgtcgaagctgccgttcagcggaacggggtagccctggcggcgcagaacgcgctgcatggccatgaccttgtcggtgatggtcagtgcggggccccggttgtgggcaggggtggtgtcatcggtcttgtctggctgcttgcgtgttgcaggcgccggggtctggttgtcgtccggggtctctgtttgccagagtcccttgatccacttgctggttgtggacaggtcgggcagggcctccttggcgctgtcgacccagtgctggccgtgctggcgcgcggcgtccagggtgggttgcagtttctggtgggtgccggtcacccaggaggggaggtgctgtttggcctggttggccagtatctgggtgggtgacaggctggccaggtagctggcggccaggtggtagaggcccagtgccacggcggcggtgattgccagtcccatgatgaagcgccgggggcgtttgcttcggaagcgccgctgggccaggttggctggtgcaggggcggtgtgggtggtggggctggcttggcccggacgcggaaacagttggttgcccagtcgttcttccatctggcaccaggggcaggaggtggattcgcgggggtagtggtggcgacgatctgtgcggcagcggcgcaggtttttctcgaagtgctccagcgccgtcacccattgcagggcgtcggggcgcggggcgctgtcctgggtggtgaaggcgcgggcaaacaggtcagccagtgtgcctgaaaactccgtcagggcgggcaggccgggtgggggctgcatgccggtggggcgttccgggatgtgcgggtagaggcgtttctggatgcgctcgcccatgggcgggacttcgccggtgtcggggacgccgtcgaaggggtggcgccccatcatcagcacctggaagaggatgacggccaggccgaaggcgtcgtgctgctgggtgcgtaccacaccgtgaaaggagtggccctgcagttcgggcggggtgtagtccggtacacccacagcgcacaggaattgctgtccgccatggctgaactggaagctgtcggcatccaccagggcgacggtggcgtcgtctgccaccagcatgccggaggggttgatgtcaccgatgacgcagccggtgtggtggatggaggcgacagcacgcgcaatgttggtggcggtgcgcgccagaaagcgatattcgatgtccggaaaatgccgcttgcgcgcgccgggggcgtacaggtcgtgcagggggcgacggtcgcgcacggctttcatcagaaagccggcaaaggcgccgtcctgggtgtgcaccacatccacgggaaaggccgcaaagggcgattgccgggccaggccagcatccaccatggcagcaatcttgttggccagttgcggcttgtcaggcgccttgtagagcttcaccgcatggttgcgtcggttggcggctgcgtggacgctgccttcgccgccccgacccaggcgttcacccagtttcagtcgacgcccactgcccaggcgcagtttcaggccgtaggccgggtctttctcgtgatcggcacgggaggtcatgagaggtggggtgtctctgggatgaggggggctgtgccgggcaaggaaatcgggtagtgcttcagggcccgggtgcggtcagcaaggaggcttctttatggcgtctttttgatttgttgccttatgttttgtattgagcggatggttcagtgttcagtacggccatcaccagcgtcttgtcatcgtccgtgcggctgttgatggcctcgctgtccaggtaggctttcagctggccagatagggtgtacgccttgccgggttctttcggcagcggggcggccatggtggagaagaaccgtgcaaacggggtctgcgtggccatgtccagcaccatgcgttctatgccatcggaaaacagtgccagcgcattgatgggctgtcgggtgatgttcgtgcgcaggggcgtgggcggctcgtcggtgacaaagcgcgtggtggacgcgtattcaccgtggtccggccaggaaagtgcctgccaggttctaccgtcggccaggcgtgccacgatgccgccatcaccaatatgggccaccagcgtttcctgtccgttggacagggccagaaccagcgtgcaggcaaagtcgcgtgcagaaagcccgcgtctttctgcggccgcacgaatgcgctggcgtgcttcgtctgtccatgtccgcacggtttctgccgagggcagggcggatgcagtcagccggggttcttgcagggatgatgtgttgggttccgatgcagtcgccaggtggcggcgtgcagcttggcgcagggtacggcaggtgatgatggccccctgccgtccgtggctggcactgccggcgccatcacatgtaacggccacgaaccattctgcatgattggcgtggctgtcgctgctgacgggaacaacggcgcaggcctgggcatcctgcagcggcagatcgtgcttcaggtgcgaagtccctgtactggaggccgctatccaggaccagtgtttcatggtcatcggggctggcatgcgggggctgggcgattgagcggctcaggcgatgctgccccagcctttcgggccggtggggttttccagcggcacggcgtcgccggggttggagcgcgagacggaactcagcgagctggacagccacgcaaacagctcacggaaggccaggcccttcagtttcaggggatcgcgcacggccagctggcgcagctggtccatgtcggcgtcgtccacgcccacggcatagaaggcgaattccttgcgtgcttcgccgctggcaatggcctgcgcagcctgccgccagctgtcggtgggggcgccgtcggtgatgaggaagatccacggacggtagtaggtgatgccgctctggcgatacagcgccttgcgctggcgcagtagctcgatgccttcctcgatggcctgacccatgggggtgaggccctgcgcctgaagctggggggcctggaactggttggcgctggtgaagtcctgcacgaccagcacggggccgaaggtgacgatggccacttccacgcgcttggcgctgaggctgtcggacttcagctcttcctcgaaggcctgcaggccggcgttgagttcctcgatcttgccgcccgccatggagccggagacatccagcagcagaaggcaggggcagcgcggctcggggttgtcggcgaattcggcagcagcaaacggattggcttcggcgtgcatgacgcgctccttgtggataaggatcgcggcattctagtggcggccgtgggcagacgagcagtcgttgggtgagtcccgttatgcgggggcggaactatttccggtcaaggcgaaattatccatgggaggggtgcttgggaagcgcatctttccgtgttcccaccgtgcaatgtcggtgcataccccgaccatggcggcacggtcagttcagcaatccagcgggatcttgccgcagtcatcggtctcgcccacgcgcaccttgcgcaggtagcactgcacgatcttcgtgccgggcttgagcgtctgcaggttttccttcagtttgcgtgcggcatagttggccttgtaggcgaccgacaccacggcggtggcgccatcttcggttcgcacctggcccagatagatgtacttgcccagctcgaaatcgggcgaatcgatcagggcgatttcatcggacaggttgaggatcttgctcatgaggggctcctgtatcggttggcggaagccccatgctgcgcgtcctgtgggctgccgtcattgcggattctcaatcgcaatgagcggtcagtgcaccatcatgcacacggcgaagatggtcatgcactgcgcagggggtggcatgccgggaatgaatcaggcccgacgcatgccacggttttcggggcctccgtccgccccctgggggtgggctgatgcttactggcagctgaagctctcggcgctgttctcgtcgccttctccccgataggtggccacctgcgggtacgggcacagcggctgggtcttgccggggaaggcacgaccctgcgcgatgatgctggccggggcctcacccttctcggcccagttttccagggcggtgagcgggtcgaaatcgtccagcgcgttgccctcgccgcagtgggtcatgccgggcaccatgaagaggcgggcgaagtcctgggtgcccggggtgtcgtgctgcagctgccggtaccagtcgcgcaggtcgttggccgagaagacggggtcggagacgccctcgaagatgatcatcttgccgccgcgcgccttgaaggtggtcaggtcggtggccacggcgtcgttaagggcgccggtctgcagggtgagcggcaggatggtgtcgaagttcaccttgaaggtgtcgaattcggcctggtagggcgtcatgaagtagtggggcagcgacatggcgcccagcacgatgttgcgggcgttgggggtgggggtctgggagtcacccagtttccagccgcgccagttgccgctgttgatgccagcatcccacggccagctggcatagaggggctcgcccttgctggtgcgtgcgccgccaaagacggcttccagcagggccaccttctccttgccgatatccttttccaccatccggggcttgaagtcgcagcgttcccaggcgttgaccaggccgtccttcaggccgtccagggcgtcgcagcgttccagcacgccggcagccacggcatccagatccttcggggtgagggcgttggcaaagatccgctcgccctgctcgttgacgggggtggccttcaggaattgctggttgtcccatgactgggcgatggcggcgcgcgagagccggaagcccgggttgccggccaccacgccgtcaaattgcagcgggtagcgcatggcggccatcatggcctcgcgtccgccgttggagcagcccatgaagtagctgcgcttcggggcgccgtggtacatggcctggatgagctggcgggcggccgtggccaccttgccggtggaggcgtaggccagatccagccgggcctgctggtccttgccgaagagggtgtcacggccctggtggccaccgtccatgctcaccacggcatagccgcgcagcagcgccggcggggccgagctgccccgggtgggaatgcggcccagggcatcggccacgaagccgtcggtgccgccgccgccctggaacaggaacttgtggttccagcgggcaggcaggcgcagctcgaactgggtaccgtagtggcgaccatcagcgccggtgcggggctcgatctcgccgcgcaccacgcagtgttcctcggcctgcagcgtctggcccgaggcgccggtgaaggccgagttggggtcctgtgccagaccgccgcgctgcacccacttcacgcgctggatgaccacatcgggcagttccacttccttcaggtcgctgcagcggctctgggcgtcggcggcatcgtcggcgggctcggtggcagcctgggcgctggcggcccagagcaggctgccgacagaaagactgctggccagcagcggcagcagggcgggaaggcggtgcagtttcatggcatgggttccgaaaggggcccgaaaggcagcatcggggaggcagccatccggcatgggcgttccggccagaccttcccggggaatgtcagagacagcaaaccattttaacgaattggcctgcagggaggccgggggagaaggccgcccgggagagacgtccggtcagggacctccggcaggcccctggtcggattcagccagccttgtagaccagcacggccgcggtcaggtcttccagggcactgcccacggccttgaagacggtgatggcctggtcgctgctgcgacccgggtgctggccacggcacagggcctgcaggtcggcgcggatgtcgctggcgctgaagcggccggtgtcgaaggccttgagcaggtcgccggacttggtaggggcctcgtcggtatccacgaagacctcgttgccaatgaagcagtccgcagcggcctcgaccatgttgggcttgaagctgcccaccaggtccaggtgggtgccggggcgcagccagctgccctggatgaggggctcttccgagagggtggcgcagctgatgatgtcggcctggcgggcggccgcttccagcgatgccggggtaccgtccagtggatggacattgggcacgccctgcttgcgcagggtctcggccagcacggccgcgcgcaccggacgggggttccagatgtcgatgtgctcgatgtcgcgcacggcgcgcatggccgcaggcagcagtgccgcgatgcggcctgcgcccaccacgagcagccgcctggcatccttgcgtgccaggaagtcggcgcccaatgcggcagcgccggccgtgcggcgtgcggtgatggcgtcaccgtcgatgagggccagcggcacgccggtggtggcgctgtacagcacgtaggtggcgtgcaggccgggcagtccctgggcaccgttcccggggaagatgttgatggtcttcacgccgaagaagccctgttcgttccaggcgggcatgatgagcgtggtgccctggacgccctggctctcgatggcgtgggtgtggcgcagcggcacggtggcgccttgggcaaaggcctcgcgcagtgcggggatcagcgtgcgaaagggcagggcagcccggcattgttcggcgtcgaactgtttcatggtggtggcaatgggatgtggatcggatctgccggggggcatcgtgcccgaccctggtgcacggaggcggtcgcggccctgtggatccctggcgggagcaggaagggttcagaggaagcgctgcaccgaatagggcgacggatcggtgaacggctgctggccggtcatcagttcggccagcaggcgaccgctgacgggacccagcgtgaggccgtggtgggcatggcccacgtcgaaccacaggccgcgatggtgcggtgccggtccgatgatggggtgcatgtcgggcgtgcaggggcgccgtcccatccagggctggctttccacttcttcgcccaggggccagaactggcgggcgatgcgggtggcctggcgggcctggctgtcgttgggcggtgcgtcgggcagggccagttccacgccggtggtcaggcgcacgccatcgttcatctcggccagcacgaagcccgagtcccggtcgcagatggggaaggacggggccgggtgtgcgtcgtcgatgcggaaatgcaggtggtagccgcgcttgggacgcagcggcaaccggtagccgaaacgttcggccagggcggacgtgtcggagcccagtgccagcacgacgtcgctggcatgcagttcggtgctgtcgggcagcggcaggcgccagccgggctcggtctgctgcagcgccatggcgtcggcgtggatgaactggccaccgcgagagcggaagagccccgcatagccttccaccagctgcacgggcgactgtacggtccagggatcctgccagtggatgccgccggtgatgccgccttccgggcgcaggccgggcaggcaggcgcgcagggcatcggcgggaagcacctcgatgttcaggccccagcgttgggcgtcgtcctgcgcctggcgcgacagtccggcgaaggcatgctggccgcgcaccagctcgatccagccgccgtcgcggacgatggcgtgcaggctggcggcgctgatgagcggctggtgctcagccacgcacagctc

SEQ ID NO: 1821 - DNA, 23126 bp, synthetic construct
  misc_feature 1..23126: note = Synthetic
  source 1..23126: mol_type = other DNA
cgaaggcgccagtctctgcctctatgacccggcctggcaccagggtgtgatcggcctgctcgcctcgcgcctgaaggagcgccatcatcggccgaccatcgtgttcgccgacggcggcgatggcctgatcaagggctcgggccgctccatcgccggcctgcatctgcgcgatgccctggacctggtcgaccgccgcaatcccggcctgatcctcaagttcggcggccacgccatggctgccggcctgacgctgaaagcggccgatttcccccccttcgccgaaggattcgaacaggtagcccgcgaactgatcgcgccggccgagctggaacgggtgatcgagaccgacggcccgctggccggcgaggaatgcaccctggccaacgccctcgccctgcatcagggcgtgtggggccagggcttcccccagccgagcttccatggcgaattcgccgtgcagtcccagcgcctgatcgccgacaagcatctaaagttgaaagtgtcggacggcgccatcgcggccgaggccatgctgttcaaccacgccgagcccctgccggagcgcatccaggccgtttatcggctggacgtcaacgaatacaacggcacccgttcgctgcaactgactctggagcactgggctcatggagcacacaacccatgactgagttgatccagaccttgtggccctggtcggccttcgtcatcagcctggccatcggccttctgatcggcctggagcgcgaacgctcgccggcggccaaggccggcctgcgcaccttctccctggtcgccctggccggcaccatcggtgccctgctcggcgacaggaccggccagccctggctgctggcggccggcctcctgatcctgggcggcatgatgatcgccgcctatctgcgcggcgaagaggcggaggatcctggcaccaccaccatcgccgcggtcgtggtctgctatggcctgggcgccatgatctggtatggcctctacgacatcgccgtcgccctggccatcaccgccaccgccctgctctacttcaagaccgaactgcgcggcgcaagccagcgcctgtcgcgcaaggatctcgtctcgatcctgcagttcgccgtgctctccttcgtcatcctgccggtgctgcccaaccaggaatatggcccctaccacgcgctcaatccccatcacatctggctgatggtggtattgatctccggcctgtcgctggtcggctacgccgccctgcgcctgggtggccaccgttacggcacactgctgaccggcttcttcggcggcaccgtctccagcaccgccaccaccctggctttcgcccgcaacagcaaagagaacccccatctcaccggcatcgcggcgctgatcatcctgatcgccaacctggtcgtcctcctgcgcatctccatcgtcatcggtgtggtcatgcctggcctctggctgcccctgagcagcatgctgctgggtggcctgctggccggatcggccttcgtctacctgctctggcggcgccaggaggagcggcccgcgccgccggaactggtagtcgccaacccggccgagatccgttccgccctgagcttcggcggcttgttcgcgctggtgctgttcgccgccgcctggctgaacgatgtggtcggcaagcagggcatctatgccgtcgccctgatctcgggcctgaccgatgtcgatgccatcaccctgtccagtttgcgcctgtacgagttgggcaacctgggaaccaagcagacggcggcgaccatcttgatcgccctgctcgccaacatcgtgttcaagtgcgccatggccagcggcatcagcggcctcgcgctggcccgacagatcctcccgggcatggccgccgtggccggcggcctggccgtggcctggtggttgatttagttttcccgaaacagccggctcaggtgagcagttcttcggcccagatcagggcctcgacatgggccaggttgacctcttcggcggagcggccgacccggccggccagcgcctcgaccgcctcctgatcgaacccctcgcaggcctcggccagcaagagatagggcgcgtaggccccgctacgctgaagcaggccgtcgaccacgccctgtggcagatgcaggccgtcgatggcgcgctgcatgggcagattgagcagggcatcgatcagcgaaagcatgcccaggatgaacaaccggccgcgctcggccatgggcacctggcccttgcccaggttctcgaccagccgcgcacgcaccaccgcgtttctcagcagggcctggctgcgggcgtccgattcgccaccggcgaacaggagcaaggtcagccagcgatacaactgctcgtgaccgaggtacatcagggcatgggcaatcgactggatgggctggttcagcatcagggcgggcgaattgagatagcgcaacagcttgtagctcagcccggcatcggttttgaatttcgcctcgacctcggcgatctcggcgccattcatcacgctgttgagcaggtccatgagccgggcccgactgccatacaggcggtgcgccgcggccggctgcaggctggccaggtgatagccctggaacaactggaaaccggtcttcttgcaggcccggaatgcctcgtcggtatcgaccccggcggcaacgatgcgagcggccggatattggccgcgagcgcggtcgtaacgctgcgccagcgccagggcatcgccctgattgacgtcgatccgcacatagcgccagatcgccgccggcagggcggcggctgcgacgctgtcttcgtcgttgagggccaggcgcgcaccgaggctggcgagatcgagcaggcgatcccggccggccgtcgacagcgcggcaaggtcgcgcaccacgagcacgatgctcgcaggcaagcgatcgagggacaggccggtcaggctggcggcatcgaccgcgaggaagctcagatagcggtcgcccagggcctgctgcaggcccgaggtgcgggcactggccagcagccattcgtcgcgcatctgctgcaggctttgcgccccggccgccaccggcaccgggacgtttttctgcacgccgaactcatagccgatcagccggtgtccggcgtcgagaatgggttgccgggtcagaaagcgcagcgggccggaagcgcgcgctggcgatttgtccgtgccgctgcgcccaagcaattgcaaatgactcgccggcatctcctttttcaccatgatcaagccaccttgctgtcggggttcgccttggtttcggctgtcttgttccgggtggcgcgcatcaacgtggcatggcatttcaccaggtcgccgaagaacttgccgcgcacttcgctggccaggttggcctgcgccatcagcccctgaaggcgcttgagcaagcccggcagggcggcggccagctcttcacgacgctgccgccagccggccggctcaaggctgccgatcaggtcggccagaatttgcgctgcctctgtggcatcagtctggcgcaccaactcgggtccgtgcatcagcaggaaggattccatggcaccggggatgcggcggccttcgagcgcatgccggatcatcgcttcggctgtagcggcatcgccaaactggctagcgccatcgactgcggcagcaggatccagcccgggcagcgcggccaaagcctgacggaaaccctcagccagattgtcctcacgctgttgcaggccctcgatcagggtcgcgacctcggccttgaccgccacggtctgcgccgcttcgcagccggccaggacgatcagggcgtccagcaattgacgcaccgggtgcgcgccctggcgcaatacgccctcggcatcctgcaaggcggcgcgcagcacgaccagctgcagacggccgatgcgcacctgccagtcggcgggcactgcagcggtgaagacccgggcctcgaaccatccggccgcccaatccagcgccacccgatccgccgcgctcagctgcaggctggcggcctgctcgatccggcgcaggatcgccatgcccgcggccagcgccccggcatccagcccgagcaggcgggcagcctcggcatcgccgtgccgccagccagccagcacctgggccagggtctggccctgcgacggcgtcggctggctcaacgactgccgcatcagccagttctggcagacggcggcgacggtgccggcctggcccttggccggcaggccgagtttcaactcgggcagcacctggcgctcgagcaagaactggttgagcgcctgatagaccggcttgacctgctgcggcagatattcggccaacaagggcagcaggctctggcggatcgcacggaccaggccggcttggcgcatggcctcgatggacgccgccccgatcaattgcggcgccactggcgactgccgccagccccgcgtgccggtgatggcatcgaggcgccgctccaggctgtagagctcgcccttgcaggccgtggcgatggcctgggccagggtctccggcgccgcgaagtcgtaatgcacgtcctcgtccatcaggccgggccgctgcgctggcgccgtcgcggtctgcccggccttgtccccggccgggtcggacagcgcggcatatcgctccctgaacgccgcttccaaatcgccccgtcgatgtcgcaggacaccgatggcttgttcatacaattcgatcgcgctgtccggccccacccagggcctggcctcgatcaggccgttgagggcatcgcccagtgtcacggcaaaggccgaaggcaagcaggcgacggcggcatcgcggcattggccgaccagcgcggcggcatccggcgaaagttgattcagattcgattcctgcatggcccgacctcctgacccgagagcgcgatcttcgggtccaaacaccgctgcgttgcggcaaaaatcagggcaatgcaaacaggcgaatgcctgcgaagatgggtggcgcgcaccaacgcgccacgtttggccacctagcggtcccgctgtcgtagggtcgcccccttagaccggtaactttgcgtccccgcctttcgacgggtttgcccttgtaggttgcggaatcgcttccgcaggcgctattaaacctcctcccctgccggggctgtcaagccgcgcgattacgcagttcaacccttgatgcagaccttgggccgcaggaaggccacgcgccgggcaaggccggccttttccgtggcttcggccacgaggtcgacgtccttgtaggcgccgggcgcctcttccgccgcgccgcgcatggacttggtgcggatcaggataccctggcccttgagctgctcgatcagttcccggccgcgccatttcttcaaggcggcgttgcggctcatggcccggccggcgccgtggctggccgaggaccaggcgcgccgttcgccctcggccgtgccggccagcacgtaagaaccggtgcccatgctgccgccgatgatcaccggctggcccaccgcctggtattcggccggcagcgccgggtgattgggaccgaaggcgcgggtcgcgcccttgcggtggacatagagcatccggtccttgccatcgacccggtgtttttccagcttgcaggtgttgtgcgagacatcgtacagcgtggccagatggctgcccggaatcacccgggcgaagaccgcgcgcgtgaggtgggccaggatctgccggttggccagggccacattgatcgcggcattcatcgcgcccaggtattcctgcccctcgggcgaattgatcggcgcgcaggccagttcccggtcgggcaggacgatgcccagccgacttgccgccttggccagggaaaccagatagtcggtgccgatctgatgtcccaggccgcgcgagccgcaatggatggagaccagcagctggccttcgtgcaggccgaaggcccgggcggcctgggtgtcgaagatcttttccaccacctgcacttccaggtagtggttgcccgagcccagggtgcccatctcgccacgctggcgcttcttggccaactcggagacattgccgggcaccgcgccgcgcatcttgccgtgttcctcgatcagggcgaggtcggattcactgccataaccctgatgcaccgcccattcggcgccgcccagcatgacctggtccagttcgtggctggacagcttgagcgcgccctcctcgcccacgccggccgggatggcctggaacagggcgtcggccagttggggaaactgcgccgcggcgtccttgagctcgagattgctgcgcaggcagcggatgccgcaggaaatgtcgaaaccgacgccgccggcggagacgatgccgcccaagtcggggtcgaaggcggccaccccgccgatgggaaagccgtaaccccaatgggcatcgggcatggtcatggccgggccgaccaggccgggcagcttggccacgttggtgatctgggtcagcaccatgtcgtccatggtccgcaagagcggcgcgctgccgtagagcagcacttcggaccgtacctcgcccgccgccctgggcacggtgaagcagtagtcgtcgagctgcctgagccgtgccatgtccatggtcaaacccttttcaatcagacatctacgatgcagcgggccagccagcccttcgtcccctgctccaccttcagcatagtcagcgtggcgcccttcacctcggtgccgcgctccgccccgggccgccagggcatgccccaggcccggcccagccaatgcgtgtctgcgtgttccagctcgaaggcgcagaagaccaggccgcgcagccgggcctgcgcgagcagctggttcagccaggtcaccagggccagctccaggtcggcctcctcgaactcgacggccacctcctgctcggggagcaccgtggccggctcggccatgatggcgaacatgccgagggcggcgttggcaaaggcctcgtccacggtcttgccccgggcctcgatgccgatgtcggcctcgtggtcgaaatagcggtaacggcgggtcatggcggcggcaggactggggctcaaggctgaagacggctataattttgcgttttttccgccccggtaggaaatcaggaattcaaatggaagccgaacagctcaatcagatcgagaaccaactggccgacctcgcccgtcggaccaaagagctacgggggtatctttgactacccgggcaaacgcgaccggctagacgaagtcatcaaacttaccgaggaccccgccctctggaacgacgccaagcaggcccaggaactggggcgcgaacgcaagtcgctggaggccgtggtgctcaccctggaagaggtcgagcaatccctgaaagacaccggcgagctgttcgagctggcccagatggaggccgacgaggacaccctgcactcggtcgccgccgatctcgccggcatcgagaagcgcgtggcggagctggaattccgccgcatgttcgccaaccccatggatcccagcccctgcttcatcgagatccaggccggcgccggcggcaccgaggcccaggactgggccagcatgctcgagcgcatgtacctcaagtattgcgagcgcaagggcttcaaggccgaacttctggaagaatccgagggcgaggtggccggtatcaagagcgcgaccatccgggtcgacggcgactacgcctacggctatctgcgcaccgaaaccggcgtgcaccgcctggtgcgcaaatcgccgttcgattccaacgcccggcgccacaccagtttctgctcggtcttcgtctaccccgaggtggacgactcgatcgagatcgacatcaacccggccgacgtgcgcaccgacacctaccgcgcctccggcgccggcggccagcacatcaacaagaccgactcggccgtgcgcctgacccacatcccgaccggcatcgtggtccagtgccagaacgaccgctcgcagcatcgcaaccgcgatgaagcctggaagatgctgcgcgcccgcctgtacgaactggaactgagaaagcgccaggccgagcagcagaagctggaagacgccaagagcgacatcggctggggccaccagatccgctcctacgtgctcgaccagtcgcgcatcaaggacctgcgcaccaaccacgaagtgggcaacacccaggccgtgctcgacggcgacctggacgatttcattcaagccagcctgaaacagggcgtataagccagagagtagccgccatgagcgaagagaacctccagcctcaacaagaagaaaacgaagtttcggcgaaggctaatatcggcgaagccgatgttaagtccgcacaagcggacggccaaagccagaaccagatcatcgccgagcgtcgggagaaactggccaagctgcgccaaaacggcgtcgccttccccaacgacttcgagcgcaagcacctggccgccgacctgcacgcgcaatatggcgagaagagcaaggaagagctggaagccatggcggtcgaagtgcaactggccggccgcatgatgctgaaacgcgtgatgggcaaggccagcttcgccaccctgcaggacaagagcggccgcttgcagatctacgtctccaacgacgtcaccgggctggacgcgcacgaggccttcaagcactgggacctgggcgacatcctgggcgtgaccggcaccctgttcaagaccggcaagggcgagctcaccatcaacgccaagtcggtgcgcctgctgaccaaggccctgcgcccgctgccggagaagttccacggcctgaccgacaccgagcagaaataccgccagcgctatctcgacctcatcaccaacgacgacacccggcagaccttcatccgccgctcgaagatcgtccaggccattcgcgagttcatggccggccaggacttcctcgaagtcgagacgccgatgatgcaccccatccccggcggcgcctcggccaagcccttcatcacccaccacaacgcgctggacatggagctgttcctgcgcatcgcgcccgagctttacttgaagcgcctggtggtcggcggcctggagcgcgtgttcgagatcaaccgcaacttccgcaacgagggcctgtccacccggcacaaccccgagttcaccatgatggagttctacgcggcctacatggaatacaagggcctgatggacttcgtcgaaacgctgctgcgcgaggtgacgatcaagaccaccggcaccgcggcagtgaactaccagggcacggtgatcgaccttgcccagcccttcgcccggctgaccgcgctcgaggccacggtgcagtacaacccggagctggccggccaaccgctggacgacatcgacttcgtgcgcgccgaactggaacggcgcaagatcccctaccgcaagcacgacggcctgggcggtctgcaactcaccctgttcgaagagaccaccgagcaccagctgatccagccgacctacatcatcgactacccggtcgagacctcgccgctcgcccgcgcctcggacacccggcctgagatcaccgagcggttcgagctctacatcgccgggcgcgaggtggccaacggcttctccgagctgaacgaccccgaggaccaggccgagcgcttccgcaagcaggtcgaggccaaagaagccggcgacgaagaggccatgtactacgacgccgactacatccgcgccctggaatacggcctgccgcccaccggcggctgcggcatcggcatcgaccgcttcgtcatgctgctcaccgacgcgcccagcatccgcgacgtgatcctgttcccgcagatgcgcaaggaagactagcgcgcattggaaactaaaacccggtcattcaggcagcgcatggtcgaactgaccttagcaccagttgaccctccgtcaccatcggcagctttctttcggcttcaatagggtgcggcccgagaggccgaaatgaatcggggccgcatatagcggccccgcatttggtgcatctctcagcttgttagcggacagagcgcatatcccgatgaagtatgcgccctcaagttatacttacagacaacaaaaatcaatacacggaggcggcaaattgtccaagatgcgctatcgactggctctggatatcggttccacatccatcggctggtgcctgcttcgcctagacggcgatgacaaacccgtcgcgatcattcgcatgggagttcgtattttctccgacggccgcaatccaaaggacggcacctcgcttgccgtcacccgacgcaacgcccgccagatgcgacggcggcgcgaccgcctgctcaaacgcaaagagcgaatgctggccgccctaacccgttttggtttcttccccaccgatgaagttcagcgtcgtcaattggtgaacctcgacccctatgccctgcgcaagaaggggctctatgacgcgctgagcggaccagagtttgcccgtgcgctgttccatattaaccagcggcgcggctttctgagcaaccggaagaccgacaagaaggacagcgatagcggtgccctgaaaaaagccatcaaggatttgcgcgacaagctagcccaggaaaactgccagaccctcggcgaatggctggccaaccgccatgagaaccgcttgagcgttcgcgcccgcctgcgcggcagaacccagaaggacaaggcctacgatttttatgcagaccgggcgatgatcgaacatgagttcgacgtactgtgggccaagcaaagcagccttaaccccgccttgtttaatgaggcggcccgaaaagaactcaaggacatcctgcttcatcaacgcccgctcaagccggtcaaaccgggccgatgcacattgctgccagacgaagaacgcgcaccgctggccttgcctagcacgcagcgcttccgcatctaccaggaagtcaacaatttacgcctgcttacgccagacctgcgtgaacaggccctgacactggaacagcgcaatcaggtcgtccagcttctcgaacaccaaggggaagtccgattcacaaaaatcttgaaggcgctaaaactacccggcacgaccaaattcaacctagaggacatcaagcgagaccggctcaagggaaatgcgacatcggccgcccttgccaaagacacttgctttgacgagcgctggtacagtttcgaccatgccatgcaagacgacatcgtcgacaaactgctgaatgaggcgagcgagtcggcattggtgagctggctgcaagaacataccggcgtggatgaagcaaccgcagagcgcatcgccaataccagcctacccgagggttatggcaacctgagccgggccgcgctggatcgtatcgtgcctgagctcatcaaagatgtcgtgatgtattccgacgccgtcaagcgggcaggcttcgatagccacagtgcgctgtcttatatccagcaaacaggcgaaatcatggatgccctaccctattacggcatccccctgcgtcgccatgttgcctttgccaaggacaacccacgcaacgacgaagagcgttatggcaagatcgccaacccgaccgtgcatattggcctcaacgagctgcgcaaggtggtcaatgccctcatcaagcgctatggcaggcccagtgaaatcattgtcgaggtcgcacgcgaactcaaattgagccgtgaaagaaagctggaaatccaaagagaacaaaaggagcgacaggaactcaatgacaagcaggttgccgaagcctgcgtagtgttgggtttgaccccgaccaatttagatcgggccaagcggcgcgaactgtcgcaaaagatgcaactatgggtcgaactcaactccaagaatgtcgccgaccgccagtgcccctacacaggtgagcagatcggcatcgaacggcttttgtccaacgaagtcgagatcgagcatatcctgccctactcgatgacgctggacgacagcatgaacaacaagacggtttcgctacgccgcgcgaaccgggacaagggcaaccgaaccccataccaggcattcggagagatctcgcagccaggatacgactacgaggccatcctccaacgtgcggcgctcatgccgcgcgaaaaaaccaagcgattcgcgccggatggctaccaacgctggctaaaggaggacaaggactttctggcccgcgccctgaacgataccgcctatctgtcgcgtatcgccaaggaatatctgtccctcgtttgccacccgaacaaggtgcgggccattcccggccgcatgaccgccttgttgcgcggcaagtttggcctcaatcaattgctttccggcaccgaatctaaaaaccgcaacgaccaccgccaccatgctctggacgctgctgtcatcggcatcaccgatcaaggcctgttgcagcgcttcgcgcaggccagcgccagcgcacgggtaaaacagttagatcggctggttgaggaaatgccgctaccatggccatcctatcgcgaacatgtcgagagggcgcttgaaaatattattgtgagccataagccggatcatggctatcagggcgccatgcacgaagacaccgcttggaggttacatggcaatggcgtggtgtccaggaggattagaccggaagacggcggcccgcgacagcgcgagatcaagaataaaagtgtgatagcgatagccagcacccggaaccccgagcgccacggtttggatgaaaatggcagcccaagggcctataagggttatgtcggcggcagcaattactgtatcgaaatctggcgggacgaaaagggcaagtgggatagcgatgtgatttccaccttcgaagcttaccagctgatacgcctgcacggtgaggctgaaggaatcaaacggctcagaaatccatcctacagcctctctggaaaaccactggtcatgcgcttgatgatcaacgacctggtgcggctcaatctgggcggcaataccaaaaccatgcgcgtcgttaaaattggtggaaatggccagatgttttttgccgagcacaatgaagcaaacgttgatgccagaaacaaagacgacggagactcattcaaatatgtctcaaaaatcgcggggtcgctccagacagcccaaggccgccgagttaccgtctccgagatcggcgacctgcgcgacccgggatttaggggataaacaacatgatcggccgcatcgtcgaggtggccgacgacaagcggcacctgttcgcctcgcgtgggttcatggtggtgcaggacaccgagggcgagcgtaaagaacttgggcaggtaccgctggacgacatcgccgccgtcatcgccaatgcccatggcctgagctacaccaacaacctcctggtggccttgaccgagcgtggcgcccccttcgtactgtgtgcggcaaaccataacgccatcggtatgctctggccggtggctggcaatttccagcaggccaaacgattcgatgcccagattgcggcgacgctgcccacccacaaacgtctctgggccgaggtagtgcgtagcaaactacaacaacaagccgccgccttggaagcggctggcgcccccgtcgcaccgctggccgcattgacgaaaaaggtccgttccggcgaccccgacaatctggaggcgcaaggtgcccggcgctattggggcctattgttcggcaacgactttcggcgcgaccaaaacgcaagtggcatcaatgctatgcttaattatggctataccgtgctgcgtgccgccacggcccgtgccgtgattgccgccgggctccacccgacccttggcctgcaccacgccaacgaaggcaatcccatgcgcctggtagacgacttgatggaaccctttcggcccattgtcgatctgcatgtctggcaattgcaacgcatcggtgaggccagtatcacaccggaaaccaagcgatccttggtccgtaccttatacgacgacatgcagaccaattccggcgccacgccggtcatggtctgcatgcagcgactggccgtttctttagcccaggtttatctcggtgagcgcgacaagctcgaccttcccttgccagggctaccactgtccatggccgcaagcctggccgacgactgacatgccatgctcagcggatatcgactgatgtgggtggccgtcatgttcgacctacccgtggtcgaaaaaacagaacgcaaagcagcaaccgactttcgcaacaccctgctggatatgggtttcgagatggcccagttctcggtgtacatgcgcttttgcaccagccaagcgcaaatcgacacctactgcaaacgggtggaaaaagccttgccggatggcggcaaggtcaatatcctcatattcaccgacaagcaatatgagcgcatcatcacctatcaaggcaaagccaagcaggccgcgaaaaaatcgcccgaccaatatgacttgttctgacacccaggccgatttttggggcccaaaaagacaaaaacccgctgacaagtcagcgggttatgtcacatcgaagtttacatcatcgggatatgcgcactggccggaacgttacaggcacacctggtagtggcaaaactagtttacatcatcgggatatgcgcactggccggaactcggactggacgatctcgcgggccgtctcgagtttacatcatcgggatatgcgcactggccggaacccgacggtgagccgatcgcgtctggcacggagtttacatcatcgggatatgcgcactggccggaacttgcaaggttcaaagtttttgaaccatactagtttacatcatcgggatatgcgcactggccggaacagcagggcacgactgctgaggtgtccccggagtttacatcatcgggatatgcgcactggccggaactgcacggcgcccgctacgccagcccggtggagtttacatcatcgggatatgcgcactggccggaacgcaacaagcgatatgtgagtgccaacatcaagtttacatcatcgggatatgcgcactggccggaacatggcaatgatgtcagggccgatcgtatttagtttacatcatcgggatatgcgcactggccggaacagatggccaatcctcgaacctggtcaagacagtttacatcatcgggatatgcgcactggccggaacacatgatcgacgaatatgaggaggccgtgaagtttacatcatcgggatatgcgcactggccggaactctgccgagattgcggaggccactaagaaagtttacatcatcgggatatgcgcactggccggaacaccatccagtgacgaatgcctacacggagtagtttacatcatcgggatatgcgcactggccggaacagtcgtcaccacgttcgctgcagtcagcgtagtttacatcatcgggatatgcgcactggccggaacaaggcccgcgaatcggtgctggaggcgggtagtttacatcatcgggatatgcgcactggccggaacgatcctttggccattgagcattcgacgttgagtttacatcatcgggatatgcgcactggccggaacgtggtctaactgtcgcttcgagcggacctgagtttacatcatcgggatatgcgcactggccggaacctacaaggaagtgctagatgtcgatctgccagtttacatcatcgggatatgcgcactggccggaactggccttgagttgagggttttgcctggtaaagtttacatcatcgggatatgcgcactggccggaactgtctgcgccggacagcgccgatgtgctgcagtttacatcatcgggatatgcgcactggccggaacgccggcgagatcctggcggcggcagataaaagtttacatcatcgggatatgcgcactggccggaacacccgtggccgtccgttgtttgggcggttcagtttacatcatcgggatatgcgcactggccggaaccggcggccacgctgcacgaagccaccggccagtttacatcatcgggatatgcgcactggccggaacgtgggctcagcgccggttacgccagcgtcaagtttacatcatcgggatatgcgcactggccggaactgggcgataccgtccataatgtagtcgtagagtttacatcatcgggatatgcgcactggccggaactattccctctcgatcaggctggcgcccttgaagtttacatcatcgggatatgcgcactggccggaactggccctgcctggcgcacgatgggcctgccaagtttacatcatcgggatatgcgcactggccggaactgcgccagcacctcggcgcgggactgctggagtttacatcatcgggatatgcgcactggccggaacaaaccggcgcaagtcgagcaagccatcgccagtttacatcatcgggatatgcgcactggccggaacggagcgctgccgaatggttggcttgtggtgagtttacatcatcgggatatgcgcactggccggaacttggcgatgttgttggcgttgatggtggcaagtttacatcatcgggatatgcgcactggccggaacatacacgccataatgactgtacccgcaaagagtttacatcatcgggatatgcgcactggccggaacgctgtcctgtagctgttcttccagcgcgcgagtttacatcatcgggatatgcgcactggccggaacctggcgtggactactccagccattctcggcccagcactgccaggccgttggagaatcgatagaccagcggcacgcccggcgcgatctcgactttttccatcgcctcggcgctgatgcgatccagatgcatgaccagcccacgcagggtgttgccgtggctgaccacgagcaggcggcggcccgttcggatgcggggtgccagcacttcgttccagtaaggcagcaggcggcgctggcagtcggccaggctctcgctcgccggcagctgttcgggcggcagatcggcatagcgcggatcgaagcgcgggtgtctggggtcgtcgggttccagtgccggcggcggctcggcatagccgcgccaccagtgccgcgcccgttgctcgccccaggcggaaaagatttcctgcttgttcaggccctgcaaggcgccgtagtggcgctcgttcaggcgccaggtctcgtggatgggaatagccgtctgccccagcgtcgccagaaccgcctcggcggtctgccgggtgcgccgcaacaccgagcaatgcacctcgtcgaaacgaaagcccgcgccggccaggcggcggccggccgcctcggcctcggcgatgccctggccggtcagcgcgatgtcggtccagccggtgaagcggtcggtgaggttccagtcgctatggccatggcggagcaggacgaccgtatgggccacggcctcgttccttattcgggcgactcgaccaggacgttttcgagatggtgccggtcgccccaggtttccaggtgccagccgtgggcgtcgatgtggaaccagttgagggcgcagttggggatcttgaaatcgcgcggtgcctccagggcgcggccggtcgccttgcgatagagcacgtcgagcacgccgccgtggctgactgcggcgatggtctggccggcatggtgccgggccagccagtctatgccctcgatggcgcgcacggcgaaggcgcgcagggtctcgcctgtctcgaaatcgtagtcggcatcgcgcgcggcatagcgggcgtgggcctcggggtggcgctgcgcgccctcggccgcggtcaggccctggaagatgccgtaatgccgctcgcgcaattgcggcagggtcttcagctccagccccaggcgctcggccaggccgcgtgccgtgtcgagcgcccgggcgaggtcgctgctgtaaatggcgctgaacctgtggtgcgccgcgttgtaggccatggccagcgcctgggcccggccggtggcgttgagcgggatgtcgatctggccctggatgcgtttttcgagattccagtcggtctcgccgtggcggatgatgcagatgcgggtggtcatgattcggcctgacagggatggcgcaagcataccgcatccgctttgcgcagccacggtttgcctatagagttgccgtcatgaaaaccgaactcgcccaggccctggcccagatcaaccgcgtcgtcctcggcaaggaacatcaggtgcgcctgtgcctggcctgcctgctggcgcgcggccacttgctgatcgaagacacccccggggtcggcaagaccaccctggcccacaccctggccgtcaccctgggcctgcagttccatcgcatccagttcaccagcgatctgttgccggccgacctcttgggcgcggccatctacgaccgtgagcgcggcagcttcagctttcatcccggcccgatcttcgcccaggtgatcctggccgacgagatcaaccgcgccagtcccaagtcgcaaagcgccctgctggaggcgatggaggaaggccgggtcaccatcgagggcgagacgcgcgaactgcccaagcccttcttcgtcatcgccacgcaaaacccggtcgagcaggccggcgtcttcccgctgccggaatcgcagctcgaccgcttcctcatgcgcatccgcctgggttaccccgaccatgcggccgaacgcgccctgctgcgcggcgaaaaccggcgcgacctgctggcgcagcttgcgcccgtgctcgacccggcgggcttcatcgccctgcagcaggcggtgcaaagcctgcacgtgtcggaggccctgctcgactatgtgcaggccctgatcgacaccacccggcgcgatctgcgcttcgccggcggcctgtcgccgcgcgccgggctggccctgctgcacgcggcccagggctgggcctatctcgacgggcgcgacttcgtccagcccgaggacatccaggccgtgctcggccccgtggtcggccatcgtctgcacccggcctccggcatcgaggcggccgagccggagtgggccgcccaggtgctgatggaagtcgccattccctgatggctttgccgctgcccgccctgcgcttcgcccacctgccgtggcgggcgccgcggcgcgaaggcggtgagattcggctcagcagtcgccggctctacatcctgcccacgcgcgacggtctgctgttcgccctgctgctcggcgccctgctgctgggggcgatgaactacagcctgagcctggcctatctgttcacctttttgctggccggcatcggcgtggccgggctgatccagacccaccgcaacctgaacggtctgcgcctgcacgccggccatgtcgctccggtgttcgccggccagagcgcgcacttcgtcctgcatctggacaaccccacgggcctcgggcgctaccgcatcgccatcgaacatgcccaggccgcgcccgcccacgccgacctgccggctcatggccgagccgacctgagcctgagcctgccccagccccggcgcggcctgcatcggcccggccggttcgccttgtccaccacctatccgctcggcctgttccgctgctggacggtgctggagctggactggacagtgctggtctacccgcgccccgccgccgacagcctgcccttccccgccggcgcagaaggcgatcagaccggtcggaccagccggccgggcgacgaggaattcgacggcctgcgcgaataccggccgggcgattcgctcaagcgcatcgcctggaagaccctggcgcgcgagcagccgctcgccaccaagcagttcgccgccccggtttcgcgcggcctctggttcgactggacgcagacgccgggcggcaacaccgaggccaagctctcgcgcctgacccgctggctgctcgatgccgaggcgacgggtctcgactacggcctgcgcctgccggcgcgcagcttcggcccggcccggggcgaggcccatctgcgcgcctgcctggaagcgctggcccgcttcggggaggcctgatgcgccagcgctatgcgctgcccgaactgctctggctggtgctgccgctggcgctggtggtggcgccgcacacggcccggctgccgctctggctcagcctggtctgggccgccatcgcgctctggtgcctgctgcgcgcggcccggcgcctgccgctgccgccgcgctggctgcgcatcgccgtcaccgtcggcggactggtcgcggtattcgtccagttcggcaccatcgtcgggccgcgcgccggcgtcgcgctgctggtcttcctctcggcggccaagctcttggagaccgaggccccgcgcgaccgcagcggcctgatcttcgtcggctatttcctgctggtcgcccacttcctggaggaccagagcctgctcagcgccgcctatatgctgctcgccctgctcgcgctgaccgcctcgctcattgccagccagatgccacagcccaaggcgctctggcccaagctgcggccggccggcctgctgctcttgcaggccatcccgctggcggtgttcctgttcatcctgtttccccggctgtcgggcccgctctggagcctgcagcaggaaagctcggcccgcaccggcctatccgacgagatgcggccaggcgacttcaaccgcctgatcctgtcggaggaaatcgccttccgcgccagcttcgacacccgcgccatcgaccccaagcagctctactggcgcgggcccgtgctctgggactatgacggccgcgcctggcgcaccgtgcaggacgtaccctatggcggcgtggtgggccagggcatcggccagccggtggactaccgggtcatcctggagccgcaccagcagcactggctgttcctgctcggcctgcccgaggcactgcccaggctcgaggccgatctgcgcagcgacctcgtctggctcgcccgcgccccggtcagccagcgcctgcaataccaggtgcgggcctggctcgattaccgttacggacccgatctcgaccatgccacctgggttcgcgccctcgacctgcccgatgccatcaacccgcgcgcccgcgccctggcggcacgctgggcgggcagcggcctgagcgatgccgccatcgtcgagcaggcgctcgaccacttccggcgcgagcccttcgtctacaccctgcagccgccccggctgggcgagcaggcggtggatgactttctgttcaactcccggcgcggcttctgcgagcactacgccagcgccttcgtcttcctcatgcgcgcggccggcatcccggcccgggtggtcaccggctatcagggcggcgaatacaacgcggtgggcaactactggatcgtgcgccaacgcaacgcccatgcctgggccgaggtctggctggcgggcgaaggctggcgccgggtcgatcccaccgccgccgtggcgccgacccgggtggaactgggcgtcggcgccgcgctgccggtggcggaacggccggcagcgctgatcgatgtcgagaccggctggctcgcgcccgtgcgcctggcctgggatttggtgaactaccgctggaacctctgggtgctcggctacaacgacgtgcgccagcgcgaattccttgcgcgcctcgccccctggctggccaacctcaacgccatgctctggctgctcggtgccggcagcacgctgttcatcctcggcctggccggcttttacctgctgcgtgaaaagcgaaccaaacaggatgcggccgcccggctctacgcccgcttctgccgcaagctcgcccggctcggcctggaacgccacggcaatgaaggcccggtggctttcgcccgccgcgccggcgccgcccggcccgatctggccgaaacgatcggcgcgatcacccggctctatgtcggcctgcgctacggccgggccacggcagagaccctgcgggtattgcggcaaagcatccgccgcttccggccgcgcaaggctgccggcaatgggcaatccggagtaacctagtcagcaatcggcataccccttttcgtcatgccggcgaaagccggcatccagttttatttcctgggttccgggtcaatgccgcatcgcggcatgcccggaatgacgattggcaatgccgtatccatcacccatgagattcatcgaagaaagataaccatggccacctgcggctgcggcgacgtttgcgccagcgacaaaatgcgcgacagtcaggccaggacgctcaggatcgtcctggcgatcaacctcgtgatgttcggggtcgaggccacggccggctggctggccggctccaccgcgctcatggccgattccttggacatgctgggcgatgccctggtctatggtttcagcctctatgtgctggcccgcgacgacagatggaaggcaatctccgccttcatcaagggcggcatcatggccggcttcggcctgttcgtgctggtccaggccatcgacaaactgctgcaccccgcgctgccgacctacgagaccatgggcgccatcggcctcttggccctggccgccaactcgctctgcctgtatctcttgtggaagcaccgcgccgacgacgtcaacatgcgctcggtctggctctgctcgcgcaacgacatcatcgccaacagcgccgtcatcgtcgccggcgccggcgtctggctcaccgccgcgcaatggcccgacctcgtggtcggcttgggcatcgcggcactcttcctgcgctcggcgacccatgtctttaccgacgccgtccgcacctaccgggcggccagcgtcaaaacttagaagtggtcgcgcaccaccacctcgctcaagggcagttgccccgcgcgcggccagggctcgcgcatggccttgccaatggcgaggaacaggccgatgacatggccggccggcagcttgatcagcggtgccacctggtcgaagtccgacaggtccatcgggcaggagtcgtagcccatggccttggccgccagcatcaggctctgcgccgcgatgccgcaggagcgcatggcttcgtcgcgctgcacttgctcgcggccgtcgtaataggcctggattgcggccaccacgccctcgcgcacatcggccggcgcatcgcgccaataacgctcggggctcttccgccaggcgtcgaggtcggcgcacagcaccagcagcaaagaggcatcggtgatctgcggctgcatccagctcaccgcccgtagcttttcgcgtagggccttgtcctccacccgcac

SEQ ID NO: 1822 - DNA, 23120 bp, synthetic construct
  misc_feature 1..23120: note = Synthetic
  source 1..23120: mol_type = other DNA
  variation 16598..16823: note = n is a, c, g, or t
aagatggcgccatctccggcctgcgtgtattgcgctcgggcgtggtggtgacgtcgtcgggcaaacatgtgacgcgcttctatgatggactcacgggcaaatcgcttggcagcgcgctgcgaacgcagtcacagccgctgtacagcgaagacgaaaaactgctgacggcgcgcatcagtccacaggcactgggcatttggcaaagtgccgatggcaagcagattctcgaatggaaagcgaccgaaggcgacctgccgccttacgcactcgaccccacgttcaagcgcatgatcatggccaatgacaaaggctggcgggtgatcgatctggccagccgcaaggagttggtggcaggtgaagatgcgctcagtcttgcccagttcacgcccgacggcaccttgttggcggtggccgataagtccggcaagttgatgctgtggcaggtcgcgaccggcaagaaggtgatggatgtgcagagcattgccacgccgctgctgcgtttcagtccggacagcaagatcatggcggtgtcggaggatgggcgccgtttgcgcttgtgggatgtgcagaccggtcaacccgtggggcaggtgattcccgtggtgtcgggcgcgcgctgggcggagttctcgcacgatggacagcgtctgttcgtgcaggacaatccgcccgaatcgctggtgccagcggtgaaggccatcgacagccacaacggcaacctcattgccatgccgttcgcgcgcgtgtttgcccaggagctgatgctggtgaagggcgagcagcagctcatcaccatccacaacgatctgggcaccacacaggcgctgatctggcaagtgcccggaaccatgcgcttgccgccggagcaactggcaggcgatctggaaagctactacgggcgcaagtacgacatcgcaaccggcgcgatcgagccattcagtggcaagggggactacagctcgtggttctttgccgatccgtatttgcgcccgactgcgccgggcgcgtccgtcagtgtgatggacgacattcaacgccaactgccactggaaagcggcacgcagatgcagacgctggcggccacctatctctaccacccgcttgcgcgcgcgggcattgctgaatttctggcgcgtcagggccgcttggatgtgctggccatggagctggcgcagagcaccgaatggcaactggccaatctgcctgacaccgcaggcgcgcgcgcgaccggcgtgctcaccacgcagaccaccgaatggttgaagaaggcgcgcgagcatctggggcaacgcgagcagacaacccaataggaaacccaagcagcatgcaactcaatcgcaaactcgtcagcctgttctggagcgtggtggtgttggccatcctcgtgctcacctggatcgggctggagaaggcctaccccgatattgccgcgattcgctatctgcccgaccggctgttccggctggtcaagactctcatgggcaacgatccgctgggatcggggctggaggcgccagccgttccgtgggaactgatcgcagcgaagctgctggtcacgctggtgctgatacgcgggctgatgaaaattgtcggcagcgtgttccgcgacaacgtcacgcagctgcgtgcagcactgaagcgacgccacaccatcatcgtgggcgcgggacgcaagggacgcagcattgcggcggacctgcgcgagcagcacggcgagaaggccgtcatcatcgagcagcaatcggcgcacagatcgtccgccgatctgcgccgcgcggggcatctggtgctctcaggcgacgccacatccaaggccatgctgcgcagcgcaggcgcgctcaaggcgaggcaggtgatctgctttgcgcgcgaccagaaaaccggcattcaggtagccggccgattgcgcgagttgtggagcgcctcatccgccgctgacgacaacggctgcgactgttatgtgcatctggacaatccgcgattggtcgatgtgttccgggggcatgacggcgcgcatgcgcaaacggtacggctgcattttttcaatctgcagaggatgatggcgcgcagcctgttcgcgctcctgccgcaggagctcgggcccgtgttgcaggacggcagtgtgcgcaagttgcgcgtggatctgatcggattttccctgccggggcaggccattctcttgcagggcttgcgtgtgttgcatctggggctggagcaaggcgtggaatggcatgtatgggtcgacgcaaacgcctgcagcgctgcgcgcgagcaactcgtcgcgagccatccactggccgatcgcgtggccgatatccgctttcatggcgtggatgcgcagtaccgggcgttgctggatgcgcaagtgggtgaggccgacggcacgttgtgcctcgtcatttgtgcgttggatgatgacgatgccagcatggccgctgcggcagagattctgcatgccacgcccaccggcaatttccccgtgtttgcgcgctgcgaagattcttccggtctcgcgacgttgctttcgggttccagtcaacgcttgaaattgtttggcaacgtggaagagttgtgcacggtcgagatgatttgcggccagctgcaagatcgcatggcgcaggccatacatgccgactatctgcaactggtacaagagacggcgggcgaaagcagcgcctacaaaacgccatggggtgcgctgaatgaggatgcgcgtgacgccaaccgcgcgcaggccgatcacctgccctacaagcgcatgctggcgggcggcgatgtgtcgcatatcgatgagcaggggctggaattcctggccatgatcgagcaccagcgctgggccgcgcatcgctatctgaatggctggcgcttcgggccggagcgcgatgacgagcgcaggctccatccttccctgctcccatgggccgaattgagcgatggcgaacgcgagaaggaccgcgacgcggtgcgccggctcggacaaatacagactctcggcaaggtggttggctgaaagctaaaatacgcggttcgcttcaaggagcgctgcagcaggcggagtcatcgtctgtcaggcttggagcagcggcatcccgcatgccgcctgaatgcagattccgtaacggcgctcacctgtgttttctttccggtcaattcatacaacaggtgagcacgatgacagcagccaaccccacgagtagtcccgccaattccgccgcagtgccgcccatgcgcctgtcgggtctggagccggtcttcatcggcgaaggatcgctcttcgtcaacgtgggcgagcgcaccaacgtcaccggctccaaggctttcgcgcgcatgatcctcaacgaacagtacgaggaagcacttgccgtggcgcgccaacaggtggagaacggcgcgcaggtcatcgacgtgaacatggacgaggccatgctggacagcaaggccgcgatggtgcgctttctgaacctgatcgcctccgagcccgatatcgccaaagtgccggtgatggtcgactcgtcgaaatgggaagtcatcgaagccggtctgcgctgcctgcaaggcaagggcatcgtcaactcgatctcgatgaaggaaggtgtcgagcagttcaagcaacaggccaagctcatcaagcgctatggcgcggccgccgtggtgatggcgttcgatgaaaagggacaggccgatacgttcgagcgcaagacggaaatctgccagcgcgcttaccgcgtgctggtcgacgaagtgggatttgcaccagaagacatcatcttcgatccgaacatctttgccgtggcgacgggcatcgaggagcacaacaactacgcggtcgatttcattgaagcggttcgctggatcaagcacaacctgccaggcgcgaaggtcagcggcggcgtctccaatgtgagcttctcgttccgtggcaacgacccggtgcgtgaggccatccacaccgtgttcctgttccacgcgattgcggcgggcatggacatgggcatcgtcaatgccggcatggtgggcgtgtatgacgatctggagcccacgctgcgcgaacgtgtggaagacgtggtgcttaaccgccgccccgacgccgccgagcgtttgctggagattgcggaaaccgccaagggagccgccaaggacgacagcaaaaagctggagtggcgcggcacgccggagaacccgaagaccgtgggcgagcgcctgtcgcacgcgctggtgcatggcatcaccgacttcatcgtggacgacacggaagaggcttatcagggaatcatcgcgaagggggggcgtccgctgcacgtgatcgaaggcccgctcatggacggtatgaacatcgtcggcgatctgtttggcgcgggcaagatgttcctgccgcaggtggtgaaatccgcccgtgtgatgaagcaggcggtggcgcatctcgtgccctacatcgaagaggaaaagcgtcagcaggaagcggcgggcctggacgtgtcgagcaagggcaagatcgtcatcgccacggtgaagggcgacgtgcacgacatcggcaagaacatcgtcacggtggtcctgcagtgcaataactttgaagtcatcaacatgggcgtgatggtgccttgccatgagatcctggcacgcgccaaggcggagggggcggacatcgtcggtctgtccggcctgatcacgccgagtctggaagagatgcagtacgtcgccggcgagatgcacaaggacgattatttccgcatcaagaagattcccttgctcatcggcggagcgacctgctcgcgtgtgcatacggcagtgaagattgcgcccaagtacgaaggcccggtggtttacgtgcccgacgcttcgcgcagcgtgagcgtggcgcagagtctgttgggtgagcagcgcgatacgtatctggctgacgtgcaggccgactacgacaaggttcgcaccctgcacgccaacaagaagaaggtgccactgtggacgctggagcaagcgcgagccaactccacggtgatcgacttctccgcgcacccgcctgtggcgccgcgtgccatgggccgccgtgtcttcaagaatttcgacctgtcggagatcgcggagtacatcgattggggcccgttcttccagacttgggatctggcgggaccgtatccggccattctggatgacgaggtcgtcggcaccgaggcgcgcaaggtactggcggatgccaaggccatgctcaagaagatcatcgaaggccgctggctgcaggccaatggcgtgatgggcctgttcccggccaatcgcgtgggcgatgacatcgagttctacaccgacgagtcgcgcagtcaggtgctgatgacgtggtacggcatgcgccagcaaaccgaaaagacggccattgaaggggtgatgcgtccgagccgttgcctgtcggattttgtcgcgacgaaggacagcggcatcaaggactatgcgggtctgtttgccgtcactgcgggcatcggcgcggagaagaaggacaaggagttccaggatgctcttgatgattattccggcatcatgttcaaggcgctggcagatcgtctcgccgaggcatttgccgagtgcctgcatcagcgtgtgcgaaccgatctgtggggctatgcgtcaggcgagcagctgaccaatgagcaactcatcaaggagcagtaccagggcattcgccccgcgcccggctatccggcttgccccgaccacacagcgaagacggaccttttcaaggtgctggatgcagcggaaatcggcatgacattgaccgacagtctggccatgttcccggcctccagcgtgagcggtttctacattggctatcccgaggcggtgtatttcaacgtcggccagatcggcgaagaccaggtggaagacatggctgcgcggcgcgatatggatgtggatgcgttgaagcggttgttggcgccgaatttggcctaaatacagccattattttgtattttcgatatacagatcattatttgtattctgaaaatacagttaatgacctgtaaagcggaaatacagcgtatagtgtgttttcctgcttctgaaaggagcgcagatggacgaattcacagtacgtacaacacagcaacttccaacgctgctcaaagcgtttcgaaagacagccaaactgacgcaaacggatgtagccaagcggctgggcgtgacgcagcagactgtctccgcgatggagcgcaacgcggagtccgtgagcgccgagcggctcatggcgctcatgaacattctgggcgtcgatctggtgctgcgcgcgcgggccgcacccgttatgccccagccgcttgccgtgcgagaggcagacggcccgagctggtaagccatgacagcgcaggtcaaaggcaaagcattggggctgtggatgaacggccagtttgtcggcacgtggagcctggatgccggcggtgacgtattgcagtacgacagcgcgtgggtgagcgattccagactgcgtcgaccgttgtcactttcgcttccgttcacgcccggcaatcgaccgcacaagggcgatgcggtgcgcttctattttcagaatctgctgcccgacaacgaacgcatcctggagcgcattgctcgtcggtacaaggtgggcgcgacagacgcctatacgctgctgcgggagatcgggcgcgattgcgtaggtgcgttgcagatattgccggccggtgaggagccgccgccagatttgaacgtgcgatatgaggcattggatgaagcggaggtagcgcgcattcttcgcgccgccgtcagtccggctgcgtttggcgacaacgcgcacgatgatgcggaattccgcatctcgatcgccggggcgcaggagcaaacggctctattgttctggcaaggcaggtggtgcaggccgcttggcgcgacgccgacatcgcacattttcaagttgcctttgggagtgatcggcaacatgcagtacgacatgcggcattcggtggagaacgaatggctgtgttccagattgctggcggcttacggggttcctatagcaccgtgtgcaatggtgcagtttgaggatcagaaagtcttggccgtggagcggtttgaccggcaggtgtggaatgacgaggcgctattgcgacttccgcaagaagacatgtgtcaggcgttgggcatatcgccattgctgaagtatgaaagcgatgggggcccgggtgtcgagcagatcatgaatttgcttgatggctcggtgaagcgcgagcaagaccgccatcagttcttcatggcgcaattgttgttctggatgttgtgcgcaacggatgggcacgccaagaatttcagcatcttcttgcggcccgaaggaaaatttgaaatgacgccgctgtatgacgtgctgtccgcatatccgctcctcggcgcaggcgcgggccagctctctgcgcgcaaggcaagaatggccatggccgtgcgctccaagaatccacactggcacatggacaaggtcgtgcgcagacattggcaggccgtgggcgaacgctacggcatccagtcgtccaatggctctgctgtagatgcaatcatcgacatgatcgtcacaagaactcccgcagtcattcaacaggtgcaggatgagcttccagagcacttccccgcggagctggcgcaagcgatcttcaacggcctgagcgctgccgcattgcgcctagggcgcagtcacgactgaagcacaccatcgcggctccacaataaagaaagccccgcaagcagggccttctgatggcagtgtggattacaggcccagttctctgtcgtacgccttgcgcgcttgcagtgccgtggtcgtgaagtcggtgaacacgccgtcgatacccaggcggtaatacgccagatactcttctttcggatcacctttgtagatgcccgccagccgaccgggttcgttgcggaaggtgaagctgtgcaccatcaggccttcgcgatgcgcatcgtggatcaggcgtgtgtccttgagcgtgttcacgtccttgaggccagcgccatccttgtacggaacgaccgaatgggccatcacctgtggtttccatggaccgatgccgtcggcataggtgcggatttccgccagtcccttgcgcgtgagcatttcaccaaacgtgcgcgcgtcgccagccagcgtccagctatagggtctgccgctgatgaaggtccattcgtcgttggtgatgtaaatcatcgagccatcgcggtaattgatgtcatttccatcaatcaattgcaccgccttggcgcgcattcccgccttgcgcaggtacttcaggctggccgggtcgaaactctggatgaagatgggtgacttgcgatcgttgatacggttcttattgagcaaatccatgaccgcgtcttcaaatggataggttcccggcttgccgcaaccgttggcaatcgcctgctggttattccaatatgggttcttcacctcggcatatacagaaatcgtacgattttgctcgcggcttttggcaatggcgatatcgatcacatcttgtgcgctgatcagcggcagtttgccattccattcagtaggccgctcgttcgcgttgtcgaggattttcccgccgatccagtcgcgcagctccttcatggtgaaatcgctgatcgaccagtcattggtgtgatcctcgccatccaccacaagcgccttgagcacggatttgggatcgttcggatcgagttgatcggacagataacgcgagggaccattctctggcttggcgggatatttcacattcacccacacgccgggggtggtgcgcttgcggcgcgccacttcggcattggacttggccacctcggccacattcgtgttgtcgccaagccatgcgttatggcgcgccaccaactggcaatcgcgtgtcatgtgcatgtccagttccagcatgtccgcgccggcatcggcggccttttcgtaagccatgcgggtttgctcagggtacaggccagaaaagccccgatgcgcaatcacctgcggtgcagagccatccagtgtcttgtagggcgaggaaccccaccaatcatcgtctccgccgccacaagcggtcaatacagtagcgctggcaagcaagccacagagcgtggcaagtcgggtgggtcgcaaattcagattcatggctgaagtccctgagtagttgtacggtgtctggcttctattcagtgccagcgcgcaatgctcgtgacgatgcgtgaatactgtgtgacagcataccttctacaagtatttgcgagaagtaggacgaaggcacagccggaaaagacgaaagccccgcatgcggggctttccatttggcacgaaccgagtgttcctcgagaaaaactacagcgcgcttaagttacggcgttagtcagtggcactgggatatgtgttctagtcggaactatccaccattcttcatatttgcatgcaaaatgagtagggttggattgctgggccaaatggggctaacgctccgactcatgggtgcccaactcccatgcgccttcaactctcctattgttcatgctctcacctcctttccatctgtgccgtagttcgagtcactttaattgacgaatggtggatacgatttgaaattgatcaaagaatgccacattagtgaaagcgtgctgggccagagttgtgccaaagacgaaagccccgcatgcggggctttccatttggtgcatctttatgcttgttagcgtccagagcacatatcccagtgaactggtggaggcagtatagacggagaaatgattgcgaacaagcaaaaacaatcgcgtgacctgaatctccgtccaaatggaatatgcgctcccggcggaaccaattaccaaatggtatccacgcagcgattctataaaggaaaaatatatcgcaattaccagtgcccgggggatctgagactaatctgatccagatcgcgtattgagaggatttgtgcgtgatagtctgccaatgctgcgtggaaaatgattcaaaaataaggggaaagatcgcatgacatatcgtttggcattggatttgggctcgacatcgttgggatgggcggcattgagcatggacgaaaccggaaagcccattgccgtcaggcgggctggcgttcgcatcttcagcgatgggcgcaatccgaaggacggctcctcattggcggttacccgccgtgcggcgcgcgccatgcgtcgtcggcgcgaccgcttgctgaagcgcaaagatcgtatgctgaacaagctgattcactacggcttctttcctgcggatgacgcggcgcgcaaggcgctggaaaagttgaatccctatcaattgcgtgcaaaggggctggaatcggcgcttacgtccggcgagttcggccgggcgctgtttcacatgaaccagcgcaggggttttttgagcaatcgcaagaccgataaaaaggacaacgacagcggtgcgctcaagcaggccattggaacgatgcgcgcacagttggcagaaaccgggtgtcgcacggtgggggaatggtattggaaggagcgcatgcagcagcgcctcgagggcatcaaaggccagggtgttcgcgccagatatcgcgagacgcctttcgtgaatgaagacgggaaaaatcgaatcgataagcgctatgacctgtatgtcgagcgcgcgatggtggcgcaggagttcgatgcgctctgggcagtgcaggcggcgatcaacccagacctattcaccgaagcggcgcgcgttgatctgcgcgacaccttgctgtttcaacgcaatctaaggcccgtcaaacccgggcgatgcactctgatcccagaggaggaacgcgcattgctcgccttgccgagcacacagcgtttccgcatctatcaagaagtgaatcacctaaggattttgtaccccgatctgcgcgaggagaggttggacctcgcgcaacgcgatcagatcgtggccttgctcgaggccagccagaaagtcaccttcacgcgaattcgcaaggcattggggctgtcgggcgagtgccaattcaacctggaagatgccaagcgtcaggagttgaaaggcaatgccacagcggtcgtgctggggcgcaaggacgtatttggcccgcagtgggcgggattcgatgccgctttgcaggacgaaatagttcagcaactgatgacgaatgaaagcgaagagcagttggtagcctggcttcaatccaccgcaggcgtcgatgaggagcgcgcaatggcggccgccaatgtggggctgcccgaagggtatggcggcctcagcctgaaagcgttggccaagataattcctgcgttggagcgggatgtggtgacctacgataaggcggttgcagcggcgggattcgcccaccacagcgacctcggcttcgatttcgaccatgacgcgggcgatgtggagcagattggggaacgcacgatcgcatcgtccggtgagatcaaacccgtctttgctttcaagcaattgccttattacggtcgagcccttcaacgccatgtggctttcggtagcggcaagccggaagacactgacgaaaaacgcttcggcaaaattgccaaccccactgtgcacatcggactgaatcaggtgcgcctggtggtgaatacgctgatacgccgctacgggcgacccagtgagatcatcgtggagctggcacgcgacctgaagcaaagccgcgaacagaagcaggaaacgcaacgccggcaggcagacaatcaaaagcggaacgcacgcattcgcacatccatttccgagacgcttggaatcagtgaagaacgtgtgcgcaccgcagacatccagaaatggattctttgggaggagctgagctttgacgtggcagaccggcattgcccctacagcggtgtgcaaatcagcgccgccatgttgttaagtgagcgtgtggagattgagcacattcttccgttctcccacacgctggacgacagcctgaacaaccgcacggtggccatgcgagaggcgaaccgagtcaagcgcaatcgcacgccttgggcggcgcgcgcagacttcgagtccatggggtggagctacgacggcatcctgcagcgcgcagaacgcatgccgcgaaacaagcgttaccggtttgcagaagatggatacgaacgctggctcggcgaggaccaggactttctcgcgcgggccttgaacgacacacgctatctctcgcgcgttgcggcggagtatttgcgcctcatcgctcccggaagcgccacgcgcgtcattccggggcaaatgacggccatgctgcgagcgaagtttgggctcaacgatgtgctgagtctggaaggggtgaaaaaccgcaatgaccaccgacatcacgccgtggatgcgtgcgtgatcggagtgacggatcaggggatgatgcagcgatttgcccaggccagcgcaaacgcacgcgaaagcgggctgacgcgactggtcgacgatatgccgatgccctggtccacctaccgcgatcacgtgcaacgtgccgtggaccatatctgggtcagccacaggcccgatcatggacacgagggtgccatgatggaagaaaccagttacggcattcgccgtgacggcagcatcaagcaacgcaagagagccgatggcagcgcaggacgagaaatcagcaacctgatacgcatcgccgagccgaagcagttgcagcggcatggcgtagatgcgcaaggtcaggcactgccctacaagggctatgtggggggcagtaactactgcatggaaatcacgctgggagacaaaggccactgggagggcgccgtgatttcaacgtttgaggcttattccatcgtacgggcgcgaagaatttcagccctcaggaatcgatccgttggacagaacggtaagccgttggtcatgagattgatgatcaacgacatcgtcaggctggaggtgaacgacgttcttcgcacgatgcgcgttgccacgatatctggaggaatgcaggtattcatgtcagacgttcacgaagccaatgcggatgcccgcaatcgctcaagggaattgccgtacgtgtcaaagatgcctcgatcctttcaaaaggccaaggcgcgacaggtatccatctcacccattggcgaacttcgcgatcccggcttcaaggggtaagggcaatgattggccgcattgtcgaaattgcggacgatcgccgtcacttgtatgtcaaccgcggcttcatggttgtgcgcgattcagaaggcgagcgcaaggagctaggccagataccgctcgacgacattgccgccgtcatcgccaacgcacacggcatcacctacaccaataatttgctggtggcgctggccgatcgtggggcacccttcgttctctgcggcgcgaaccacaacgtggtcggggtgttgttcaccctgagcggacaccatgttcaggccaaaagaatagaagcccagatcgccgccagtgcgcctaccagcaagcgcatgtgggcagctgtcgtcaaggcaaagcttgaacagcaagccgctgctctggaggctgctggcgagccaaccatcccgttgacagcactgatcggcaaagtccgcagcggcgatccggaaaatatcgaagggcaaggtgcgcgtcgatattggaccttgttgtttggcgccgattttcgccgcgaccaggacggaggtggactcaacgcgcttctgaactacggatacaccgtactgcgctccgccatggcccgttccgttgtggcggccggactccatcccagcatcggcctgcatcacagcaatgactcgaacgccatgcgcctggtggacgatctgatggagccttttcgccccgtcgtcgatctcaaggtgtggcaactcaatcggcagagcgagagcgaggtcacgcccgaaaccaaaagagcactggtgcgggtgctgcacgacgacatgcagaccagcataggcgtcacgcccgtgatggtgtgcatgcagcgattggccacgtcgcttgcgcaagtgttcctcgatgaacggaacaagctggacctaccacttccgggactgcccttgtcgatggcgagcggcctggaagaacaatgacccccatatgcgctctggataccgcctcatgtggatgctggtgatgttcgacttgccggtactcaccaaggcggagcgaaaggccgccacagggtttcgcaatgccctgcttgatatcggttttgagatgagccagttcagtgtctatttacgcttctgcaccagtcaggcgcaagtcgacacaatgtgcaaggccgtagaacgcgtcttgccgagcggaggaaaggtgcatatcctccagttcaccgacaaacagtacgaacgcacgatcactttccacggcaagaacgtccaagccggcagaaaaccacccgatcagttcgatcttttctaacaaaagccatgatttttccgacccggaacacgaaaaaccccctgataaatcagagggttatcgcggtcagagtttagttcactgggatatgtgcactggccggaacactgaggccgttcgcagcgcatgcatggcagtttagttcactgggatatgtgcactggccggaactttatggggcatatgcctgcactgagctgagtttagttcactgggatatgtgcactggccggaactacgccaaagccatcatcgctaccgttctgagtttagttcactgggatatgtgcactggccggaacgtcgccgagctggcgctgaaagacggcgaaagtttagttcactgggatatgtgcactggccggaacgcgcacctgcgcactgtctttcgtgatgagagtttagttcactgggatatgtgcactggccggaacaagcttgccgacgtcggcaagcgtgatcgcagtttagttcactgggatatgtgcactggccggaactttccgccattgctccgactgcgattgcgtagtttagttcactgggatatgtgcactggccggaactgtcacggtgacaggcagcgcctcgaacgcagtttagttcactgggatatgtgcactggccggaaccatccttgcgtttcagtgtttcattgatctagtttagttcactgggatatgtgcactggccggaactcgctccctgtgctgcccgccacgcgcgctagtttagttcactgggatatgtgcactggccggaacggtctgcagtcaaaggtaaccccggcgcctagtttagttcactgggatatgtgcactggccggaactggtgggcggtttgggtgttgttgaaagatagtttagttcactgggatatgtgcactggccggaactcaaaacgatttcagaactcaaagaacgcaaagtttagttcactgggatatgtgcactggccggaacgaaagaaacgaccgtattttgccgacgcttagtttagttcactgggatatgtgcactggccggaaccccggccagcacgtagggcagacccacgtgagtttagttcactgggatatgtgcactggccggaactgcccaggccctcgaagagccgccggcgctagtttagttcactgggatatgtgcactggccggaacgactctgcaggggcgcgcacagacagcgagagtttagttcactgggatatgtgcactggccggaaccgcgggctgactcctgagtggcactatctaagtttagttcactgggatatgtgcactggccggaacacattctgtggcattgtctcagtgttgggtagtttagttcactgggatatgtgcactggccggaactcatgcgctacgagagcgtgcgcgaccccgagtttagttcactgggatatgtgcactggccggaacttcgcactcagcatctcgcgccgccagatcagtttagttcactgggatatgtgcactggccggaacttcaagaaagcgcgcaacactgaggtgccaagtttagttcactgggatatgtgcactggccggaacttggagcgtgaatggggcgctgcgatgggaagtttagttcactgggatatgtgcactggccggaaccaatcttgagcgtgccactcaacgcgaaatagtttagttcactgggatatgtgcactggccggaacactcctcatagccacctgcgcggcctcaaaagtttagttcactgggatatgtgcactggccggaacagcgccagagccgaagccgaagcgctcacgagtttagttcactgggatatgtgcactggccggaacttgcggcagcgtggagagcagaaactccaagtttagttcactgggatatgtgcactggccggaaccgtcggtgtatttgtgcaggccttgcgccaagtttagttcactgggatatgtgcactggccggaaccagccacgtatacgccaccatgcgctccatagtttagttcactgggatatgtgcactggccggaacggattgcttgcaaactgcacaggaaacgtcagtttagttcactgggatatgtgcactggccggaactcgataacccgttttgcgacgatgtagacgagtttagttcactgggatatgtgcactggccggaacccgccgccagagccgccatcaattccggcgagtttagttcactgggatatgtgcactgnnnnnnnnnnnnnnnnnnnnnnnnnnnnnnnnnnnnnnnnnnnnnnnnnnnnnnnnnnnnnnnnnnnnnnnnnnnnnnnnnnnnnnnnnnnnnnnnnnnnnnnnnnnnnnnnnnnnnnnnnnnnnnnnnnnnnnnnnnnnnnnnnnnnnnnnnnnnnnnnnnnnnnnnnnnnnnnnnnnnnnnnnnnnnnnnnnnnnnnnnnnnnnnnnnnnnnnnnnnnnnnnnnttagttcactgggatatgtgcactgaccggaccgcaaatgcgcacttcggacgcgtcgacgagaacccttcgcgtcgtcgatatctttcacctgaacaccgcctccactgcaccatccagttgatccctgagcttggttccctgttctatcttgctgacgaccgtgcctttggcgtcgaggatgatggcggtggggacgactttgatggtgccgaaggtgccgaaatcaaaattgcgcatcttctcttgtcctgtcggggggagcgagcgcatggcgatggggaagccgagatctctggattcggcgagctttttgccgcgcagtttgaacgggtcgccaaggtcgacgaacagcacctgcaggccttttctcttgtattggttgaatgcgttgatgaccgcggggcgaccgttggcgacgcagggggcgcaccagtcggcgccgaaataaatgatgaggggtttgcctgcgtagtcggcgaggttaacgggagctccggagaccagttccagttgctccatcgcccggggcttgtcgccgatctcgggctgccaggcatggacggtgctggacagtgcccagaaggtgacgaatacggcaaggccgagcaagtcgatggcgcgcagtttctgcatggctgtctccctcgttctggtatggcagacgagtgttgcatgcggaaattgacggcgcaatcgctggcggaaagcgttacgccgttaactttcgttactgccctgtgcgggctaccccgttctggggaggctcacgcaggggagtgcgcgccgactctggtggtcagaggcccagaaccttggcgacgtaatccgcgtccttgtcgccgcgcccggagaggttgacgaggatgttcacgtccttgcccagcttgggggcggcgcgcatggcccatgcgacggcgtgggcgctttccagcgccgggatgatgccttccacgcgcgagagcgtcatgaaggcgtggaggcattccttgtcgtccacgctttcgtagtccacgcggcccaggtctttcaggtagctgtgctgtgggccgacgccggggtagtctaggcccgaggcgatggagtgcacggcagcaggtgtgccgtcggcgttttccagcacgtagcatttcatgccgtggatctcgccgggcttgccgatggagagcgtggccgcgtggcgaccgggttggtccacgccctcaccggcgggctcgacgccgacgaggcgcacgttctggtcgttgaggaaggcggtgaagatgcccatggcattggagccaccgcccacgcaggcagcgatgtgatcgggcagcttgccgtgtttttgctggaactgctcgcgtgcttcgcggccaacgatggactggaagtcgcgcaccatcatcgggaaggggtgcgggccgacgaccgagccaatggcgtagaggtagttggtggggtcgttgaggtattcctcgaacgcgctgtccacggcttccttgagcgtggctgcaccgcgtgtgacgggcacgagcttgcagccgaggatgcgcatcttggtgacgttggggtgttctttttcgatgtccacctgccccatgtggatctcgcacgggatgccgaccagcgcgcaggcggtggccagcgccacgccgtgctggcccgcgccggtttcggcgatgaccttggtcttgcccatgaacttggccagcagtgcttcgccaaggcagtggttgatcttgtgcgcgccggtgtggttcaggtcttcgcgcttgaggtgaatctgcgcgccgccgagctgatccgaaaggcgtttggcgtggaagatggggctgggccgacccacgtagtcagcgaacaggctggccagctcttgctggaagtcttcgcgctgcgaaatctgctcgtacgcgacgaggatgtcgtccatcgcctgcttcagatgcggtggcaccaactggccgccataggggccgaagaagccgttggcgtcgggcatggcgttggtgtcgaactggttcgtcatgggttgtctctctggaaatggtggttgtacgaaaacagaacgcaaagatcgcgttcataccatattgcagaggtcgtagacggcagttcgggtgcgcgacagcaaaaatgcgtcgaccccgcgaggtttggtgaggcttacgtttcctgggcggtgctggcgctgcgcatgatcgggctgagcgccgcacgcaggcgtccggcggcgtcgccttccggcgcggcgggtggtgcgaattccagcgagcgctcgacggtgccgatgtgctccagcagcagttgcttggcacgctccgtgtcgccttgttccagcgcctgcacgatgccttcgtgctctgcgcacgactgggttgcgctgtgcgacgactggtagagcgtggccgccagcgtggtgcgcgcggtgaggtcgcgcagggtgtcagccagcaggcggtggcccatctgctcggccagacagacgtgaaaatcggccagcaggaaggcgcgtgtggcggcgtctgcaccttcgatggcgcgttgctcgtgcgcgatgtggcggcgcaggttgccgatcacctgctgcacggggcgcccggcttcctgcaggatgccagcctcgatgatgcggcgcgccgaaaacgcatcgcgcgcctcgtctgccgacggctgcactacaaaccaacctttgcgcgcctgcacctgaacgaagccgcgcgcctgcaattgcaccagcgcctcgcgcaccacggtgcggctcacggcgaagttgtctgccagatcctgctcgcccagccgcgcgccgggcgcgagcttttgtgcgagcacggcttcgacgatgcgctcggcaatgtgggctggggtagcaggcgtggcagcggagttcatggcgtgatcgtaccgttgtccgtcacggtgtctgtcattggcagggcatggccgtcgagtacggcgtgcgcgcgctcgcggtcgatgtcgccctcccaggcggccacggcgacggtggcaacgcagttgccaatcaggttgcccagcgcgcgcgcaatgccgatgaaccagtcgatcgacaacaccagcaccagcccgatggcgggaatcgccgggatcgcatgcagcgtggcggccagcacgacgatggcggagcctggcacgccgtgcgcgcccttggaggtgacgagcgagatggccaggatggtcagcagatccgtcatgctgatcggcgtgttggtggcctgggcgatgaacacggcggccagcgtgatgtagatggaaaacgcatcgagattgaacgagtaaccggtgggaatcaccagcccgaccgtggagtcacgaatgcccatgttgcgcagcttggccatgatttgcggcagcacgctgtcagacgaggtggttgcgaacaccaccatcagttcttcgcgcagatagcgcagcagtttccacaggctgaagccggacacgcgcatcacgaagcccagcaccacgaagacgaacaccagcacgcccgcgtagaacagcagcaccagcatgcccagttgcttgagcgagccgatgccgtatttgcccacggtgaaggcaatcgcgccgagcacgcccagcggtgccagcttgatgatgatggccatgatcttgaagagcaccagcgacgtggcatcgaccacggcggcgacgggccgtccgcgctcgccgagcatggacagcgcgcagccgaacagcacggcaaacagcagcacctgcagcacatcgccagtggcgaaggcctgcaccacggtgttgggaatgagcttcatgagaaagtccacgaagccgccagacgtgagcttgtccgcattcgtcgcataggcgctcatggccgaggcgtcgagcgaattcacatcgacattcatgccgtgcccgggctggaacacgaacgccagcaccagacccatcaccagcgcgatggtggtcagcacttcaaagtagatcaacgccttgacgcccacccgacccacgcgccgcaagtcgcccgcgcctgcgatgccgtgcaccacgacgcagaagacgagcaccggaatgatcatcttgatcagcttgatgaagccatcgcctagcggcttgagcttgacggcgaattcgggcgacatcagcccgatgagaactccgatgacaagcgcgatcagcacctgcccgaacagtgatttggcgaaacgccccatggtgacactcctgcttggttcagattggcatgcaaacgcgaaaatcttgcatacaagaatgtagacaagctaaaaacgtgccaaaagcgggtttaccagtacaggctttagagcgggcactccaatgcgcagggccggcgccaagtgagtgcgcgcgggcactcggactgcaccttgccagtgcatgggtggcgcatggatcgggaggaaatagactacgcccatgagagccagctccgttcgagacattcttcttgcccacgccatcgaaaccgctgcgccgaatgaggcgctgccaaccgctgcgcgctgcgacgccatcacgcaggagacactgcacgccatgggcacgcccacggccagcgcgcccaaccatgcgcaattccaggagttcctcgggcagcgtgcgcgacgcatcattcaggccagccagttgcccgacgagttgcggcaggtgtggaagcatgccccgggcatggcccgctgggtgccgctggcggtgttgctgggcgcgttggtcatcggcttttgcatgcaccggtttaccgatccgcaccgggtcgatctgctggcgccgtcgctgctgggcatcgtgctctggaacgtgctggtctatctgtggatgtttggcgcgtgggtgcgcggcctgctgcgccgcacgcccgaagcagcgcgcgcgctggagtcggccagcggcggagcggcggcaacgcagcccacagcgggttggcgcggcaagttgcgcgcgcgcctgcccgtgccgggcgggtcgggtctgcgcaaactggcactggcctatgaacgcaactggtggcaggtcagccgtcgcacgcgccatgcgcagtggttgatgtggctgcatgtgggggcggcgttcatggccgtgggtgcgctggcgtcgttgtggacgaccggcctgacgaacgcgtaccaggtggggtgggagagcacgttcctgtctgccggacaggtgcagtcggtgctgaacctgatgtttgcaccagtgcgttgggtcaccggtgcgggagcgtggacgctggcggagattcaggcactgcagggctgggtgagccacacggcggcgaccggcgcgacgctgccgaagccggtggatgtgggcgtgggacggcattgggtgctggcgtacacggggctgttggggctgatcgtgattgcgcccaggctggtgctcgccctgtatcagggcgtgcgcgcaggatggctggcgcggcatatgcagttgccattgacgcaaccgtatttccagaagctccagcgcgatctgggtgggttggcggtcacgctgcatgtgctgccctacagcttcgagatcaacgcggcgcggcgcgatgggctgcagcactacatcgctgcgcaatatggtgcgggcgcccatctggtgatcgagcctgccttggcgtatggcgcaaagctgccctcggctgcgtcggtggcgggcaagggcgaggatgcggcggcggtgctgctcatcaacatggcggctacgcccgaggcagaaatccacggcgaactgctgcaagctgcacgtgagcgctggggcagtcatgcggccgtctggttgtggacgcaggactttgccgagcgcaataccggcgcaccacgccgcgtgcaggaacggcgcgatctttggagcgagtttgtccggggtgcaggtctgacggccacctgggtgccgcagtaagcaggtacaggcttacacttcacgccatgcccaacgagacccttcccgagactatcgcgcaggatgcggcggacagtgcgcgtcagatcgactggtgcctgctgtcccataccaacattggcaagaccacgttgacgcgcactttgctcgcggacgatgtgggtgaaatccaggacgcggcgcacgtcaccagccagtccaggcgctatctcatgcagaccgatgccgagggcgatcagctctggctgtgggacacgccgggctttggcgattcggtgcggctgtatgagcgcttgcgccaacagggcaatccgctgggctggtttctctccaacgtgtgggaccgctggcgcgacaaacccttctacatgagccagcgcgcactggtggccgcgcgcgatcatgcggacgtgatgctct

SEQ ID NO: 1823 - DNA, 23117 bp, synthetic construct
  misc_feature 1..23117: note = Synthetic
  source 1..23117: mol_type = other DNA
ccttgaagaatcagttattgatcgaattagtcgaaaaaatcacagtcccagcctaactggggatgaccgcagggtttttcaagatccgatttgcagccgccggatggccccgctgaattgcggcaggccgggccagccggtgatccggcccaggcgcttgccgccacggaacagcacaaaagtcggcacaccatgcagaccgaaacgctggccaagcccgggatccgcgtagacgtccgcctgaaaccaggacaggcccagctccagcagggcgtcgcggtgcaacagcgccgtctgcttgaaaatattgcagttgtagcagtcctcgccccagagaaagacgcagcgcagatcatcacccgccgaattaacgacgatttcgtcgaaattagcgctcgataccggcgacatgccgaaggtttcgaacacctggctgggatcaaagccgctcatggccgcgtcttcaacagggagggtcaacccgccgacaccaccaccagcgcggggcgcagggtccggtcggcaatgacatagcccttttgcagcagctgcaccacggtattggccggctgctcggcaggcaccgaggagatcgcctggtgcagatgcggatcgaatttgtctcccggagccggcgcgacctctttcaggagattgcgctcgaaggcggatgtcagctgcctgagggtgacttccacgccttcgcgcagggcggcgacggtctggtcgggctgggccaaggcggcctccaggctgtccttgaccggcacgaggctctcggcgaaggattcgattccgaatttgcgcgccttggagacatcctcctgggcgcggcggcgaacattctcggcttcggccatggcgcgcagcgcctgttcttgctgggcctgggcctgggcctgggcggcggccagttcggcgcgaacggcggccagttcggcctgcaggtcatcagcgggcagatcggcgccggcgtcttggtcgacaggctcttggggtgccgtcatgagaatcctccagaatagggaaagtgcggtatcagcccctaaatgagggccgcttccctggtttcaaggggggtacgggtcaaaaaggaccaaggcccgccgcatcgcgaacgggcccggggtttacttcttgcggggctgggccggcgccggagggtcgctggccgggaaagactcctccagggcttcgtcgatcaggtccggacggtcttcctcgggcgtgatggcgatggggtcgctggccggaaaggtctccatcagcgcctcgtcgagatcccgttcgacctcgtcttccttgagatcgccgtgaccgggcgcgccggaggtgcccacgctggggcgggtggggggtgtcatcttgccgtctccttgaaaaggctttcgcggaatagacaatgcctgggcacgcaggcgtgccagccgacttcagtttacgcgattggccggcgcgtggccggccaaccttgcaactggttctggaccaggtcggccaggcccgccacccacagcgggctgtcattgagcgccgggatgtaacggaagcgcttgccgccggcctccatgaatgcgtggcggcactcctggtcgatttcttccagggtttccaggcagtcggccacgaaaccggggcagaccacatcgacctcggtcacgccctggcgggccagctccctgagggtgggctcggtatagggttccatccagcgcgccgagccaaagcggctctggaaagccacctcgacctgctcgggcgccaggcccagacgttcgcgcagcagccgggcggtctccaggcaatcgcggtaataaggatcgcccagttcgatggagtagcggggcagcccatgaaaactcatcagcagcttctgcggcctgccctgcgcgtcccagaaagcgcggatgcgctcggcctgcgcgtcgagataggcggggtcgtcgtagaagcgcttgacgaagcgcagggccggctggtcgcgcaggcgcgcggcatggcgcgtgacggcgtccaccgcggtcgcggtcgtgctggccgcatactgaggataaaggggcagcgccaggatgtggtcgcagccctgctcgcgcaggcgcgtgatgccctcggccaccgaaggctggccatagcgcatggccagggccaccggcacgtccaggccgcgctcggcaagcgcggcggccaggccctcggcctgctggcggctgtacaccatgagcggcgagccgccttccagccagatgcccgcatagcgcggcgccagtttcttgggccgcagcgtcagcaccagcccgtgcaggatgggtttccagaggtagccggggatctcgatgacgcgcggatcggacaggaattcgcccaggtatttgcggatatcggccttggacggcgtctccggggtgcccaggttgaccagcagcacgccggcgcggcccgggccgcggggcggcggatggtcatcgaacgggtcttcgccgcgcgccggctccgccagaaagcgctcgggccacaagtacttgaacagccgaagaaacacagacctctcccgggggcaccccccgcgggatgccgttgttgttggaattattgattgtggctgagcgcgttggacagcagccgggcggtgatatcgacgatgggtatcacgcgctcataggacatccgggtcgggccgatcacgcccagcgtgccgacgatctggccgtccacgccataaggcgccgtcaccacggtgacttcgtccatgggcaccagctgggaatccccgccgatatagatctgcacgccttgggcacggctggagacgtccagcagctgcagcagatcggttttcttttcgaacagcgcgaacatcttgcgcagccggtccatgtcggaggcgatgtcggtcacatccagcagcttgcgctcgcccgaaatgaccacggaatctccctcgtcggcggcctcggcgccggcctccaccgccgcctgcatcaggcgcgagatatcctcgcgcagctgggtcagctcggtcgacagcgtgcggcgcaccgcgtcgaaggacttgccggagaagtgctggttgaagaaattggccgcttcgacgagttcgctctcggcgtagtcgcgctgcacctgcatgatgcggttctgcacgtcgccatcgggcgtgacgatgatgagcagcacccgcttgtcggtcaggcgcacgaattcgatctggcgaaacacctgcgcccgcttgggcgtgagcaccacgccggcgaactgtgtcaggttggacagcagggccgcggccgcgttgacggcccggctgggctcgaccatgggcagcagctcgcccatattggccggctcgaactgatagggatggacggccagcagggaatccacgaacatgcggtagccccgcggagtgggcacgcggccggccgaggtgtgggggctgtggatcagacccagctcctccaggtcggccatcacgttgcggatggtggccggagaaaggtcgaatacctttgaaagcgtgcgcgaacctaccggttgcccgtcggcgatatagcgttcaatcaacgctttcaacaaagctcgtgcgcggtcgtccatatgtgtattttatggaaagttttgccaggaggcgatttttgtcctccgacatgatatgcggccccatataatcgcctgatacgcctcacgaatccactgaaacccgctcatgcactttcctatcgtcgccctgatcggacgctaccaggacaccggcctggacgctcccctgcgcgccctggccgacatgctcacgcaggcaggccggcgcgtcctggtcgacgccgatacggcgcgcaacaccggggtccatgagttccccgaagccacgctgcaggaaatcggcgaatccgcctccctggccgtggtcatgggcggcgacggcacggtgctgggcgcggcccgccacctggcgccgtatggagtgccgctggtgggcatcaaccacgggcgcctgggcttcatcaccgatatcccgctgcaggacgcccgccaagcgctggcgcgcgtgctggacggcaacttccagatcgaagagcgcatgctgctgcaaggcagcgtgtggcgcggcgacgcgcagatgtattccgcctcggcgctgaacgacgtggtgctcaaccgcgccgggcgcggcggcatgatcgagatgcgcgtcgagctggacggcgtctatatgtatacccagcgcgccgacggcctcatcatcgccacgcccacggggtcgacggcctatgcgctgtcggccgccggccccctgctgcatccgggcctgaacgccatggtcctggtgccggtggcgccgcaaagcctgtccaaccggcccatcgtgattcccgacaccggcgtgctcaatatgacgctgacggccatcggccgcgtcgagaccggcgcctcggtgcacttcgacatgcagacctggtcggatctgcaactgggcgaccgcatcaccgtgcagcgcgccccgcataccgcccgcctggttcatccccagggctacagctttttctccaccctgcgccgcaagctgcattggaatctgatgccgcaggccaccgacaacatcgagtaatcccggcagcgcccgccatgttgcgaaccctgcatatccgcgacttcgtcatcgtcgaacagacggaaatccatttcggcgccggtttcaccgtattcacgggcgaaaccggcgcgggcaaatccatattgatcgacgcgctggccctggcactgggcgagcgcggcgacgccagcgtgctgcgcgaaggcgcggccagggccgatatcacggccatcttcgacacgcccgcgcacctgtcggcctggctggccgagcgcgaactcgagcccgccgaagagctgtcgctgcgccgcgtcatcgatgcccaggggcgcagccgcgcctatatcaacggcatgcccgccaccgtcacacagctgcgcgaactgggcgacaccctggtcgacatccatggccaacatgctcaccaaagcctgatgcgccccgacgcgcagcgcgagctgctggacgcgcatggcgggcatggcgagctgcgccaggtcgtggcgcaggcctggaagcactggcgcggcctggctcgccagctcgaaaccgccgagcaagacgccgaagcgctggccgccgagcgcgaacgcctgcaatggcagaccgaagacctggaccgcctcaacctggccgaaggcgaatgggacgcgctgcaggccgaacacagccgtctgtcgcatgcccaatcgctgctcgatggcgccagccagattctcgaagccctggatggcgaacaggactcggcgctgtcgcgcctgaacgcggccagccatcgcctgcaacagatgcagcgccacgacagcggcctgggcggcatcgccgaagagctggaatcggcgcgcatcgccatgagcgaagccgtctccgacctgaacaactacctgagccgcgtcgacctggatccggaccgcctgaatgcggccgaggcgcgcctgagcgccgtcttcgaaaccgcgcgcaagttcaagaccgagcccgagcacctggccgccctgcacggctcgctgcgcgagcagctggcccagctgcaggccgccggcgatgtcgacgccctgcgcgcccaggccgaggccgcgcgggcgcaatatgacagcgccgcggcgctgctgaccgaggcgcgccgcaaggtcgcccgcgacctgggcaagcaggtcacccaggccatgcagaccctatccatgagcggcggccgcttcgaggcggccctcgcggccggtccggccagcgcccagggcaatgaaaccgtcgaattcctggtcgccggccatgccggcaccaccccccggccgctggccaaagtggcctctggcggcgaactctcgcgcatctcgctggcgctgtcggtgatcgccagccgcgcggcgcgcgtgcccaccctgatcttcgacgaagtcgacagcggcgtgggcggcgcagtggccgaggtcgtgggcaagctgttgcacgagctgggcgggcgccatcaggtgctgtgcgtcacccacctgccccaggtggcggcctgcggcaaccaccaattccgcgtcagcaagaccgaaaaaggcggcgtcacgcgctcgcgcatcgtcgaactcgacgccgacgagcgcatcgaagaagtggcccgcatgctgggcggcatcaccatcacgtccaccacgcgcgaccacgcgcgcgagatgctgcagaacacccgcgcggcctgatcgtccggcgcgcggacaaaaaaagccccggcctgggccggggcttgagtgctgcgctgggcgcgatcaacgggcgcgctggcagtccgagcaaataccatacagcaccatggcatggctttcgagcacaaagccattgtccttggcgaccttgtgctggcgcttttcgatgtcgacatcggaaaactccaccaccttgccacagttggtgcagatgaggtgatcgtggtgatcaccgtcgttgagttcaaacaccgccttgcccgtgtcgaactggctgcggctcaggatgcctgcctgctcgaactgggtgaggacgcgatacacggtagccaggccgatttcgacgctctcgccgatgagggcgcgatagacgtcttcggcgctgaggtggcgctggtccgacttgcggaaaatgtcgagaatcttgaggcggggaaacgtcgccttcaagcccatgttcttcaattcgctttggtcgctcatgtagtcgctctccgtccactgaggcgcggcgccggagcccggcccaacctgggtctagtaatgcggccccatttccgcaccgccgcctcgcatgatgaaacggcctacaagacattggctggcagagccccaattcccgctgccttgcggaactatccgttatttaaacctttatgataacggttttgtccgtttccaataataggggcgcgtagtgtccatgattgctcgtaatccctcccggcccatcaaggcagtgctgggaaccctggtactggccgcggccctggccggctgctcttccggcaaatggggcttcccctatcgcgcggacatgcagcaaggcaactggatcacccgcgaacaggtcgcgctgctgcagcccggcatgtcgcgcgaacaggtgcgcttcgccctgggcagcccgacgctgaccagcgtgctccacgccgaccgctgggactacccctattacttcaagcccggctatggcaaggccgaagaacgccacttcacggtcttcttcgagaacgaccgcctggtgcgctggagcggcgacgagcagcccgagctgcagcctttccagatcaacaaggtcgacgccgagcgcgccgagaaagccgcaaacaccgaagacaccgccgagaagcgcgaagagcaggccgagaaggccgagaaggccgagcaggcccggccccacatccaggtgaactcgccggtctcgccgaccaatgcctaccctggcctgcccggcaatgcgcccgaacccctcaagtaagctccaaggaaagacaatgcgtattgcaatcgccggcgccagcggccgcatgggccacatgctgatcgaggccgtcctcaacaccgagggcgtcgaactcgccgtggcgctggaccgcaagggctcgccgtcgctgggccaggatgccggagccttcctgggccgtgataccggcgtgcggatcaccgacgacctggacagcctgtccggcgccgactgcctgatcgacttcacccgccccgaaggcacgctggagcacctgcaggcctgcctgcgccatggcacccgcatggtcatcggcaccaccggctttgacgatgccggccgcgccgccatcgaagtggccgcgcaaaaaatcgccgtggtgttcgcgcccaatatgagcgtgggcgtcaacgccacgctcaagctgctggacatggccgcccggatcctgaacagcggctatgacgtcgaggtcttcgaagcgcaccaccgcaataaggtcgatgcgccctcgggcaccgcgctggccatgggcgaagccgtggcctcggcctggaatgtcgccctgcccgacgtggccacctggacgcgccacggcgacaccgggccgcgcaaacccggcaccatcggcttttcggtggtgcgcggcggcgacatcgtcggcgaccacacggtctacttctgcggcacgggcgagcgcatcgaaatcacccaccgctccagcagccgcgccacctatgccgagggcgcggtgcgcgccgccaaattcctcgacggcaagcacaacggcctgtacgacatgcaggcggtgctcgggctctgagccgcgccgccaccctgcatgaaaaagccggctcgcgccggctttttcatgcagggtcccttaacgcaccacgatgggctcgggctccagccgcacgccatagcgcgccatgacatcatcctggatggcggccgccagcgccaggatatcggccgcccgcgccccgccccggttgaccagcaccaaggcctgacggtcgtgcacggcggcgggccccaggccgcgccccttccagccgcactggtcgatcagccagccggcggccagcttatagcgcccgtcgggctgcggatatgacaccaggccgggaaagcgggcctgcagacgctcgcgcgtggcggcgtcgaccaggggattcttgaagaagctgccggcattgccgaccacggccggatcgggcagcttggcgcggcggatatcgcagaccgcctggaagatggcgcgcgcatcggccggcccttgctgcaaggccggccagcgctgcaggtccggatactccagcacggcgcgccaggggcgcggcaaggcaaagcgcacccgggtgatcagccagcggccgggctcgcgcttgaagacgctgtcgcgataggcaaaacggcaatccgcggccgaaaagcgcacggcgcgcgcctcgcgcaagtcccaggcggtgaggctgtcgaaacgatccgccagctccaccccgtaggcgccgatattctggaccggcgcggcgcccaccgtgcccgggatgagcgcgaggttttccagcccatcccagccctgctcgacgcaatgcgccacaaaatcatgccagcgctcgccggcggccgcctcgacgatccatgcatcgggacgcgcctcgaccagacgtatgccgcgcaaggccacccgcgccaccaggccgtccacggtctcgcccagcaccagattgctgccgccgcccagcacgaaacaggcgggataggccgccgccagcgccgacaaggcaggcagctgggcctcgtcctccagggtgacgaaagcgtcggcgcgcgacgccaggccaaaggtgttcaaaccgcgcagatcctgggccgcgggcgcgagggatattgacatgggcacgaaaagctatgctatagtttctgtcttcgctcatattacttgaacgattgatgggtctggcgccagcctgcgactcgcggattcgagaccgcggcgcggcacggcaaaaaaagccgcagccagcacaaatcaaaattttcatgtataatgcgcgtctttcgtgaatacagcggtgcgtcaaaccactgccaaaaacgaaacccaagcgggaatagctcagttggtagagcgcaaccttgccaaggttgaggtcgcgagttcgagactcgtttcccgctccaaattttgaattcatggctgataaacattcacccatgaagccccatacagaaaggccgaaaccttgagtttcggcctttttctttttctcccacgcaacaaacacgcgcgccccgtccgcagggtctccgaagaaatgacgaaggccccgcatgcggggccttccatttggtgcatctttctgcttgttagcgtccagagcgcaattcccagtgaactgttcacaacgttagcatactttgctacaaattaaaattaattcgaacaggcacaaataaataagggacatcatggcaaagcaagtcagataccgcttatccctcgacctgggctccacgtccctgggctgggcaatattccgccttgatgccgacgcccaccccacggccattatcaaagcgggcgtgcgcatcttcagcgacggccgcaatgccaaggatggctcatcccttgcggtgacgcgccgcgcggcgcgcagcatgagacggcggcgggatcgattgctgcgcagaaaaacccgcatgctggatgcgctgctcgagtacggctttttcccgcaagatgcggcccagcgtaaagcgctggagcggctcaatccctatgccttacgcgctgaaggtttagcgcgcccactgacgcccggtgaattcgctcgtgcgatatttcacctcaatcaacgccgaggcttcaagagcaaccgcaagacagacaaaaatgacaatgacagtggcgcgctaaagactgccaccagccaactgcgacaagacatacaggccagcggctgtagaaccgtcggagaatggctgtggacacagcgcctgcagaagaaaccggagggtgttcctcatcagggcgtaagagcccgataccgggaaacaccccacatcaacagcgagggcaaaaaacgcatagaaaaaaagtacgacctctatatcgatcgaagcatgatcgaggcagagttcgacgcactctggagcgcacaggcaaccttcaatcccgtggtcttccatgccacggcacacgaaaaactgaaggacatcttgctttaccagcggccattgcggcccgtaaagcctggtcgttgcacgctcttgcccgaagaggaacgcgcgccattggcgttgcccagcacccagcgattccggatctaccaagaactaaacaatctgcgccttcttgtcgatcagctcaatgaacagcccctgacacttgcacaacgcgacacgattgccaccctgatggaaggtcgggcaaagatatcattcgaccaaatccgcaaggcgctcaaactcgggagcatgaccaagtttaatctggaagacgacaaacgaaacgaactcaaaggaaacgccacgggcagccagctggcaaagaaagagtttttcggcccggcctggcatcagttcgacgaagcgctgcaggatgacatcgtctggcacctcttgtccgaggagaacgagagcgcgcttatctcctggctacaagaccggacaggtatcgacgccgccaccgcgcaggccgtttccaacgcatccctgccggaaggatatggaagcctcagccgaaaagcgctggaggtcatattgcccaggcttcggagtgaagtcatcacctatgacaaggccgtgcaggcagccggcttttctcatcacagccagcttggcttcgaatatgatccggacgacgttgaggattggatcgaccacgcgacaggcgaagtaaaacccatattcaagcgactgccttactatggcaaggccttgcagcgacacgtcgcttttggcagcggcaaacccgaagactcccaagagaaacgttacggaaaaatcgccaacccgacagtgcatattggcctgaaccaggtacgagtcgtcgccaatgccttgatcgcccgttacggtcgtccgacggaaatcatcatcgaattggcgcgcgacctgaaacaaagccgggagcaacggcaacaggaccaaaggcgacaagccgacaaccagaagcgcaatgcccggatccgaaattccatcgcgcaagccctgggtatcgccgaagcgcgcgtacgccgagaagacatccagaaatggatcctctgggaggagctcgaccccggagacgccatgcaccgttgctgtccatacagcggcgtgcccatcagcgcctccatgttattgagcgaacaggtggaaatcgaacatatcctcccgttctcaatgactttggacgacagtctgaacaaccgaaccgtatccctgcgccaggcgaaccgcatcaaacgcaaccgttccccgtgggacgccagggaggacttcgaagcacagggctggcactacgatggcatcttgcagcgcgccgggctcatgcccgtccagaagcgctatcgtttcgccgccgacgggtatcaacgctggctgcgggacgaccaggactttctcgctcgggcgctcaatgacacccggtatctttcgcgcatcgcggcggaatacttgcggctggtatgcccacagggtacgcgggtcatccctggccaattgaccgcgcttctgcgcagacgattcggcctgaacgatatcctcggcttggagggtgaaaaaaaccgcaacgaccatcgtcatcacgccgtcgatgcctgcgtcatcggcatcaccgatcacggtctgatgcaacgctttgcgcgggccagcgcacaggcccgcgagcaaggtttgacacggctggccgaagaaatgccgctgccctggccgacctaccgtgatcatgtagaccgtgcggtatctcttatatgggtcagccataaacccgatcatggccacgagggcgccatgatggaagaaaccgcctatggactcatgaaagacgggaccattcgtcaacgccacaaggcggacggaaccaagggacgcgaggtcgccaatgtgattcgcatagcggagcccgcgcaacccacccggcacggcgtcgatgatcaaggccgccccctcccctacaaaggctacattggcggcagcaattattgcatcgagatcacccgcggcgctcaaggcaaatgggaaggcacggttatctccacttctgacgcctatggcatcgtgcgcgctcgcggcatagccggattgcggaacacatcgcagggccaaaatggtcatccacttgtcatgcggcttgtcattggagatagcctacggctccgaatcaacgatgcgctgcaaaccatgcgggtaaccaagatctccggcaatgggcaagttttcatggctggcgtacacgaggcaaacgtggacgcccgcaaccgggataaatcccaggcatttgccctggtgtcgaaaatggcgggttccttgcaggccgcccaagcccggcaagcgacgatatcgccgataggcgaaatccgcgatcctggatttccgggctaggacgccatgatcggccgcatcgtcgaaattgcggatgaccggcgccatttgtacgtcaaccgtggattcctcgtcgtcaaggatacggagggcgaacgcaaggagcttgggcagatcccgctggacgacatcgcggccgttgtcgcaaatgcgcacggcctgagctacaccaacaaccttttggtcgcgctggcggaacgaggcgctcccttcgtgctttgcggatcaaaccacaatgtaatcggcatgctgctatccgtggatagccatcatatccaggccaagcgtatcgaagcgcagatcgccgccgcccttcccacgcacaaacgcctgtgggccaccgtcatcagagccaagctcgctcaacaggcagcaaccctaatagcaaccggagcgcctagcgctcctttgctcgcacttgtacgcaaagtcaaaagcggcgatcctgaaaacatcgaaggccaaggcgcgagacgctactggactttgctattcgggccggatttccggcgagacatcgatggcggcagcctcaacggccttctcaattacggctacaccattctgcggtccgctaccgcgcgggccatcatcgccgccggtctacatcccagcatcgggctgcatcacagcaacgatgccaacgccatgcgtctagttgacgatctcatggaaccgttccgccccatcctggacttaaaggtatggcaactacgcaaggcgggcgagactcacgtcacaccagagaccaaacgcagcttggtgcacgtcctgcatgacgacatgcagacaaaaactggagtgacgccggtcatggtatgcatgcaaaggctggcagtatcgttggcccaggtctacctgggagaacgaaaagacctcgaactgcctctgcccggcctgccaacttctctggccaatagcctgaacggcgactgattttcgacatgctttcgggatatcgactaatgtggatgctggtgatgttcgacctgcccgtccttgaaaaagccgaacgcaaagccgcctcggcttttcgcaataccctgctggatctagggttcgagatgagccagttcagtgtttacctgcggttctgcaccagccaggcccagcttgacactttgtgcaaatcggtcgaacaatgccttccggaaggcggcaaggtccacgtactccaattcacggataaacagtacgagcgcacgatcacctatcaaggaaaatcgcgccaaccctcgaaaaaagccccggatcagttcgatcttttctgacaatgagcactctttttttactcagagaattgaataaccccctgataaatcagggggttatgggaacaacattctagatcactgggaattgcgctctagccggaacatgtttatcgtgatcacgattttgtcgtggattctagatcactgggaattgcgctctagccggaacgcggtggttctgcgccgattaacattaatattctagatcactgggaattgcgctctagccggaacagtgatcttcttcgtaacataacgcgctacattctagatcactgggaattgcgctctagccggaacactagcgttgtagttatgttgcgtgattgcattctagatcactgggaattgcgctctagccggaaccgcatcgacggaccgcagatcagatcatcgattctagatcactgggaattgcgctctagccggaacaagtcgaagtacagcatgttgagggactagattctagatcactgggaattgcgctctagccggaacgtatgccgtattcgatgcgcccccagcagattctagatcactgggaattgcgctctagccggaactctttcacgtcctttccttgagagagtccaattctagatcactgggaattgcgctctagccggaacggtcgtcacgccttcccgaccgccgctgtcattctagatcactgggaattgcgctctagccggaacagtggcgtttcagctgtcattcccgtacctattctagatcactgggaattgcgctctagccggaacatcagtcgcatgaagctgccgccgtactgaattctagatcactgggaattgcgctctagccggaacgggtgagggcgtagaggggaatgttcatggattctagatcactgggaattgcgctctagccggaacacgtgttacgacgcgatttcgcttccaataattctagatcactgggaattgcgctctagccggaactggaacaagaagtgatcgcaccgccggaagattctagatcactgggaattgcgctctagccggaactatttggattggtgcaagttctatctggaaattctagatcactgggaattgcgctctagccggaacttgcccgtcatggacgtgacggcgccgtcgattctagatcactgggaattgcgctctagccggaacatccatccgaattcactacgggccaagctgattctagatcactgggaattgcgctctagccggaacatagcgatgcagggacggcgcgcgttgactattctagatcactgggaattgcactctagccggaacggccgctccagtaccactcgtgacgaaactattctagatcactgggaattgcgctctagccggaactcagatgcactgctacatccgccagtccgaattctagatcactgggaattgcgctctagccggaaccctacgcgggttcgactcccgcagcccgctattctagatcactgggaattgcgctctagctgaaaaaaattggcagactaccccacacggcagaacgtgaacctcttaacgctccattaatccaagtcctggatccttgattgtcattgtgagcgcaggcggagtggatggggttggattaccggtgtttgtcagtgtttccgggcgtgtgtccgtcctgggcggcaagccatgcatagcgtcggcccattttccgtccaggtgatcgccgtggcgcttgccgccgtcctggcctggctggccgcgcggctgctgtggcgcaaggacggcacgggcaagcgcgccgccgccgtgctgctcgacgccctgctcatcggcctgctggccgcccgtgcgctctatgtgctgcgctggtggccggattacagcgccgcgccgcgggccatcgtgtccgtcggcgatggcggtttttattggtgggccggtctgccggccggcctggcttatctggcctggcgcacgcgcgggctgccgccgctgcggcaagccgcgctgggcagcgcggccatcggcatcgcagtgtggactttcgcccagggctatatcgtccaggcgcggcgggcgtccctgcccgccctggcgctggagacgctggatgcgcgcccggtctcgctggatcaatacgccgggcagccgctggtcatcaatctgtgggcgtcgtggtgcccgccctgccggcgcgaaatgccggtgctggcgcaggcccaggcggactatcccggcgtgcgctttctcttgatcaaccagggcgaagacgcggcgaccgtgcgcgatttcctggcgcggcagggcctggcgttcaaggatgtgctgctggacccggcttcgcgcgccatgccggcgctgcgcacccgcggcctgcccacgacgctgttcttcgatgcgcaaggacggctggcccaggcgcatatgggcgaactgaccgccgcgcgcctgcgccagacgctgcaagatcctctcatgtcaccgccggacgcaatcaggctccaggagtagcgccatgttctcaacaaaatcccttgtctccgccctgttgggcatcgccgccctgggcgccgccgcgaacggctttgccggcgagccggagcgtcccgccgtgatccgcgcgctggagcgccagggcctaagccacgtccaggaactgggcaaggtcagcgggctgcgcggctacgccggcatggcgggccagcagcccatcaccatctatgtggccgacgatggcaatgccatcgtcggcagccgcatcagtcccgagggcgagaacctggacgaggctcgcgtgcaggaactggtcgccaagcccatgggcgaggccatctggaagcagctggacgagtcgacgtgggtggccgatggcaaggcgcgggcgccgcgcgtggtttatgccttcagcgatcccaattgcccctactgcaatcgcttctgggaagccgcccgcccctgggtggacgcgggcaaggtgcagctgcgccacatcatcgtgggtgtcatccgtgccgacagcagcaccaaggccgccgccattctcggcgcgcccgaccggagcgccgcgctgctcgagaacgaacgccatttccgccaaggcggcatcaagcccgcggccagcgtgccggcggccatccgcgacagcctggataacaatcagatcctgatggcggagctgggttttcgcggcacgcccggcatcctctacaaggacgagcagggacgggtgcagcgcgtcaatggcatgccgcgcccggaggccctggagcgcgtgctcggcccacgctaggcgcgccccgcgccgctatgtcttgagcgcatccagcaaggcggcttcgaggcggtccacatcgaccttgcggttgtggccatgaaagctgatgcgcagccgctggcggcgcggacatggttcggcaaggggatgtccggcgatgggagcctgggcatgaccgtgagcgcgcggactcaggcccagtttagggcttgggcatggcccggttccggggggatccgctactatcagccatgcattatctgcatagcttgatgcgtattatttccgtggctgacgccgcggccagacgatgaatacccagcagctcgactacctcaagcaggccgtcaaggccggcagtttttcccgcgcggccgatatcctgggccttagccaatcccgcttgagccggcaggtggcggccctggagcaggaaatgggctgcccgctgctgaggcgccatggccggggcgtcgccgccaccgccgccggcgaacgtctgctggcgctggccgagacctttctgcaggaagtcgcccgcctgaagtcggcgggcgccgggcgcggcttgcagggcgagttcaagctgggcgtgcccatgttcttttcgcagtccctggcgccagacctgatggcggccgtgcgcagccgttatcccggcttgagtttcacggtgcgcgaagggcctagcggcgatctgcacgattggctgctggccggcgagctgtcggcggcggtgatccacgagtccaagcgcccgcgccagctggaaggcgatgcgcttttcctggagccggttttcgtggtcggcacgcgcgaactggcgcggcgccacggcctgcccctggaccggggcctgagcctgcgcgaactggcccgactgcccatcctggtgccgacccgccgccatggcacccgcctggatttcgatgcgctcatgcgccggcaccggctgacgcccgacatcgtccatgaagtagacgcgctgggcgcgcgcatgctgctggcgcgcagcggcgccggcgtgacgatattcgagtcggcgggcctgctggccgaaagaaaagacccttcgctttttgtgctgcccctggccgacccggcattctttcaccggctggtgtgggtggatgcgcgcgaaccggagcgcggcgcccaatggcgcggcctgctgcgcttcctgaagcgcggcattgtgcggctgcgccaggatctgggtgatggcggcccggccaagctcttgcagtcctaggcattcggggctacattgtcgacaatcagctcaccaaaggcgaataaatcgggcaaacaccgaccaaacgtctcaggattgtcaacacgatggaccaacccatcctgccctcagatctccccggagacagcgagaccctatccgaccagctgttccgcaagctgcagtccgccatcatcaagggcgagatcgcgccgggcagcaagatgtcggaaccggaactggcccgcgcccatggcgtgagccggggccccttgcgcgaggcgctgcaccgcctggaaggccagcgcctgctggtgcgcgtgccgcacgccggcgcgcgcgtcgtgtccctgagccccaaggagctcagcgagctctacgaaatccgcgagtccctggaaggcatggcctgccgcctggcggcggcccgcatgccggccgccgaagtccagcagctgcgcgatgtgctgcatgcgcatgaaaaagacgccgccttccaggccgggctgggctattaccagcaagagggcgattacgacttccactaccgcatcgtcaagggcagcggcaatgagatgctgttccgcatgctgtgcgacgagctctaccagctcgcccgcatgtaccgcatccagtactccaacacccccaaccggccgcgccagtcgtatgccgagcatcaccgcatcctggacgccatcgccgagggcgacggcgaactggccgaactcctgatgcggcggcatatccgtgcctcccgtctcaatatcgaacagcaaatcacccaaggcaatcagcccgagagcgaagcatgaaccattcctaccgcaagcccctgccgggcacccgcctggactatttcgacgcccgcgccgccgtggaagccattgctcccggcgcctacgatgaactgccctatacctcgcgcgtgctggccgagaacctggtgcggcgctgcgaccccgcgctgctcaacgatgcgctcaagcagctgatcgaacgccgccgcgacctggacttcccctggtatccggcgcgcgtggtctgccatgacatcctgggccagacggctctggtggacctggccggcctgcgcgatgccatcgccgacaagggcggcgatccggccaaggtcaatccggtggtgccggtgcaattgatcgtcgaccactcgctggcggtggaatatggcggcgacgatccggatgccttcgccaagaaccgcgcggtcgaagaccgccgcaacgaggaccgcttccatttcattgactggaccaagcaggccttccgcaatatcgatatcgtgccgccgggcaatggcatcatgcaccagatcaatctggagcgcatgtcgcccgtcatctatacccaggacggcgtggcctatccggatacgctggtgggcaccgacagccatacgccccatgtggacgcgctgggcgtgatcgccatcggcgtgggcgggctggaagccgaaaacgtcatgctgggccgtgcctcctggatgcgcctgcccgacatcatcggcgtggaactcaccggccgcccccaggccggcatcaccgccaccgacatcgtgctgaccctcaccgaattcctgcgcaaggagaaagtggtcggcgcctacctggagttccatggcgaaggcgccgccgcgctcacgctgggcgaccgcgcgaccatctccaacatggcgcccgagtacggcgccacggcggccatgttcgccatcgatcaacagaccatcgcctatcttcgcctgaccggccgcgaagaaagccaggtcgcgctggtggaaacctatgccaagaccgccggtctctgggccgacagcctgacaaccgcgcgctatgagcgcgtgctgcgctttgatctcggcagcgtggtgcgcacgctggccggcccgtccaacccgcatcgccgcctgcccgtgtcggcgctggccgagcgcggcatcgccggcaaggttgaaaacaccccggggcagatgcccgatggcgcggtcatcatcgccgccatcaccagctgcaccaacaccagcaatccgcgcaatgtgatcgccgccggcctgctggcgcgcaatgccaaccgcgccggcctgaagcgccagccctgggtcaagagttcgctggcgcccggctccaagacggtcgcgctctacctcgaagaagccggcctgctgcccgaactcgaaaaactcggcttcggcgtggtggcctttgcctgtaccacgtgcaacggcatgtccggcgcgctcgacccggccatccagcaggaaatcatcgaccgcgatctctatgccaccgccgtgctgtcaggcaaccgcaatttcgacggccgcatccacccctacgccaagcaggccttcctggcctcgccgcccctggtcgtggcctacgccatcgccggcaccatccgctttgacatcgagcgcgacgtcctgggcgtggacgcccagggacgcgagatccgcctggccgacatctggcccagcgacgaagagatcgacgccgtggtgagctcggccgtcaagcccgagcagttccgcaaggtctacgcgcccatgttcggcatccaggacgaccgcaaatcggccgtggacccgctgtatccctggcgcccgatgagcacctatatccgccgtccgccctactgggaaggcgcgctggccggcgagcgcacgctgcgcggcatgcggccgctggcggtgctgggcgacaacatcaccaccgaccatctctcgccgtccaacgccatcatgctcgacagcgcggcgggcgaatacctcgccaagatgggcctgcccgaagaggatttcaattcctacgccacgcaccggggcgaccacctcaccgcgcaacgcgccaccttcgccaatcccaagctcttcaacgaaatggtgaagaacgaagacggcagcgtgcgccagggctcgctggcccgcgtggagcccgaaggcaaggtgatgcgcatgtgggaagccatcgaaacctatatggaacgcaagcagccgctcatcatcgtggccggcgccgattacggccagggctcttcgcgggactgggcggccaagggcgtgcgcctggcgggcgtggagaccatcgtcgccgaaggcttcgagcgcatccaccgcaccaacctgatcggcatgggcgtgctgccgctggaattcaagccgggcgtcaatcgcaagacgctggggctggacggcaccgagacctatgatgtggtgggccagcgcaaaccccgcgccgacctgaccctggtcattcaccgccgcgacggccggcgcgaagaggtggcggtcacctgccgcctggacacggccgaggaagtctccatctacgaggcgggcggcgtgctgcaacgcttcgcccaggacttcctggaggccgcctcggccgccgacgcccggcaagccggctgattcatcgggcgggcatcccgccccaacctttactctccctaccaggactgcgacatggcacatgccccccagatccgcatccccgccacctatatgcgcggcggcaccagcaaaggcgtgttcttcaaactggacgatctgccggcgtccgcccgggtgcccggccccgcgcgcgatgcgctcctgatgcgcgtgatcggcagccccgacccctatggcaagcagatcgacggcatgggcgcggccacctccagcaccagcaagaccgtcatcctgtccaagagcagccggcccggccatgatgtcgattatctgttcggccaagtcgccatcgaccagcccttcgtggactggagcggcaattgcggcaatctgtcggccgcggtgggccccttcgccatcaccaatgggctggtggacgccgaccgcgtgccggccaacggcattgccgtggtgcgcatctggcaggccaatatcggcaagaccatcgtggcccatgtgcccatgaccgatggcgcggtccaggaaaccggcgacttcgagctcgacggcgtgactttccccgccgccgagatccagctggaattcatgaatcccgccgaagagggcgacggcggctcgatgttcccgaccggcaacgtggtcgatgagcttgatgtgccaggcgtggggcgcttcaaggccaccatgatcaactccggcatcccgaccatctttcttgatgccgaagcgctgggctacaagggcacggagctgcaggacgacatcaatggcgacccggccgcgctggcccgtttcgagaccatacgcgcccacggcgcgctg

SEQ ID NO: 1824 - DNA, 23114 bp, synthetic construct
  source 1..23114: mol_type = other DNA
  misc_feature 1..23114: note = Synthetic
ggcgcggctgggcggcgcggggttgggggcatcggaaaagtagtggatggtcttggcgccgtaggggttgggcgggtagatggcccaattgcccggctggctgaactgctggcggatgaaggggtcgaggtagtccgtctcggtcacgaagtcgccgccgaaggtggtttcggggtaactcttgagcagcgggaagtaaagcgccccttcgtagcgcgcgatgagcggtttgtcgttggacaacacctcggccatcaggctcagggccaccagggtcacaaacgccaccaggctccagtaacccaggcgattgcgacggaagcgctgccaggcgcggcgggcaggcgatggggaggccattggcgaggcagacggcgtgggcacgggcgctgccgacggcgcggacacaggctctggcggtgcagcgtgggctgacggggccgccccgcctggtgtggctccggcctcagccatgcgcgcgccccagcagcaggttttcaaacgggtgctggcgtttgaagcggtaggcgccaaagtcgcgctcgtcggtggtgaggatgcggccatggcccaggtgctcggccaacagcaccagcgaggcatcggccaaatccatgggcaggccctggtagcgcgccatcagctgcgacaggcgcgcgttctgggcggcgggccagtgccaggtggcgatgctgccatcggccacttcgtccagcagcgcgcgggcggcctcggggccgatccagcgcatgagcaggtgcgtggcctcggtcagcaccggccaggtggtcacccagccctcggcctgcgtgcccagcgccgccacggcgcggctgtgccaggcatcgcgccggtccaccagcgcatagaagaaacctgcgtcggcaatgatcatgcgcggccttttcgcgtggcttttactgtggctctggcggcgcttttcgcggcgctgtcttcagcctttggctcgcccccgcccaccgtggctggcgcggccgggtacggcggctgggccggttcggccacctgccaggccggcgccgcggcgggcggcgcgtatttgccggcccagccttcggccaggcgcgccttgtagcggccagccacgtcggcgcggccactgtcgccctggccgatgaacgcgcccaggtgccgcagcccgctgcgctgcgcgcgcacgctgtcgtagtagtgctgcacgctggtgcgcaacacttcgctcacgcccatgccggtgacttcgaccagataggcgacttgctgatcagcttcttcatcaaaacgggcattgacacgcatggcgcactccttggtcaatggcaaaacggcttgtcatgcattgtatgacaagccgtttgggtttgcgcagggcctgcgtgcagagatcctcaaaccatcagccgcatcttgcgcgctgcttcggtcagctcatcgcggaacttggggtgggcaatggcaatgagcgacttggcgcgctcgtgcgccgtgcggccgcgcagctgggccacgccgtactcggtgaccacgtagtcgatgtcgttcttgctggtggtcacgtgcgtgccggggctgagcaccggggcaatgcgcgagatggtgtcgtccttggcggtggaaggcatgacgatgaaggccttgccgccgcggctgcggttggccgcgcgcacgaagtcggcctgcccgcccgtgcccgagtacaccttgatgccctgcgattcggaaccgcactggcccagaaagtcgatctgcatggtggcgttgatggcaatcaggttgtcgttctggcccgccaggtagggatcgttggtgaaatcgaccgggtgcatctccagcgccgggttgcggtgcatgaactggtagagcttcttgctgcccaggccgaaggtggccaccatcttgcccggcaggtagttcttgcggcggttgttgaccacgcccgcttccaccagggtcatgatgccgtcgccaatcatctcggtgtgcacgcccaagtctttcttgtcggtcagctgcatgaccacggcgtcaggaatggcgccgtagccaatttgcagcgtggcgccgtcgggaatcatctccgccacgtatttgccaatggcctgctgcaccgggccgatgttgggcaggcctacctcgaacaccgggtcttcgctttccaccagcgccgccacttgcgagatgtgcacgtggcagttgccgttggcaaagggcacgttggggttgacctccagcaccacggcgcgcgccttcttgatggcggccatggtgtagtccggccccaggctgagggagaaccagccgtgctcgtccatgggcgaagccaaggtgaacaccacgtcggcaggcatcagaccgcgctcgatcagcgccggcatttcagagaagtacgagggccggaagtccacccagccttcctgcccgccagggcgcgaagcgccgctgaaaaaataggccacatggcgcacgtggcgcacagtttccgggtcgaaatagccaaacttgcgtaccggcaggatttgcgagaccgacacgccctcgaactcgcgccgctgctccgacagcgcctccagcagcttgggcggttcggccacgcccgtaggcacgacgatggtgtcgccgttgcgcacatgacgcacggcgtcagccggggcgcagcgtttggcttggtactgtgcagtgaaactcatagtcagtctttctctttgcctcaaaaaacatgcgccacctgcgccgggcttgtttcgcacggcgcggcggcgtctttgtgatttagcccttgcggcgcagcgcgggcgcagccacgccagccagccccagccccatgagcagcaacgcccactcacccagcgtgggcacggcggtcacgccgctgcccgagccgctgcccgagggcgtcaggctgttgctcaccgccatcacgggtacggcatcgggcagtacggcaatgggcgcgttcggcagcacgggcgtgccccaggcaaagcccgcaggcggcgcaggcagggtttgcgccagcgtgcagttgctgcccagcggcacgccgtcaatcacggccgtgcccgccgcgccgctgtaggtaaagctgcccgcataggtctgcgcgccgcaggtcgcctgaaactgcaaggtggccgtttgcgcgggcggccagttggcgatggcattgagttgcacttcaatcttgcccgtcagaggcgtgatcttcacctgcccatcgccgccacgagtacgcgcgaaacccgttgcaggcggccacttcgtttccgccgggccgcccgcgccgcccgtcaacgccgctgccacgacctgcacctgccctgccgtagcggcataaaagcatgaaccgccgccgccgcccgccgtggcaggaaatgcccccgggtagcccgtgccatcaccgtcatagccatacaggccgccactgccggccgggtagccgccgccgccgccaccaccgccgccgccgtcttccttggcaatgggcaggcccgcacggcccggctggccttgactgccttgaatcgtctcgcccgcacggcctgcgccatggccgctcgcgcattgtgcgacgctggtcagcgcagccgtacccaccaggccagcgccgccatcggtagcggcacccgtcacgctgtcgcctgaaccgccaccgccgccgccggcttgcagcgcaaagctgcggccggcccaactgcctgcgtcgaaagaaaccttggagctgccgccgccaccgccgccgccgccgctgaagccctgtccatcattgcccggctcgccgcccttgccgccgctggagccacccgtgccacccgcaccgccccagggcgcgggcacgttcggctgacgcacgccccctgacgggcgagggccaaagttggacgtggccccttgcccgccaccgcctaccgccacagacagcacgtcgccagggttgaccttgaccgtagccgacaaggcgccgccagcgccgccagcgcctgccttgttgttgtcatacccgccgccgccgccgccgccgccggccagatccaccttcacggaagtcacgttggcgggcaccgtgtagctgtggttgccaggcgccgtccagctttgggcccaggccgcgccggtcgccaaggccatgccggccgccagcgccacgggatgagggaaaaaggttttcatggatgttttgcgcatatgggtctccctttcttgcaccacagccttgcgggccagcggcgccattcaaacagtgaaaagcattgcaatgctacgttactcatccggcgtgctgcccttggccatgcgcgccgtagtgaccatgactcagcagcctcaatcaaacttcacgcgcggatccacccacacgtagcacaggtcggacacgagcttggtcagcaagccgatcagcgtgaacaggtatagcgtgcccagcaccaccgggtagtcgcgccggatcacgctctcgtagctcagcaggcccagcccgtccagcgagaacagggtttcgatcagcagcgcgccggtgaaaaacgcgccgatgaaggccgccggaaagccggtgacgatgggaatcagcgcgttgcgaaacacgtgcttgtaaagcacctgccggtcagacagccccttggcccgcgccgtcagcacgtattgcttgcggatttcttccagaaagctgtttttcgtgagcatggtcgtcaccgcaaagctgcccagcaccatggccgtcacgggcagggtgatgtgccacaggtaatcggtgatcttgcccagggtggacagctcgtgccagtgggccgatgtcagcccgcgcagcggaaaccactgcaactgcccgccaaagatgaccagcagcgccacgcccagcacaaagcccggaatggcgtagcccaccagcaccagcacggtggtggccaggtcaaagcgcgagccggcgcgcacggccttggccacgcccagcggcacgctcaccaggtagctgagaaaaaacgtccacagccccaggctggcggaaacgggcagcttttcgcggatgagctgccacacgtccttgttctggaaaaagctgcgccccaggtcaaagcgggcaaactggcccagcatttgccagaagcgctcgtgcgcgggcttgtcaaagccatacagcgccttgatttcggccagccgcttttcatccaccccctgcgcgccgcgataggccagccccccgccgccctcagcccccgccccggccacgcccgctttggcttcggccaggtactgctccaccggcccgcccggcacgaattgcagcaccacgaaggtgagcagcagcacccccagcagcgtgggcagcatcagcagcaggcgtttggcgatgtaggcgagcatgggcagatgtgcacgagtctagcgccgcgcctgccgatatggggtagcgggtacggcagaaacatcaaaaaagagagcaaactttgagataggttgggcgatggcggcctttttttcttcacgccttcaaccatgcccatggccgcgccgggagccggggagccggggcgccgctacggcgccccggcgccgcgctcggccagcttgatgaagtccagcagttcagaagcactctcgcgctctccagccggcaagctggcgtgcaggcggcgcaggtgtgcgatgaaggcttgccgctgcgcgggcggcagcgtgccttgcgcgccggtcaggatgagcatgagcgagccgccatcggccgctgccaggccggagggatgcaggcgcgtcaggtgcaatcacggcggcgtgccgggcatgggcggcagggcttcagaagccggggccgcagggggcagcaggtcatgcgtgggcaaggaagccgggttgtgggcaacaggcgagggacgggtttgcgggcgcgcccaccacgtttcaatagcccaggccgtgccttcaaagtaggctggcgtggccgccggttgctgcagccgccaggcgttgtaggccatgcggtgcgcggccgaataccactgcggcagcaggtagtggctgtgggtgatcacgcgctccagcgcgcggcaggcggccagaaagtcgggctgggcgctgacggccaccatgcgggcgatcagcgcgtccacggcggggttgcgcacgcccgccagattgccggagtcttcgacatccgccgcccggctgccgaacaggtcagcgtattcctgccccgggttgtgcgtgccgccgtaggcaatgctgacgatgtcgaaatcaaacttttgcagccgctgctggtacagcgcaaagtccacgggcctgaattgcaggcgcacgccgatcttttccaggttgcggatccaggggcccacggtgcgcatgcccgcttcggcgctgtccaggtattccagcgccagcggctggccctgggcgttgcgcagcacctggccttcgcccagccgccagcctgcttcgtgcagcagcttctgggcgcggcgcaggttctcgcgcaggccgttttcatggccgtcggtgcgcggcggcgtgtaggcggggccaaaggcggcaggcggaatatgggcgcgcagcggcgccatcagcgcaagctgggcgtcatcgggcgtgccggtggcggcgcattcggtgtggccgaacaggccatgcacgcggctgtagctgccatagaacatgcgccggttcatccactcgtagtcgatggccaggcccagcgcctcgcgcactcgggcatcttgcagcagcgggcggcgggtgttgagcacgtagctctgaaagccggtgggcagccggtggcggaattcgcccttgaccagctcgcccgtggcaaagcgcttgccatgcatgcggcgcgcccagtcaccggcggaatagacggtcatcaaatcgaattcgccggccttgaaggcttcgagccgggcggtgtggtcacgatagatgcggacggtgatgcggtcgaagttgaagctgccccggcgcacgttcagatcgcgcgcccagtagcccggctggcgcacgtaggtgatgtccttgccgaacttgaccgggccaatggtgtaggggccgctgccgatgggcggctccatcaccacctggtcgaacggcttgccctgcccccattggtggctgaataccggcaggccgcccacggtcagcggcagttcgcggttaggctggcggaaacgaaagcgcacggtgcgtgcatccagcacatccaccccggccacatcggccaaaagcgttttgtagcccggcagggtgtgcgggcccgccagcgtttcaaagctgtgcttgacatcgcgcgccagcaccgggttgccgttgtgaaagcgcgcctgcgggcgcaggcggaaagtggccgacaggccatcgggggccacctgcacgtcctcggccagcaggccgtaggcgctgccgctttcgtccagcgcgccggtgagcagcgtgtcgaacatcagcgcgcccagatacgcgggggcgctgcccttgatggtgaaggggttgtacttgtcgaaggtggacacgcgcaggttgctcaccagccgcagctcgccgcccttgggcgcggcggggttcacatagtcgaaatgggcgaaacccggcgggtatttcagctcgccccacagcgcgtagccgtgggccgcccaggcgggcggcagcaggcaggccgtgaaggcaagggcagtcagcaaagggcgcatgcgagaattctggcccataaaaaacccttttcgaatcatctatcaggagcctttcgcatgtcccagaaaaccggctttctcgcaggcaagaagctgctcatcaccggcgtgctgtccaaccgttccatcgcctacggcattgccaaggcctgccatgcgcagggcgcggagctggccttcagctatgtgggcgagcgcttcaaggggcgcatcatcgaattcgccgccgagttcggcagccagctcgtgttcgactgcgacgtggccgacgacgcgcagatcgagcgcctgtttgccgacctgggcgcggcttggggacgctttgacggcttcgtgcacgccatcggcttcgcgccgcgcgaggccatcgcaggcaactttctcgacggcctgagccgcgagaacttccgcatcgcgcacgacatcagcgcctacagcttcgccggcatggccaaagccgccctgccccacctgaacgaccgggccgccctgctcacgctgagctacctgggggcgctgcgctccatccccaactacaacaccatgggcctggccaaggccagcctggaggcggccgtgcgctacctggccgaagccgtgggccgcacgcccgacgggcgctgcatccgcgtcaacggcatcagcgccggccccatcaagacgctggcggccagcggcatcaaggacttcggcaaactgctcggccgcgtggccgacgccgccccgctgcgccgcaacgtcaccattgaagacgtgggcaacgttgccgccttcctgctcagcgacctggccgccggcgtcaccgccgagatcacttacgtggacggcggcttcagccagacggctggcctgtcgatcgacatggtggatgccggctgaacccgcacgccgctatcttcttaagaaaaaagccttagcgcccgcccctgctgcctaagcagctaccaaaaaaatagcatgccgcgccgccgcctgtttcttgcgctggccgccggggcttggctggcggcactgacgggactggcgccgccgcccgccaccgcgcaaacacctccgccgctggccttggccgagccctggcgcaacggcctgccgctgggcgactactgggtcagcgaaaagtacgacggcattcgcgccctgtgggatggtcagcgcctgctcacgcgcggcggcgagcaggtggccgcccccgcctggttcacccagggctggcccgccacgccgctggacggcgagctgtgggccgggcgcggcggctttgcccaggtgcaatccaccgcgctgcgcctgcaaccgcaagaagccgcatggcgccgcctgcgcttcatggcgtttgacctgcccgcgcaccccggccctttcgacgaacgcctgcccgccctgcaacgtgccgtgcaggccgcgcgcaacccttacctgcacgccgtgccgcagcgccgcgtggccagcgaggccgaactgcacgccctgctgcgccagatcacccgcgccggcggcgaagggctgatgctgcgccggggcagcgcccgccaccgcgtcggccgcagcggcgatctgctcaagctcaaaacgcatgacgacgccgaagcccgcgtcatcgcccacctgcccggcaaaggccggcacgctggccgcttgggcgcgctgctggtcgaaacaccggacggacggcgctttcgcctgggcaccggcttcagcgacgcacagcgcgaccacccgccgcccgtgggcgcgtgggtcacctaccgctaccgcggcgtgcatgaaaaaaccggcctgccccgcttcgccagcttcgtgcgtgtgcgtgcggacgagccgcgctggcgcccgcccggcccaggcccggatatcgcgccatcgcggcgctgagacaccccaggcaagccacgcgccaaaccacttggcgcgcatggcacctgcccagccagcccgggcggcagacccgtgcacgaagcagatgcggtatgggcaagagactgcacgttggcgcagcctggaaaacagtccggacagtccgcccaggaaaatgcagccatcccggggacgcctgttctgccccctttgtgcgcttacccgccagaaaagacgaaggccccgcatgcggggccttccattttttgcatctagctaaaaagcatctgcttgttagcggctagagcacaaatcccagtgatctgtatggggcctaagtctacgtcagttgcatgtcacgaaagacacaatttccagcaaatgtggaaatttttcacgaacctggtcgcaagaatgtcgttacgcattgttcatcttgatacaaatgcacgcagtcttttatctggaagccaaacatgcctgccatcactctccgctaccgcttggcgattgacctgggatccacctcgctgggatgggccatcctgcgcttgaatgccgaaaacgagccgaccgccatcatcagggccggtgtgcgcatcttcagtgatgggcgtaatcccaaggatggctcctcgctggccgtgacccgccgcgccgcccgtgccatgcgccgccgtcgcgatcgccttctcaagcgcaaggcgcgcatgatggataaattgatcgcgcacggcttcttcccgcaggcggaggcggagcgcaaggcgcttgaatcgctcaacccctaccagttgcgcgctgagggtttgcagcgcgcgctgacgcccggcgagttcgcccgcgcgctgtttcatatcaaccagcgccgaggcttcaagagtaaccgcaagactgataaaaaagacaatgacagcggtgcgctgaaaacagccatttcccaattgcggcaggctttggcagaaagtaactgtcaaaccgtgggcgcattgctgtggcaacgtctgcaagccggcttgggcacacgtgcccgctatcgggaaacgcgcactaccaccgagacaggcaagaacaagatcgacaaaagctacgacttctatatcgaccggcagatggtggccgatgaattcgatgcgctgtggacggcacaggccgccttcaactcatcattgttcaacgacggtgcgcgccttgcgttgcgcgacaccctgctgcaccagcgcaaactacgcccagttacggcggggcgttgcaccctgctgccggaagaagagcgcgccccactggctctgcccagcacccagcgctttcgcatcctgcaagaggtgaatcacttgcgcatcctgcacccggatttgcgcgaggagacactgacgttggcgcagcgcgatgccatcgtggccttgctggagagtaaaggcaaagtgacgttccaaaccatgcgcaaggcgctcaaactgggcgacgtggtgcagttcaacctggaagacgccaagcgctgcgagctcaaaggcaatgccaccacagcggcactggcgaaaaaagagctgttcggcgcagcgtggcacgactttgacgaaacctttcaggacgacatcgtgctgcgcctggtcacggaagaaagcgaagccgaactggtgcaatggctgatcgaaaacactggcgtggatgaggtgcgcgccacggctattgccaacgctggcctgcccgaaggctatggcagtctgagccgcaaggcgctaaagcgcatcgtgccggcactacgcgctgaggtcatcacgttcgacaaggccgtgcaggctgctggcttcgcccaccacagcgatttgggctttggctttgagcatggcgacgacgaagtgcagcaaattggcgagcgcgtcatagccgccacgggcgaaatcaagccggtgtttgctttcaagcaactgccttattacggtcgtgccttgcaacggcatgtggcttttgccaaggacaagccgcgcaatgaggaagaacgctacggcaagattgccaaccccacggtacacatcggactgaaccaggtgcgcaaagtcgtcaatgcgctgattcgccgctatggccagcctaccgaaatcgtggtggagctggcgcgcgacttaaagcaaagcctcgagcaaaagctggaaacgcaacgtaaacaagccgacaaccagaagcgtaatgcacgcattcgcgccgaaatcgcgcccttgctaagcatcagcgaagagcgcgtgaagcacgccgacattcagaaatggatcttgtgggaagaactgagctctgatgctgctgaccgccgctgcccctacagcggcgtgcaaatcagcgcagccatgttgctcagtgacgaggtggagatcgaacacatcctgccgttttcacaaaccctggacgacagcctgaacaacaagaccgtggcaatgcgccaggccaaccgcatcaagcgcaaccgcacgccctggcaggcgcggcaggacttcgaggcgcagggttggtcatacgaaggcatgctgcaacgcgccgaacgcatgcccaaggccaagcgctatcgctttgccgccgatggctacgagcgttggctgggcgaggacaaaggctttctggcacgcgcgctgaatgacacgcgctacctctcacgcgtggccaaggaatatctcaaactgatctgccccagtggggtacgggtgattccggggcagctcacgagcatgctgcgtcggcatctgggcttgaatgacgtactggggctcgatggcgaaaagaaccgcgacgaccatcgccaccacgctgtggacgcctgcgtgatcggcgttaccgaccaagcactcttgcaacgctttgccaacgccagcgaactgcccaagatgcaggggcgccacaagttggctcaggacttcgagcctccttggcctacgtatcgcgaacacgcggcacgcgccgtgaaaagcatctgggtcagccaccgccccgaccatgggcatgagggcggcatgatggaagaaacttcctacggcatcagcaaggacggacgcatcaagcagcggcgcaaggccgatggcagccaagggcgcgaagtcagcaacctgatccgcatcagcgaaccaacccagtccgagcgccacggcgtggatgccaatggtcagccgctgccgtacaaaggctatgttggcggcagcaactactgcatcgaaatcacgcgcaatgacaaaggcaaatgggagggcgaagtgatctcgactttccgcgcctatcaaatcgtgcgcaagcatggggtggcgcgcttgcggaatcctggactggcgcagaacgggaaagccttaatcatgcgcttgatgattgatgattgcgtgcgtctggaactggatgggcgagaggaaacaatgcgtgtggtgaagatcggcagtaatgggcaagtattcatggcgccactgcacgaagccaatgtggatgccagaaaccgggacaagaacaatccgttctcctatgtctcgaaaatggctggatctttccagcaggccaaagcccgccgcgtcaccatctcgcccatcggcgaactgcatgacccgggcttcaagggctgagcaaggggcacagcatgatcggtcgcattgtcgaaatcgcagacgaccggcggcacctattcgtcaaccgcggcttcatggtggtgcgcgataccgagggcgagcgcaaggaactcggccaggtgccgttggacgacatcgccgccgtcatcgccaatgcccacggcatcagctacaccaacaacctcctggtggctctggccgagcgcggcgcgcccttcgtactgtgcgcggccaaccacaatgccgtgggcatgctgctgacgctggacggccatcacgtgcaggccaagcgcatcgaagcgcaaatcgccgccagcttgcccacgcacaagcggctgtgggcagccatcgtcaaatccaaactggagcaacaagccgccgcgctggaggccgcaggcgcgcccaccgcgcccttgactgcattagtgcgcaaggtcaaaagcggcgatccggaaaacgtcgaaggtcaaggcgcccggcgctactggagcttgctgttcggcaagaacttccgtcgcgaccagaacgccggcggcctcaacgccctgctcaactacggctacaccatcctgcgttctgccaccgcccgcgccgtggtggctgccggcctgcatcccagcatcggcctgcaccacagcaatgatggcaatgccatgcgactggtggatgatctgatggaacccttccgcccggtcatcgacctgaaagtctggcaattgcagcgcgccggtgaagaacaggtcacgcccgccgccaagcgcgccctagtacacacgctttatgacgacatgcaaagtaatgctggcgccactcccgtgacggtctgcatgcaaaaactggccgtctcgctagctcaagtgtatttgggtgaacgtgacaggctggagctaccgctaccgggcttgccgcttgccttggtgcacagcttggacagcgataggtaaaagtgtggacgagcaccatgctttcagggtacagaatcatgtggatgttggtgatgttcgacttacccgtgctagaaaaagccgaacgaaaggcagccactgacttccgcaaggctctgctcgacatgggcttcgaaatgagccaactcagcgtctacatgcgcttttgcaccagccaaacccaactcgacacatacgccaagcgtgtcgaaaccgttctgccacccggcggtaaagtgaatgtgatgcagttcaccgataaacagtatgagcgcatcatcaccttccacggcaaggccaagcagcccgctctaaaaacacctgatcagttcgacctcttctgagcgcagcacatgtgttcacatgaactaaaaagcagaaaactccttgtagaacaaggagttactgcaggtggattctagatcactgggatttgtgttctagccggaacacagcaccggttggaatcagatccaagtacattctagatcactgggatttgtgttctagccggaacttcatagctgcggtgaaactgatggttataattctagatcactgggatttgtgttctagccggaacccgtgttggtatcatgatgcaaaaggattcattctagatcactgggatttgtgttctagccggaactaaaggaaagtctctttgcaaacaatggtcattctagatcactgggatttgtgttctagccggaagttctagccggaactcgcagcgtgggcaatgcaggcgtgcctcgattctagatcactgggatttgtgttctagccggaacgccagccgctgatacagcgtgccctgccagattctagatcactgggatttgtgttctagccggaactcaaagcccgtcgcattgcgacagcagccgattctagatcactgggatttgtgttctagccggaacggtcgggacatcgcggcagcctacggagtgattctagatcactgggatttgtgttctagccggaacgcgcgaagtgcgaagcaccgccgcctgaagattctagatcactgggatttgtgttctagccggaactcccacggttgcgggaaagccaatcaagaaattctagatcactgggatttgtgttctagccggaacttgtaccgcttccttttcaggtacagcttgattctagatcactgggatttgtgttctagccggaacgcaactggcctgcgcccgcatcaatgaaccattctagatcactgggatttgtgttctagccggaacagctcaagccgcttgtagtgagccagttcgattctagatcactgggatttgtgttctagccggaacctaaataacgcgttagttatcaaaaaacctattctagatcactgggatttgtgttctagccggaactttcttaacaagctttgattcagtcaattcattctagatcactgggatttgtgttctagccggaactgtacttgttattccaatccgtcaaggagaattctagatcactgggatttgtgttctagccggaactgttgtatctctgtcttgattgtctgtagaattctagatcactgggatttgtgttctagccggaaccagcttactgtgatattccattgattgctgattctagatcactgggatttgtgttctagccggaacctgatcagtttccaagtgacttgacgattcattctagatcactgggatttgtgttctagccggaacttcactacaatgtctaaagagctttgcaaaattctagatcactgggatttgtgttctagccggaactgagccggcacaactggtgcccagacaggaattctagatcactgggatttgtgttctagccggaacctgtacatgcatgtagatttcatctctccaattctagatcactgggatttgtgttctagccggaactggtatggaagccattaacctagatagcaaattctagatcactgggatttgtgttctagccggaacgtataatggcttcagtcgaaaaggagcgctattctagatcactgggatttgtgttctagccggaactcgtgcggtgctgctagcggtcactcaaccattctagatcactgggatttgtgttctagccggaactggttgatcaccaagcgatcgagtctttgaattctagatcactgggatttgtgttctagccggaactgaccagcgtgcgcaataccaatggagataattctagatcactgggatttgtgttctagccggaacctgggaacagtggttggcgtatccaagcatattctagatcactgggatttgtgttctagccggaaccgcgcagcttgtcgcgctgcgcatcggtcaattctagatcactgggatttgtgttctagccggaactcttgggctggacactagttggctgggtcaattctagatcactgggatttgtgttctagccggaacaactggggcgttagcgtgttgcccgatgacattctagatcactgggatttgtgttctagccggaacctgccggcgtcgctgccggcgcgcttgctgattctagatcactgggatttgtgttctagccggaaccccatgttgagcacgacgcgccggcccgcaattctagatcactgggatttgtgttctagccggaactgctggccaaggcgctgttttgggccgccgattctagatcactgggatttgtgttctagccggaactacaccaaacatgtagttaccatctttagtattctagatcactgggatttgtgttctagccggaactttaaccagttgttggataatagcaagttcattctagatcactgggatttgtgttctagccggaacttccatttactcgtttgggaagctaaggtgattctagatcactgggatttgtgttctagccggaaccaagaccagaacgaagtgatccaactggccattctagatcactgggatttgtgttctagccggaactaatctctcagtcatcgtcaaaggcgtggaattctagatcactgggatttgtgttctagccggaactccaagcccgtcgcattgccgctgctgctgattctagatcactgggatttgtgttctagccggaacgtccttggcgaagtcatggccgcctgagtgattctagatcactgggatttgtgttctagccggaacgagcaaacccgcctacatcccacggcccggcattctagatcactgggatttgtgttctagccggaacaatgccggggtagtcgcgcgccacggccagattctagatcactgggatttgtgttctagccggaactgccacaggtggctgaggaactgtcgcttcattctagatcactgggatttgtgttctagccggaactcaggcgctgggcggcccagtcgtcgttgaattctagatcactgggatttgtgttctagccggaactggtttcccctcctaataaaaagaattcttattctagatcactgggatttgtgttctagccggaaccgacagcaggattgctatcacaccacctcaattctagatcactgggatttgtgttctagccggaactgatatcgcctcgtcaatatcagcgtcgcgattctagatcactgggatttgtgttctagccggaactgtagagattgcgaatggaattgatatatgattctagatcactgggatttgtgttctagccggaacggcgagcacgcagctgctcggcgaaatggcattctagatcactgggatttgtgttctagccggaaccagatcgagctgcacatgtggaagaagccgattctagatcactgggatttgtgttctagccggaacaggggttggatttccttgcctgcgacggcgattctagatcactgggatttgtgttctagccggaactcgcggtgcagctccatgttgatggggcgcattctagatcactgggatttgtgttctagccggaaccaaaatgcggatgtcatcgtcaaaagcctcattctagatcactgggatttgtgttctagccggaacggcggcggtatggttaaagtaccacacgacattctagatcactgggatttgtgttctagccggaactgataagcacttttcaagaagacccttattattctagatcactgggatttgtgttctagccggaactgctgaggtcctcgcccaggtttttcacctattctagatcactgggatttgtgttctagccggaactccggtttaagctgggtgtagcgacgcaggattctagatcactgggatttgtgttctagccggaaccagacttcctcgaaatgacagccaagctggattctagatcactgggatttgtgttctagccggaacgtacgccaagatcttctgcaatggctttgcattctagatcactgggatttgtgttctagccggaactggcgaccaagacaggcccctcgtcatcgaattctagatcactgggatttgtgttctagccggaactacggtaactagtagcccacgcttccgagtattctagatcactgggatttgtgttctagccggaaccccagcagcacgccaccgagcaagcggcgcattctagatcactgggatttgtgttctagccggaacacacagtggtaccggtatccatgcatactgattctagatcactgggatttgtgttctagccggaactgctgcgcctgcttgtcgctcgtctcaaacattctagatcactgggatttgtgttctagccggaacccatattagcaggctctaaaacaccgttttattctagatcactgggatttgtgttctagcccaaattagaatttggcataggcgctctttttgattttatattcaaaatgagcaaagctccatgaatgcgtcggcacaccaaatcaaccgtgacacacagagaaactataatttatacgaatagcatccgtggcggctgattccatagcaaacagagtgactgaagaatacttccccaatgatcttataatgattttacccatcacttcaaaagttcgcatgcattgaatgcatttttccacttaatcctcaaaatatttttgatttaaaaaaacttaatgcatcagctcaccttccctaacttcagaccgtgcgtgccagcaccagcacgctgatgtgcgccgccccggccgcgcgcaaggcgctggcggcggcgcggacggtggcgcccgtggtcatcacgtcatccaccagcaccagccggcggcctgacaaggccgcagcgtggtgtggtgcggcggcaaaagcgccttgcacgcgggccaggcgttcgcggcggttcagggtgcgctgcggcggcgcgtcatgcaggcgcagcagcgcatccgccaggacagcgcggcgtggcgcaagttggcgggccagcagcagcgccgggttgtagccgcgggcggccaggcgctggcgcgaggccggcacgggcagcaccgcatccgccgcgtccagcgcctgcgctgcaccgggcgcctgcctcatcagatcggccagcgccgcggccagccccgtttgctgacggaacttgaactgcgccagcagcgcactccagggccagccgtagtccacggccgccaggctctcgtccatgggcggcggctcgcgcaggcaggcgccacacaacacggccccgcccgccagcggcagcgcgcaggcacggcagcgggccactggctgcgcaaagcaggcgcggcaagtgtcacacaccggctgcgccggccaggcacggcagatatggcattggcttggcagccagcgggccaagttcatggctgacagggatgaatcacaagaggcaaggacggcgaaccaccaggatgcggcggcgccccatcatcggcgctggcccgccctttgtcacccgctggccgcctctatactggctggctccctgttttctcgccatgtcccgttcgcagcagcctcccacgctcgacccccgggccgccgcccgcagcgccgcacggcccggcccggcgccatggttgcatgaagaagtggcgcggcgcatggccgaacggctggactggatcaccctgcccgtgcggcgctgggcgcactggtcgccccggcacggcggtatggaaggccatgcgctggttgccgcccgcttcccccaggctgaggccttgggagtgccagcgggtgaagtcccacccccatccgccccgccccgcccctggtggcatccggcccgctgggcgggcacgggccaacccgcccacctgccccccatgctgcccgccccgccagagggcagcctggacatggtgtgggccaacatgctgctgcaccgcgtggccgaccccgccgcgctgctggccgactggcaccgggcgctggcaatcaatggctttgtcatgttttccggcctgggccccgacacgctgcgcagcctgcgccacctgtacacccgcctgggctggccgccgcccgcgcatgaattcaccgacatgcacgactggggcgacatgctgctggccgccggctttgccgaacccgtgatggccatggagcgcctcaccctcaccttcgacagcgccgagcgcgccctgcaagagctgcgcggcctgggccgcaacctgcaccgccagcgctttcacggcctgcgcaccgccgcctggcgccagcgcctgctggccgagatggacgccgccctgcgccccggcggccccggcacaccgctggcgcttgaattcgagctgatctacggccacgccctcaaaccggccgcgcgcctgcccgtcacccaggaaaccgccatcggcatcgatacgctccgcagccacttgcgccagcgccgaaccggcccggcagttgattaaaaaccgctcccacgccgccctcgacacaacccacctggaatttccaacccatgcaacggcgccacgccctcgtttcactggcctgcctggccacctgcactgcggctgccagcgccgcccacctgctggccgcctgctcaccgcagtcaggcggctttcacggcatcaacctcagcggcagcgactatgccaaggacttcgcgctgaccgaccaccacggccagctgcgccgtctggccgacttccggggcaaagtcgtcgtcgtgttcttcggcttcgtgcaatgccccgacgtgtgccccacgtcgctgctgacactggcacaagccaaacagcaactgggcgccgacggcagccgcctgcaaggcatcttcatcaccctggacccggagcgagacacgcccgaggtgctcaaggcctatatggacagcttcgaccccagctttctcgccctgtacacccgctcccccgaggaactggccgcgctggccaaggacttcaaggtctattaccaacgcatcgaaggccccacccccaccagctacacgctggaacacaccgccgccagctacgtctatgacacccagggccgcctgcgcctgtacgaaagccacggcatcactcccgaagccctggccagtgacgtacggcggctgctgcaagaagccccgtccgcgtaaggcgccttcccaccaaaaagcatagcagcctaggcagctcctctctgccctttcagcctttttcataaaaaattgaggatttaggcttatgaagcaaacgcttcataaaggctcatccttgagcagtttaagcagggtcttgtagagattaagatggcggtgattgaagcggaactcggtctccttgagatgcaacgcgaccgtgtcgcgccgcacgccatgaaactgcgccagtcgatgcttggcataactgcagaaagacacgatgccgttgacgtgtctggacgcgtgccatggccgcgatcccggccaatctcaccgaccgcaagggggcactctagctgcacttgagcgttgcaagcctggtttgagccgggagcaaagcctgctatgcgacagcagctacgtaggccggcccttcgcgcaaggcgtaaaggacattctggcgaacacaccaccgtccagattgccaagcgcagcaaactgcataccttcaacaaggtcatacccaagcgctggattgtggagcgccgctttgcctggctggagaagaacagaaggctttggaagaactgcgagcggctgctcaataccagcacaaacaaaaaaccgcctgcccacaacccgggacaggcggttttttgcggcaggcactgatccgcggaacaccgcaggcgccagcgccgcagcccatcatcaggcgtattcagccagcgcctttttcattttcttcatcgcggccacctcgatctggcggatgcgctcggcgctcacgccgtattcggcggccagttcatgcagcgtcatgccgccgctgccgtcgtcgcgcacgttcagccagcgttcgctgacgatgcggcggctgcggtcgtccaggctttccagggcggtggcaatgccctcggtggccaagcggtcgcgctgggcggcctcgatcatggccgtgggttcgtggctggcgtccgacaggtaggcgatggggccgaaagcctgctcgccgtcatcggaaggggcggggtccagcagcacgtcgccgccagccatgcgggcctccatctcgcgcacttcttcgggcttgaccttcagctcgcgcgccaccacgtcgatctgggcatcggtcaaggtgtcgcgcggggtcaggtcagcctcggcgtcttcggccttgaagccctgcttcatggagcgcaggttgaaaaacagcttgcgctgggccttggtggtggccagcttgaccacgcgccagtttttcaggatgtattcgtgaatttcggccttgatccagtgcagcgcgtagctgaccaggcgcacgccctggtcggggtcgaagcgcttgacggctttcatcaggcccacgttgccttcctgaatcaggtcgccatggggcagcccgtaacccaggtactggcgcgagacagaaaccaccagccgcaggtgcgacagcaccaagcgcccggcagcgtccaggctgccggtgtcgcgcaactcgcgcgcggcctgctgctcttcttcttgggtgagc

SEQ ID NO: 1825 - DNA, 23111 bp, synthetic construct
  source 1..23111: mol_type = other DNA
  misc_feature 1..23111: note = Synthetic
cagcgtcggatgctgccagcgcaccagggcttcggcgccgatcatacggccatcctcaacagcaaactgcggttgataatgaagaaagaatccgtcgcgtttcagcgcagtgcgcaaggcgttttccagctcaagaaagcgtcgcgaacgagtttgcatcgcggtggtaaagaaacgaaacgtgttgcgtccttcttgtttggcacgatacatcgccgcatcggcggctttggccaaagattcaaaatcgtcgccatccgctgggtagagtgcaatgccgatggaaggcgtggtgttcaattcatgttgtgcaacctgatagggcgtagcaaatgccaccagtagtttttcggcgacgcgggcggcgccttcagccgtgcaatcgggcaacatcaggatgaattcatcgccgccccagcgtgacacggtgtcctgttcacgcacctcgttgagaagacgtgctgccacaccacgtagcaaattgtcacccatactgtggccaagtgaatcgttgatgttcttgaaatgatcgagatcaaggaacatcaccgtcagggactgaccggcgcggctggcagtggcaatggcttggtgtacgcggtcgcgcaacagcgctcggttgggcaatccggtaaggggatcgtaatttgccagatgttcaatagtcgcagcagactgctgccgcgacttttcatccgcgaagcgttgcagtgcaaaactgatgtccatcgccatttcgagcagcaggttttgtgctgcctcatcgaatgcatggattttttcgctataaagggtaaacacgccgacaacgctgccatcgcaagttaacggcagtgcggcggaagcaccccagccgaaacgtgcgcctcgttcgtgccagggagcggtcatcgggtcatgctgaaattcctggcaccagaaaggctcgccactgcgtagggctgtacctgtgggtccccggccagcgggatcatcggcgcgtgtggaaatgacgatatccgccagatattcttgcccgtcgccgtagcttgctactggcactatgcgttcgcgtgcggcatctatccggccgatccaggccattttgaagccaccgaagttgacggcatcgcggcagatgatcgggaacagttctgcttcactctggcagcggacaatcgcctgattacattggctcagtacagcatacagctgtgtcatgcgcgccagctgctgctcgccggttttttgtgctgtgatgtcgcggatgagcgcaatgaaatgcggtgctttaccggcgatgggttttttagccatcgaaagcccaaaccagacctcgccctgcgacaggttcagggcgtactccttgcctgtcgaatagccgtgaataccggcttcctgaatggcctccagcacaagatgggcgactggggcaggcagcacctggtccacggttttgccgagaaagagctcgggcggcgcagccagcaaatccgtgcgcggcgaatggtagtcgtggaaacgcccctcgccatccaattcgaaaagcaggtcgggcaaggcgtccagggtggcttgcagatgcgaccgggaggcagccagttgtgctgtgcgctgccgcaccaggcggcgtagtaggaggataaacagcgcaagcaagagtatggtgataatggccatggccagcccatagaacacggtgcgctgcatgacatagggcagcgacttgcccatccatttatcgcggagcgcttcgcgttcggtcgagctgattgcggcaaagccctgttcaatccgggcgagggtggccgcatcaccctggtggacggcgcggtgaaactggccggtgtaaagagtaaatgccaggcgaaaattcccggcggcattcacacgatgaagcaggtaattggctggcggctcgtcgatgcagaagacgcgtacctggctggcaatcgctgcatcaacgacggcctgatagctgggatacgttttcagcgtggtaatgccaaagtgggctagcctgtcgatgcaggcgtcaccggctttgacaccgaccagaaagccatgcaggctggcagggttgtgtatgccgccgatactggcatgcgtgtaaattcctaccggcaaatcagcatacgcagcgctgaagtcgtagagtcgctcgcgtgccggtgtgcgaaatatcgtgtcaataacgtcggcaccgcccgcttgcatgatctgctgcgcctttgcccaatcggtggcggtgatgtcgaccttgatacccgtctttttttcccacagccgccactcatcgatcagcaagccttcgaccacgccattggcatcacgtatgacatagggcgggtagttgtcgtccatcaccacgcgcagtggcgagtcgtgtgcagccgtggtagctagcgctgccggaacaacagcggcacagcatgtcagcaccacaaccgcgacaacgaatgtcgcgaaccacctaagagaagatgagtgtatgcacgccatgagagttattcgtaactcatatgcgccaaggttagcgcactttgtttaatgacgaaagaaaaagtcggcgctggtttgtcctaaagaggactcaagaatccgtgtctggacaacatgacgtgtagttgtgtatccctccttttaagaatagcgccctatcgtggggcagaggtgttgttatggtgcatgggtgaatgccaacctgatgccgactggcgcaagaccgtgccatggtgcggtgcagtagtatggtacataacttgctgcgctctcactgtctttcatgttttctttgctatgtcccaacgatcatccgaaaaaacttccgctgcacatcttgccaacatgaataccgcgctttctctggatatcagccgtgtgctcgacaccttgatggccaatcttaatgggatggcgtatcgctgtcgtctggatgcgcaatggaccatgcggtttgtcagccagggttgccttgatctgactggctatgcacctgaagcactggtcgataacaaacggctttcatgggaagacatcacgctggcggacgatcggttgcgggtacgcgaagaaatctcagcggcggttgccgctaatcggcactttgctgtggagtaccgcattctgacctgcgccgggcaggaaaaatgggtacttgagcgtggcatggccgtgctggatgagtgcggtgaacaagtgctggaaggttttatcgaagacgtcagcgaacgtcgtcaagcgctagatgccgtggcgaacgcagaactgcgttatcgccacatcttcgagcatgcatctgaaggcattttccagaccacgcccgatggacactatctgtcggccaatatgtccctggcccgtttgtatggctacacgtcgcccgaggaactgatcgccgatcttgcggatatcgagcgccgcctgtacgttgatcccgtacagcgcgaaaaatttcgttgcttgatggatgcgcatggcgaagtggttaactttgaatccgaggtctatcgccgtgacggttcgaaaatatggatttcggaaaatgcccatagtgtgcgtggtctgcagggggaactcatctgttacgaaggcacggtgcaggacatcaccgaacgcaggagttatcaggaacagcttgagcgtcaggccaactttgaccagctgacaggtttgcccaaccgcaatctacttaatgatcgtctcgagcaggccatttcccgggcggcgcggcgcggctattttctggcgctggtgttcatcgatctggataactttaaattcatcaacgatagcctgggccatgtggcgggcgatgagttgctggttgaagttgctcaccgcttgcgcaattgcctgcgtactgtagataccgtggcacggcaggggggtgacgaatttgtgctggtgctcaacgaccattatcaggtggcatccatcatttccttgcttgagcggatattgcaggagattagccggtcgatcacgctgatgggacgcgattggcaagttggtgccagcctcggtgttgcgctgtacccgacagacggcgaagatacgccaactctgctcaaacatgccgacgtggccatgtatgcggccaaggctcgcggacgcaacaatttccagtttttcacccacgagatgaatcgcatctcggatgagcggctccggcttgaagctgccatgcgcgtagcgctcgagcaggatggattttcaatcgcctttcagcccaaggtggatcaccgccgccgcatcgtcggcgctgaagcgttggcacgctggcataccaaagattttggcacggtacctcctgattgtttcattccgattgcagaagagactggtctgattgtgccgctgaccgagatcatcctgcgcaaggcgtttgccgctgcgagtaaatggagccagacgccgggccatgccatcactgtggcagtcaatctctcgccccgactgtttcttgatggcaagattgttgagcatgtggccaggctgataagcgaggcgggtttgccgcctgagcacgtcgaactggaaattaccgaaagcatttttctcggtgatagcgggcgtacattaagcatactgaagggcctcaagcagctcggtgtggccttggtcatggatgattttggcacaggctattcgtcactctcgtacatccggcgcttccctctcgatatcatcaagattgataaatctctggtgactggcatcgagtatgaagatgatggtgcgatgattgcccgcgccatcatctcgctatgccagagtttgcgcaagacggtggtggccgaaggcttggaaaatcaggcgcagtttgattttctgcgctatcaggggtgcgacgagtttcagggttatctgatttcgaaacccttgcccgaacaggaatttgccgacttgctcatcgcgagtggtggtcagctgtagcgctggtttatagcgctccggtgtctagtggaaataaactccggaagacagctcacgcggcctcgaaatgttccagtagcaactgcaccgtttgagtgccattccattcattgatgtccaggcgaaacgccgcatgaataagattgggtgcgctgccggcaaaattgaactgaatggcttcaaactgggtgtggccttttttcaggcgcagcttcagatgtttatccttgagcagtttttggtggattacttcaaaggtgtcgttaaacaagggggctggaaaggcctgcccccagacttcttgctgcatcaggcggacagcttccagcgagaaatagccgctttccagcgggccatcggtttccagtgtgcgggtgagatcgctgggtgaaatcagttcgcggcagacagtctcgaacgcctcttcaaattctgtcaggcgatcttcttccagcgtgagcccggcggcagcggcatggccgccgaaacgtaacaacaggccgggcacgcgtttgctgaccagatccagcgcatcgcgcagatgcaggccgggtatcgagcggccggaagctttgagctcgccttccacgccacgtgcgaaagcaaaggtcgggcgatgaaacttttccttgacacggccagcgagaataccgatgacgccttgatgccagtcagggtcaaagagggtgatactcgcgtggtcagctggctcgagtgaagcgagaatcagctcggcatcttctttcatgtcggtctcgatcacgcgccgctcgcggttgatggcatccaattcctgcgcgatgttcatggcgcgggccgtgtcgtccgtacttaatgcttcaatgcccagtgacatatcggccagcctacccgccgcattgagccgtggacccagcatgaagcccaggtcgaacgtggccgcacgcgccggctcgcgtccggcaatggtaaataaggcccgcacaccggcctgcatgtggcccgcgcgcatacgggtgaggccttgcgtgaccagaatccggttattgcggtccagcgcgaccacgtcggccacggtgcccagcgcgacaagatccagcaggctggcaagattcggctcctgactttgcgcaaaggccccgcgctggcgcagttcggcgcgcagcgccagcgccacataaaacatcacgccgacaccggccagcgccttgctggggaaagtgcagcccggttggttgggattgacgatgacatccgctgcgggcagttccgcacccggtaaatggtggtcggtaatcagcgtcgcgataccgcgggctttgagctccgccacgccctcaatgctggcaatgccgttatccaccgtgatgaccacatcgggctggcgttctgccgccagccttgccacttcgagggatagcccatagccgagcttgaaacggtcgggcaccagataattcaccgtggcacccatcatgcgcagcgcgcgtagacccacggcacaggcggtggcgccgtcgcagtcgtagtcggccacaatcagcaggcgttttttggcggcaatggcgtctgccagcaagtgcgccgcttctgtcgcgcctttgagctgatcaggcggcagcagggcggcgctgcgggtgtcgagctcagcactcgcacgcaccccgcgtgcggcgtaaagacgcgcaagtaatgggtgcacgcctgcttcttgcaacacccaggtggcgcgcggcgggatgtcacgctgggtgatgcggatggcttggttagtttggattgtccgtgtcatgtgcgttttaaatgcaggcgttttaaggcgcggcgagtacagtgaggggtgcagcagagcgccagaattgccaggcatgatgacggcgaatgttgagcgcaaagcttgctgcatcccctggggcgatcaagcgtagatgattgatatgaccacgccgaagagactccagcagcggggcaaaccaatcggtttcaagctctaaaagctcggctcgccaggcatctgtatcgccgctgcgggcagggagttcgagcttatcaagcagcatcagcgcgttattgatcgccagtttttcatagcgtggcggcgcggcttttgcgggcacatttcgacagcatgctgcgccttgggcaaccacatcattaccccagaaagccgcgagaggaggcatggcatttgtggcgacggttggcaggcggccgcttccccacggccagagggtgtttactggcggctgcccggcggcttctcgtgccagattgatcggatgcgtgtgcagcagcatgttcgcttcgttgatggcgtgccgccagggggccgctgccacgcctgcgggcagcggcattgctgcgcgggcaatgtggtcgggcaagggcggcgctagcgcgaaggtgagcgcgggcgtgcttttatgcaggcgaagattccacgcggtaggcgtgagcacctgcaaggtgcccaaggctgcaaaagtcggcgctagtgagacggcgagtgcttcggcttctgccacacttaaggcgagaagctgcgggtcgtcgacgcgcaaacgcgtttgctcaacgcgcagatgtacggggtccaggcatagccagtcgtcagcggccgttgtgtcaggggttgcaacatcggttgcggcatgggtattgattgcaccgagcgctaacccgcgcagtgccgcagcaggcaagggtgtagttgaaccgggcgcagccaggccgagtgcctgtgcaagtgcttgatgcgtggtgcaagggggcaagcgggtaagtttgccacgacccagcaaggtggaaaaagcaggcagcgccggttgatgggtgaggtcacgagtcaggccgcgagtgagatcgagaagcgcctgatacggccaaatcaggccgggcacgatgagcgtaagcatggctgcatgttaacatgcagcacttccccgaacttacctgatgggctccccgtttgtctttcatgcgttacgaattccttattggtttgcgctacacgcgcgcccagccccgcgaaggcggtggcaatcgtttcatttccttcatcgcgctgatttccatgctcggcttggcgcttggcgtggccgcgttgattatcgtgctctcggtgatgaacggctttcagaaagaattgcgtgagcggattctgggcgtcgtctcgcatattcaggtcaccaccgaatcgggcgagctgaccgactggagccacgtggtgcagggcgttgcccgtcatccccaggtgcgggccgccgcaccctatgtacagcagcaaggcatgctgagtttcgacggccaggtgcgcggcgtcatggtgcgcggcatcgtgcccaaggccgaagacacagtggcgaatttcagccgccacatgcaggcaggcaggcttgaacagcttgtgcccggcgaattcggcatcgtgctgggcgcggaactggcgcatgcgttgcaggcgcgcctgggcgacaaggtaacgctgctcgcaccgcaaggtctggtgacgcctgccgcgatcttgccgcgcgtaaaacagtttcgcgtggtgggtatttttgatgtgggcatgtatgagtttgattccggcttggcgttaattgaactgagcgacgcgcaaaaaatgtatcgcatgggcgaccgcgtctccggtgtacggctcaaggtggacgatctgtttgccgcgccaaaaatcagccgcgagctgttgcgttttctggatgcggatgttggggtgaccgactggacgcgcactcatgccaactttttccgcgccgtggatattgaaaaacgcatgatgtttttaatcctgctgctgatcgtcgccgtggctgctttcaacattgtgtcgacgttggtcatggccgtgcaggacaagcgcgccgacatcgccattttgcgcacactgggggccagcccgcccagcatcatgggcatttttgtcgtgcagggcacactgataggcgttatcgggctgctggctggcgtggcgctcggcgtcactgttgcgctcaacattgatgtcgtggtgcccttcatcgagcggctgttcagcatgcaatttctggccaaggatgtgtattacatcagcgagctaccctcggacatgcactggtcggatgtgggcacgatcagcgtggtgtcgttcgtgctgaccatcctggcgacgctgtatcccagctggcgtgcttcgcgcacgcaaccggcggaggccttgcgctatgaatgaggtgatttcctgcgcgggcttggccaagacatttcatcagggcgcggtggatgtgccggtgctcgccggcgtcgatctaaaagtcggtgctggcgagacggtggccattgtcggcgccagtggttcaggcaagagcacgctgctgcatttgctcggcgggctcgatcagccgaccgcgggcatggtgtggctgcaaggcaaagacttgagtaaagccagtgaagccgagcgcggccgcttgcgtaatcaaacgctgggtttcgtctatcagtttcatcatctgctggccgagttttccgcactggaaaatgttgccatgccgttgttcatccggcgcatggcgcgcagcgcagcgctggcgcaggcgtccaacgtattacagcgcgtcggcttgagtcaccgcttaacccatcgccccggcgcactgtccgggggtgagcgccagcgcgttgccgtggcgcgtgcgctggtgacccagcccgcctgcctgcttgtcgatgagcccacgggcaacctcgaccgcgcctcggccgatgcagtattcgatctgctgctggaactctgccgcgaacacggcgccgcgctggtcatggtgacacatgacgccagccttgccacgcgtgcggcgcgggtattgcatcttgatgatggtcggctggtggagtgataaaactggcggcgatttatttgagggtgaaatcaaaacaataaaaaagggccgcatatagcggccctttcatttggtgcatctttcagcttgttagcgttcagagcgcaaatcccaatttactggtgaaactgattgtcattggataacgctattctgtcaagtaaattccaatagaataaaacaatatagttaaggggtaggtcatgctacataaaatgcattatcggttggcactcgacttgggatcgacatctctcggatgggcgatgatacggcttgatgccgataaccaaccatgtgcagtgattaaggcgggtgtgcgcattttctcgaatggccgaaaccccaaggatgggtcttcgctcgcggtgacgcgtcgagaagcacgcgccatgcgccgccgccgagaccgtctgctcaaacgtaaagcgcgcatgatgcgcacgcttattgaatatggttttttccccgccgaagcagcgcagcgtaaggcactggaaaccattaacccttttgctttgcgtgcaaaaggcttggatgaggcattgactcccgctgaatttggtcgtgcactgtttcacatcaaccagcggcgtggttttaaaagtaatcgcaagacagataaaaaagataacgatagcggtgcactgaaaactgccatcggcaaggtacgagcgaccattgaggccgaaggttgccgcaccgtaggtgaatggctgcacaagcgcgatgtggcaggtttgaccgtccgtgctcgttaccatcaggataaagtcatcaaggaagatggcaaaacaaaaatcgacaagtattacgacctgtatatcgatcgtgccatgattgagcaggagtttgatgaattatggaagaagcaggccgaactaaaccccgctctatttaccgaagctgcacgtgccgatctgaaagatgttttgttgcatcaacgtccgctcaaacccgttaaatctgggcgctgcacatttatgccggatgaagagcgcgcaccgcttgctttgcctagtacgcagcggtttcgcatgtatcaggaagttaataacctgcgcatcttgcgagatggcttgaaagaagagccattaacgttgaagcagcgcgacgacctcattgcagcattggaaaaaaacagtaagcacagttttacgcaaatcaagacgttgcttggagtgggtggcgcagtacagttcaattttgaggatctgaaacgtcaagaactcaaaggcaatacgactagtgccattttgagtaacgataagcattttggcaaagcatggtttactttcgatgaggccaaacaagatgccatcgtgctgcaattggtcaaagaagaaaatgaagccaagctcgtgcgctggctgcaggacgaaacaggcattgatgaaaaacgcgccgaagccatcgccaatgttgggttacctgaaggctacggcagcctgtgcgcaaaggcgctagcgagaatcctgccggaattgcgccgtgacgtgatgacatacgacaaagcagtacaagccgcaggcttcgaacatcatagtcggctagggtcaaacaccgagattcctggcctcacgttcaagatcgaaagtatcgatcaggactcaggtgaggtcaaacaattccacatacacaaggtgctgccttactacggcgaatatctgcaacgtcacgttggctttggtagcggcgagcccgaagaccctgccgaaaaacgctatggaaaaattgccaaccccaccgtacatatcggactgaaccagattcgccttgtggtgaatgccctgctcaaacgctacgggcaccccagcgaggtgattgttgagttagcacgcgacttgaagcaaagcaaagatcagcgcgacgaggaaagcaagcggcaggcagaaaatcaaaagcgcaacaaacggttgcgggatgccattgcaggtactttgaaaatcagtgaagagcgtgtcaggcgagatgacattcagaaaatgattctatgggaagagctcagttttgaccctgctgaccgtcgttgcccctattctggcgcacaaatcagcgcaaccatgctgctgagcgacgaggtggaagtcgaacacatcctgcctttctcgcaaacgctggacgatagcttgaacaacaaaacggtggcactgcgtcaggcgaatcgcatcaagggtaatcgcacgccgtgggatgcatttggtgcgcaagccgtggcagggtttgattatgaaagcattcttgtccgagctgaaggaatgccaaaagccaagcgttaccgctttgccgaaaatggttatcaacgctggctaaaagatgatgcaagttttctggcccgtgcgcttaacgatactcgccacatgagtaaggtcgcgtttgaatatctcaagttgatttgccccaacacgcgtgtgattcccgggcgcatgaccgctatgctacgcgcaaaattcggtctgaacgatgtacttggtttgaacggcgaaaaaaatcgcaatgatcatcgccatcatgcggtggatgcctgcgtaatcgccgtgacagatcagggcttgttacagcgtttcgcaaaagcgagtgccagtgcgcgtgagcagcagcttaatcgcttggttgaaaacatgccgctaccttggggcagttatcgggagcatgttcagcgcgccattaacgctatatggataagccacaagccggatcacagtcatgaaggtgcaatgcacaacgatacggcttatggattgcgtggtgatggcaaagtcagctttcacaaaatggtggaaggggtgcggacgcacagtgaggataatctcaaggtcattgaaatcagcaacgcaaaagccacagatcggcatggcttgctacccaatggcgagccaaggccatataaaggatacaaaggcgatagcaactattgcatcgagattgttcgcaatgagaaaggcaagtgggaaggtgaagtcatttctacatttgaggcttatcagttggtgcgagagcatggcattgcaaggctgcgacattcaactttgagtgtcagcggaaagctattggtgatgcgattgatgattgatgatgtagttcggttgattattgatgagcaaacccgaacgatgcgtattgcaacattaagtggcaacgggcagatatttatggctgatacaagcgaagcaaacgttgatgcaagaaatcgcagcaaagaagaaacttttgcctatgtttcaaaaatggcaggttctttgcagaaagctaatgcacgccgaatcaatatttcacccatcggcgaactccgcgaccctggtttcaaagagtaatcacagtgataggccgcatcgtcgaagtggcggatgaccggcgacacttgtttctatcacgcggctttttggtggtgcaagataccgaaggcgagcgcaaagaactggggcaggttccgctggatgacattacagccgtaatcgccaatgcccacggtttaagttacacgaacaacctgttagtggcgctagccgagcgttgtgcgccctttgtattatgtgcggctaaccacaacgcagtgggcatggtgtggtcgatagagggcaactttcagcaagccaagcgcttcgatgcgcaaatcgccgccaagcagccgttgataaaacggttatgggcggaaatcgtcaaatccaaacttcagcaacaagcagctgcactcgaagccactggcgcaccgtttgttccactatcggccttggtacgcaaagtgcgctcgggtgacccggataactttgaagctcaaggggcacggcgttattggggacttttattaggggatgattttcgccgcgaccaacaagcaggcggtcttaatgccatgctcaactatggttataccgttctgcgcgccgcgactgcacgtgctgtggtggctgcagggctacatccaaccatcgggctgcatcacagcaatgctggtaatgctatgcgtttggtggatgatttgatggaaccctttcgccccatgatggacttgaaagtctggcaattgcacaagcaaagcgaaggtgaggttacaccggagagcaaacgtgccttggtgagaaccctctacgacgatatgcaaaccagctcggggacaacacctgtgatggtctgcgcacaaaaactggctacatcattggcgcaagttttcatgggtgaaaaagacaaacttgacctgccgttgcctggtttgcccctcagccttgcggcatcgttacaagacgattaacgtgccatgctttccggatatcgccttatgtggattacggtgatgttcgatttacccgttgtcgaaaaagctgagcgaaaagctgccacggattttcgtaatacattgcttgacatgggctttgagatgtcgcaattttcagtgtatatgcgtttttgcagtagtcagagtcaaatagatacttatatcttgcaggtggaaaaaagcttacccaccggcggaaaggtaaatatcttgcaattcactgacaagcagtatgagagaatcatcaccttccagggcaaaaagaaaaacccaagtaaaaaatcaccggatcaatatgatctgttttgatgaaatcaacatttttcctgtcagaagctgcacttaacccatcaaaagatcaatgggttagtgcagtggtactttagcagattgggatttgcgctctgaccggaactgaaatggcacacgcaatgctgcatgaaaactttagcagattgggatttgcgctctgaccggaacggagggcgctaattcatatagcatggcatgactttagcagattgggatttgcgctctgaccggaacgagcatgtcgaggcgcagaaagttgtcgcaactttagcagattgggatttgcgctctgaccggaaccttgttaatccatacccatttggtggtttcactttagcagattgggatttgcgctctgaccggaacagccatgcggattttaataatcgccattgcaactttagcagattgggatttgcgctctgaccggaaccggagaggccgtcttgcggcagtcggtagcactttagcagattgggatttgcgctctgaccggaactcattcagtccattgctttcaagtatttcaactttagcagattgggatttgcgctctgaccggaacttgcaccaaagcggcaacagccggaaggtaactttagcagattgggatttgcgctctgaccggaacgaggccgttaaagcatccgtcaaggctattactttagcagattgggatttgcgctctgaccggaaccagattgatgcgctggaagccagtcggctcactttagcagattgggatttgcgctctgaccggaactggttcacggatgcgaactactggccgactactttagcagattgggatttgcgctctgaccggaactgcgccatcatgtcggtgagttttgagtttactttagcagattgggatttgcgctctgaccggaactccctttgtcgtcgccttccttgccttcgaactttagcagattgggatttgcgctctgaccggaacaatacatcgcaagactcgcaaactattgttactttagcagattgggatttgcgctctgaccggaacactcacacaggagtagccatgccgaattcaactttagcagattgggatttgcgctctgaccggaactcacaggtgcaacaggcattggagggggtgactttagcagattgggatttgcgctctgaccggaacgacaccggcgcgtgccgccacttttttgatactttagcagattgggatttgcgctctgaccggaactgagccggattgatgtcaccgccagcgcggactttagcagattgggatttgcgctctgaccggaacggcatgcaacatcagggcctcgcgctgcttactttagcagattgggatttgcgctctgaccggaactatgggcagtagcccaacgcctgcgctaccactttagcagattgggatttgcgctctgaccggaactcgcgcagggatcgggtcgtcgtcattccgactttagcagattgggatttgcgctctgaccggaactctgatgcgcgagatgtgatggttgagggactttagcagattgggatttgcgctctgaccggaactaccggctctgtgccatatcgagtgaagtaactttagcagattgggatttgcgctctgaccggaactacatgaaagaccctagcaagaatacttgaactttagcagattgggatttgcgctctgaccggaacaccttcagcctatctgtcgaggtgccgatcactttagcagattgggatttgcgctctgaccggaactttgctcacatacttggctatgtatccaacactttagcagattgggatttgcgctctgaccggaactcgagtacgatgcactcgggcggcgcgcagactttagcagattgggatttgcgctctgaccggaacgccttcgcgcgacgcatgggcatcaacaaaactttagcagattgggatttgcgctctgaccggaacagccgcaacaaggcgaaccgaggcgatctgactttagcagattgggatttgcgctctgaccggaacttgattcgcacgttggcgttgtcagaaaagactttagcagattgggatttgcgctctgaccggaactcatcatccacatccgatgggtatcaatatactttagcagattgggatttgcgctctgaccggaacttgcgtgatacttgtttgagaatagacaagactttagcagattgggatttgcgctctgaccggaacccttgatcgatgctctgttcccccatgcttactttagcagattgggatttgcgctctgaccggaaccggattcccgaagattcgaccggcaataaaactttagcagattgggatttgcgctctgaccggaacatccgattgatgcggcctatggaagggcggactttagcagattgggatttgcgctctgaccggaactacacaactcggggggtgtccggtgaaaagactttagcagattgggatttgcgctctgaccggaactagatgcagaagcaagcaaattagcgggatactttagcagattgggatttgcgctctgaccggaaccgaggccatcgcacgccgctgtccttcttatagctcgggtagcgcggaaagctcatgcaccggtcgccggatttttggggaaaaaacgcacctgcgggaggtctttgaaatgctcgtcctgcgtccacagcgttgcgccgtgacgcatcgccgtggcgtagatcagactgtccgccatggggagcggatagcgcatggcttccagcgccagggcgctgtccaggtcgatgacctgcccggtctgcatcatgctggcaatttggagcgcgtcattttccccgcgttcgcgcagcacctttttgcagacttcataaatggtgatgacgggtatcatcagattttcggcatcttcaatggccggggcgaagagggatgcgcggccgctgtcggtgaagtattccagccacccagaagagtcgacgacgttggcaatagtcacaggcggtcatcctcccgctcgatgagagtatccatgccgcgcaaaaagccacgcatttcctgcatggggcgaacagggatgaactccacccggtcgccgtagcgcagcacacgcagttgttcgcccgccttgagatgaagcgctttccggatggactgggggatgaccacttgaaacttgggagaaagggtaacagtattcatatcgatgtccttatcgtgcaacgatttgttgatcgatgaattttaactcaatttgtgaactggattcgtgtttggttcgtgctcatttcatcagcccgccaatcatgttcaaaatctggtcggcgacgccttttagctcggcatcgatctcggcgagcgggcgtgggggcttgaagacgtagaagtgccgattgaagggaatctcgtagccgaccttggtcttgtcgtggtcgatccaggtccatgtatccgccgcatggggcaggacttcgcgtttgaagtagggttccacgtcttcggagagcggcacattctccgtatcacacgggaggggtcgggtgcggacttgcccttggtggccagcacgatcttgcctgctgcgtcgccattttcgcgcaggggacgctcgacggtgatggtgcggtagctgaagtcctcgttcctgaaaatacggctgatgggtacgcgggtgctgtcaagtcactcatgtgaagggatgcttgttaattggcaaacaatgcggaaagtagatatttttctgcacaacccgcagtatccttgatcgccataatccaggcaatgcgacttgcattttttatatcacattccagatgccgtttttctcctgactatcgctcgccgctttatggcgcgcaccagccagtagcgccagcccaggcgcatgaccagataaccgagcgctgccagcagcgaggccagcagcacgaggccgagcgccagtggtttgcccaggccgatgacccagtgagtcagcgccggtatccagccgagcaggtcgccattcatcgcgggtggcgcagcaaagttcgccgagccgccgagaacggcccgcccgatctcgaaggcaaccatgtagatcggaacgatggtgaaggggttggtatacagcgtgcataacagcgcgagcggcaggttgacgcgaaaaatcacggcgcagatggcagcacccagcatctgcaatggccccggaatcaggccgcagaagagtccggcggcaacagccccggcggctgaacggcgattcaaatgccacaggcgcggatgtagcagggtgttggcaaacggggtgaaccagcggttgttgcggatgacgtcggggttgggcaggaagcgtttcaacgagcggcgcatagtctgtatctatgccgcaacgcatcgcacggcgatttcacccaggccgtcaatcccgccccgcagtacgtcgcctgcgacgacggggccgacgccagcgggtgtgccggtgaaaatcaaatcgcccggcctaagctcaaagtagcgtgacaaatgactgatggtctcggttattgaccagatcatgtgttcgatgcggcccacctggcgctgttcatcattcaccttcagccagatgccgcccgccttcgggtggccaatgcggctgaccggatacagcgggccaatgggcgcggactgatcgaatgccttggccagctcccacggctggccttttgcgcgcaaggcggtttgcagatcgcggcgcgtcatgtccaggccaacggcatagccccagatatgatcatgggcgcgcttctcagtgatatttctgccgcccttgccgatggcgacgacgagttcaatctcatggtgataattggcggtttccggtggataggtgagggcgatggttttgcctgcgggaacggggacaacggcatccgccggtttacagaaaaagaagggtggctcgcgctcggggttgccgcccatttcgcgcgcatgtgcggcatagttgcgaccggcgcagtaaatgcgatggacggggaatagatcgctgctgttggcaactaaaacggtggaatgcgatgcgggggtgataacgtagctcatggattgattgcgaagtgtctaaattgtgaatgcccatgattatgcagaattgcgttgaccaacggcgggttttttaatgcgcgtgtttgtgttggcttttaccattggcgtctggcttgtgcagcagcaggcggaacttgttgcatggccgtggcttgcggcaggcggcgcggtagcattgccgatgctgatgatggtgcatgtcttgcgcgtatggggaaagtcggcgctggtgggacgctgcgcagcgagtatccctggggtgcggcagtttgtgatcatcacgccgctgctgatcgcgggttttgcgcttggtttcttgtgggcctcggcctgcgcttattggcgtttggcagaggccttgccagcagtcaatgaagggcgggatatcgaagtcgttggtgtggtcagtgccttgccgcagcaaatcgaacgcggcatgcgttttgagtttgatgtggaaagtgctgccgccagcgtgcctcagcatatctcgctggcctggtatcgcgggcgggcggacgatgaggcggaggatgttccaaccatgccgctgcacgctggcgagcgctggcgtttcacggtacggttgaagcgcccgcatggcaacgtgaatccgcaggggtttgattacgaggcatggcttttcgagcgcggcatacgcgcgacaggctatgtgcgaccgcatagtgcaacacgcctgaatgcggctgtctggcggcagggttacgccgtcgaaatgctgcgggaacggatacgtgaacgctttcaatcggcattgcccgatgcatcgtatgcaggaattttgattgcattggcgattggtgatcagcagtcgattgcaccgactctctggcagcagtttgctaaaaccggcattacgcatctgatgagcatttccggcctgcatgtgacgatgtttgccgggctgttttattggttggtcggctggttgtggcgtcgctcggctgtgttgcctttgcatttgcccgcgcaaaaagcggctgctctcggtggctttattgcagctttgatttatagcctgctggcggggtttgctgtgcctgcacagcgcacgctttacatgctgggcgtggtggcgctggcgcggttgcttaaccgtgaagtggcggcctcgcgtgtgttggcgctggctttgctggtggtgttgattctcgacccgtgggcggtgctggcagcgggtttctggctgtcgttcggcgctgtggctttgctgttctatattggtagcgggcggctgggcgcagcgcactggttggctgaatggggtcgcgcgcaatgggcggtgacgctgggcatgttgcctgcgctactcgcgctgttccagcaattctcgctggtctcgccgctggccaatgcggtggcgattccgctggtcagtttcgtcattacgccgctggcgctggccggtgtgttgccgtttctcgatccgctgctatggctggcgaatttcatcacgaccggattgatgcgcttcattgactggctggccgttctgccaatggcgacttggcagcaggctgcgccgcctgcgtgggccatattgctggcgctgggcggtggtgtctggttgttgttgccgcgcggctttccggcacgctggctgggtttgctgacttttttgccgttgctgatcattaccccgccacgcccgccgctgggcgaagccgaggtggtggtgctggatgtgggtcaaggcctggcgattcatgtacagacagccacgcatgatttgctgtttgacactggtccgacattttcggcggaagccgatagcggcaaccgcattatcgtgccgtatttgcgtgcgatcggcgtgcggcggctggatgaactcattgtcagccatgccgataacgaccattcgggcggggcagaatctattctggcagcggttccggtgagtctgttgcgggcgtccttacctgcggcgcatccgctgtggaatcacacgctgccaaacgcgccttgtcgggcgggggacgcctgggattgggatggtgttcactttttgattctgcacccggccgctaccaatgcggcgacgaaaagcaatgcggtagcttgtgtgctggcgattgatgcccatgggcgacgcgtgttgattacctcggatatcgaggccgcgcaagagtcggcgctggtgacacggcaggctggggacggcaacgcgtcacggcttgctgccgaagtattgattgtgccgcatcatggcagccgcacctcgtccacagacgcttttgttgctgccgtgggcgcaaaagaggcgatctttcccgtgggctaccgcaaccggtttgggcatcccaaggcagagattgtggcgcgctatgaacacagcggggcgcatttgcatcgcacggacgcagatggtgcggtcgctgtgcatctgacacccggtggggtgcgtattgaccatgcgcggactttgcggcgacgttattggcaatccatgccaagcataacagcaacagaatgaccttatttgccagtctctattacggtaggctggcttgacatgaaattcgcgaacgtccgtcagagcactcggcatgatgatttcttttggatgcctactgattcttggcatgctgctggtgacgcttccgttgcaagcgtttgcagcggtgagccggtgtgcttgcgcgccgcatcctgcgggtgtatccatggatatggatcatcacctggagcttcatgggggaattagcgcggaaaatcatctggcgggcgaagcacaacatgcgtcacatggtgcgcatcatcaacacaaaacctcatgtgtttctgtttcatgcgtggcttgctcgttcttctatgcgagcctcgccctcacagccgataccgcaacagtcaatcctgcatgggtgcatagcgttggttttgccgcgttatcactgctgcattcttcagcgtttgtggatttgcttgagaggccacggcgaggcatcctcatgtaatgacaacgtatttggcgaaggtttttttaaacacccctcaccacgatggcgtctgacatgtgacccagcgtggtgctttttctgggcgggctcgggttatccggctgcgcacaccagcattcactggcgtggacaacgcgtgcccaacggcctggatggtgtatcagggtttgattcagtctggcaagaccttcgtccacgagtttgtggcgcggcagcccggtacgttcatgtaccacccgcagggtactgttgcttatgaggttgcgggatgttatctgagcccgtacgcgcttcatctggcagcggacaatccatgtcgcgcgcgcaagagaaggcggctgatattgaggttcaggtgcgtaaacctgcggctaaaagtcggcatagcgggcatcatgagtaatgggtgagtggtcagtggtgagaggtgaggttgtttgcgcgtttcggatacacttactcggcacgctcagtggatgcccgcaatcgttttggatagcttagggctgatgcggaggggtgtttatttaatttaatttagggggagtacaaaaatggttattgcggtgctatgtgttgcgttattaggttttctggtgattggtcttggtttcgttgtttccatgacgcgagggtcaacaaaaaccatgtacggttacaccgtcgacccggctgaccggttgtataaggcga

SEQ ID NO: 1826 - DNA, 23111 bp, synthetic construct
  source 1..23111: mol_type = other DNA
  misc_feature 1..23111: note = Synthetic
cgcccaaagacgataaggtccagtaacgaattagtgcccaaacgatttgctccatgcacagagacgcaagcacactcgcctatcgcgtaaaagcctggcacagcttcttctggccctgttttataaggcgcaacgacttgaccgtagagattagtaggaatcccgcccatcatataatgagccgtcggaacaacagggataggttgttcaatgggatctacatgcacaaacttgattgctatctcacgtattccgggtaagcgtgatttgatcacctcggcaccaagatgatcgagcttcaataaaaggtgatcagcatttgggccaaaacctcggccctcttttatttcggttgtcatagcacgcgatactacgtcgcgactcgccagatccttggcatgcggtgcataacgttccatgaaacgctcaccgtccttattgagcagataccccccttccccccgcacggcttcactaatcagcacccctactccatacaaaccagttggatgaaactgccaaaattccatatcttgcagcgggacgccggcacgcgcagccatagccagaccatcacccgtattaataaaggcattcgtactcgcctgaaaaatgcggccagccccgcctgtggcaaataaagtcgccctggcttgaagaatcatgacctcgccagtttccatttccagcgcggttacaccaagtacatcaccttgctcatcccgcaagagatctaacgccatccactctacaaaaaactgggtgtttgcactcacattacgctgataaagtgtatgcagcatggcatgacctgtgcgatcagccactgcacaagatcgtgttgcctgcgtctccccaaaattccgtgagtgcccgccaaaaggacgctggtaaattttgccattctccaatcgatcaaatggcataccgtaatgttcgagctcgtaaacaacctcgggagcctgccgacacatgaattcaattgcatcctgatcaccgaggtaatcagatccctttacggtatcatacatatgccaatgccaattatcctcggtgacattacccagggaggcagcaataccgccttgtgcagcaactgtatgtgaacgagtggggaaaaccttagatagaacggctacttttaaaccagcttctgataattgcagcgcagcccgcatccctgctccgcctgaaccaacaatcaccacatcaaattttcgtttcgggatgttcacgttaactccacagaatttcagcaaaccagataagatagaaaaacaaggaaatgataactgcgatatgcaacgttagacgaataattgtggcatgaatataatccataaatacattacgcatacctacccaagcatgccaacaaaggcttataaaaaataaaaaagaagctattctcacccactgactggtaaatagcgatttcaacgctgcataatcagaaattggatagaaagcgaacaggaaggctaatagtaatacataaactaccatcaatactgctgtaacgcgctggattaaccaatcccgcaaaccataatgagcgccgcttataatacgattcatatcttttaccataataaagctcccatcagcactgtcaggataaaacccattatgaatacaatcttactactcaaacgcgcttgttccagggaaataccataatgtaaatccagcgccagataacgaatgcctgcgcaaaaatgatgcataaaaaaccatactggcagtaataaggcccatttcacaaatggattaaccagtatcagttgtaactcagtaaaaccctcaggcgaacctaatagcatttgcaagctgcaaagtaacaatggaatacccggaaaaaacaataatacaccgcttatacgatgcaggatggaaacctgcgctggcaacggctgcttaatcttaaagagattaagatattttggccgctttctctgaaattttgtttccatagaataagtaatggaccatgttgtttttagataattgacaacactaacaaatctttacagattttagtttaatctgttattccgtgtcatacaatgccaaatcatcatttaagatttgttctgatgactatcttaataatgctcgaattccgtacgaccctcgcgtctgatcaaatcatcaatcgtaaggccgattgctggcctgccattaaatacagttcccgatcttttattattgaagtgctctaacatggttcggtaggctgacggtggtaatgggaaggatttggctttttttacctgaagaagagcattcttcatataaaactcaacaaactctctcacttcaggtttctctgctgccttgatacttacataaataaaaataggacgggatagaggttggtaacttccgttctcaactgtttcaacagatggcaaaacaccaccattaccgctatctatcgcaacggctttaactttatcctgattctcgatgtaatagtgaaaaccgaagaaacccaatccattcttattgtttgccaccccctccactaatacgttgtcatcctcggattcaacataatcgccacggcttaattttgacttgccaacgatagccttggtaaagtaatcaaaagtgccagatgctgaatcagctccaaaaagtttgaaatcttcatttggccatgccgggtttatttggttccatttggtaattctaccctgggcaattggttcccatattttcttcaattgtgcgacagtcacggttgtactccaattgttatccggattaacagccacggttattgcatcaaaagcaacgggtatctctacgaatttcacgcgggaatttttgcactctgccatttcattttccaggatagggcgggaagcattcacgatatctatttcaccgcggcagaatttgttgaagccgtcaccgctactagagatattaaccatcactttgacaacatctttcttagctacctgaaaattctttgctaccgctttggtaatgggataaacggtgctggagccatctattttgataattgactgagcacttacaatatcggcagcaccgattaaagcactcattaagataagcatactcagcaccttaagagtgtgtacttgtaacattttatcctcctttgtttgagataccgcttagagtagcttaccttagagcagtttcggtactatgtgtataagaatgttaatacatatttctagactttgatcatatccgcttgtttctgatcgatcagaacataaattactatactcttcatcaatcagaaactggtttttttaaataaatgcgaataagtgcgatatagttttggaaacattagagtttatatatatcatcactattaccagctcactgcacaataaattgccggtttagattcagaacactcctattcctcattacactgccgagaattcaggaaatagccctctattctcggcgtgtggaaaaccttaacatcttgttttctttacactcggttaaaaatcgactgtaatctgtgataggaatgctgcaaaaccaccattatcccatccgtgggttcgtgcgcctgcaccaccggagtagcctcgagtatttgtagttggagttccagatgtgtcgatatctagcaaatagaccatattgttctgaaatttgacattcgaatgaggataccaatttaaggcaaatctgaacattgaagctcgaccacctctaattacacccgagttcatgtcaataaaatcatagccagcagcgacctcccacgcacccaagcctgaaagattccagtgaaatggtttcttgggcttaatccggtttgctgcaccgtttctgacatggtaagctttggattcaccggtcaggaaatagcttacaaaaccgtagtagccagtcaaatgctcattgtcataaccgacaccattgatattggtacgtaaaaattcagcttgagcggaaaaagggccataaactaaccaggattctgccccatagcgatcgaaactggtgatctggcggcgatttggatcggttagtgcaccattactcaggtttccagtattcagaacactggtacgatctacgtttgttccaaggaatccaacaaatgacataccgccgccgctagttgatccctctccaaccatagtgccgtcagctcggaactgcgtattgaccgtagtgtgtcctgcagagatacctacgtgcaagaatttggtgtcatcttccatccacggcctgcctgttatacgaccgatagctgtccagccggtgtcaccagagccattattgcggttctgattaccgttggcgttaaccgaggtattagccgaattccccgcaccaataggttctgtttgaaaagcgatcccagtctgccagcgcggaaccgcataattgacaccaataccagttttatacacattaggattatcaatgaaagcgttaactgccatatggcgttcaataaaagttaaaaaacggttactggcagcttcttccaagctgaacggttctttgaatgaaccaattttgtatgacaatgcatcggtgtgattaaatcgtacgaaggcatcagtaatcccggctgctaccgtgccattgccacggctaaaatcgtactccaatttataatcccatactttaaagaaagtaccttcaacaccaagacgtgcacggcggatagttgcgccactattcaattcattgggtgtattgctaccaataggaggattgggttcattgataaaattgtattctgcagcaggctggatacgtccatttactgcaaatgagaaattaccgtccttggttttaaaatgcaaacctcgatcatcaaaatccatgtgaactttctcggcttccttgacacgttcctcgagtactgagatttggttagaaagacgctcagtcgtagctttatccgccacttccgtcgtttggtccttacgggctggagctaattcagccgactcagtttttctcgatggttctgctgaagtctgcgatggtgctgatagtactttcggtgtttctgtttttggaggtatatcctcagcttttacgaaagtacctaaaagtacccggccaggtcctggctcagcaaaaatttgcttggtctcggtatcaacataaagctccaacgcaattgcatctgaaataactccggcactcaaagcaaaagagaatgctagagcatgtttgaatattttcatgttctgtccttaatgagatgtccttaagggcagcatggtaataaaatagtattacagttttatgacattattacaatttcatgacatatatgacatttctttaatgaggcttagcaagtcagtaaaattgctagaatctaaagaattgaaaattcgttctcaatgaagagaattcaactggaaagataaaataggctagaggagatcggaataaaggtgtgacctggatatagtacaaatcacacggaggatagtgcctgagaaaacaagcttttaagccctgctatcgacaattgagaaactaatcaaaatagcctccggctttgccggaggctatttattctataatcgtctttctagttttaccacttcatcaattctgagatctaatttgctctcgccaccaaaaacggtacccacttttctttgcttaaggtgatccaggttcaactgataaacctctgccggcagaggaaagtatttgacttcttttacaagagcaggtgcatttttcatgtaaaaatctaccaattcattcacttcagacttatctgctgccttggcgtttacatagataaagattgggcgggataaaggttgatagcttccattttctactgtttctgctgaaggaataacaccacccttaccattatctatcgcagcagcatttactttcttcttgttctcagtgtaataagcaaaaccaaagaaaccaagactgtacttatcagtagctataccttgtacgagcacgttatcatcttcagaagcagtaaaatcaccacgactcgattttgccttgccaacaattgcttctgtaaaataatcgaatgtaccagaatccgcacctgcgccaaataacttgattttctcattaggccatgctggattaacttgattccacttggttattttcccctgtgccgatggctcccatatctttttcaactcggcaactgttatcgttttgctccatgtattatggggattaattgctactgttaaggcatcaaacgcaatgggcatttctatatactgaacacccgctgctttgcaagcttccatttcagaatgctggatcggtctcgaagcattgacgatatgaatttctcctcgacaaaatttcttaaaaccaccccctgtccccgatattcctactgttacccgaaccccgccttttttagctttctgaaaatcttccgcaaccgcttctgtaatgggataaacagtactagagccatcaatcgttacagttggattggcattgacttgaccattcatagtaatcgccatagttaagactataacgaaaggggtaattttgagtatatgtgatttcaaagtgaattcctccatacgtaattagctctacaaattaatgacatcgcctgggcaaaattaaatgagtaacgaatactagttgatgaatattgcagaattgtgacaagctactctaaagcttaatttatttattagattgttcaatcgaaggaagttattccattttcaaatcaaaaatggcgcggaagcaagccgaaaacagtataaataatacggaaaggggaagccggcaaaatcagatttgattgaacaatggaatgagttcagctctcaccttcacaaatcactatccggcagagtgcgccgacaaaatagtatgttgctcacattcttgatcggcacaaaacatgtgaaccacttatgcaaacctggcttagaaaaacaggcgttccaactctactccgggatcgtccgcgcgcatgaatgtttcccctactaaaaatgtattcacctgatgcgcctgcatcaaagtgacatcatcacgtgttttgataccactctcagtaacgacaattttctccgctgaaatttgttctagcagctgcaaggtcgtatccaggtgtgtctcaaaagtacgtaaattgcgattgttaataccaatcagcggtgtggacagttgcaaggcaagctcgagttcgtctgcatcgtgcacttcaaccagtaccgccataccaagtgaatgcgcaagaaactcaagttgacgcatgcgtgcaagtggatcggctgcatgcttttcattaggataaggaaacagcagaaaagcggaaacaatcagcaaaatacaatccgcacccatggcacgggattcgaatacctgataatcatccaaaatgaaatctttgcgcaacaccggtagctcacaggccgtacgcgcctgtttgagataatctgtgctccccatgaagaattgtctatctgtcaaaatggacaggcaagcagcgccatgcctggcataacttgccgcaatctccgccggatcaaacccctcgatctcagtgccaagtgtatttcccatggtcaagtcagacgacgtcatcgctgacttgacccgtccacgcaacaatcctttgctcggactcgcctgttttatttcagcgatcacagcaggtaatccctgatcaattttggtgcgaatagcgccaacaaaatcacgcggtgcagtcgctgcttgagactctgtctccatcgccgctaacggctttgatgctctggcagcggctatttcctgaactttaacggtaagaattttattcagaatatcagacatgcttgaatcctaactactttgatgatgggaaaaggcgattaaatcctgcatttttttcatggctgcaccacttgcgagaacgctacgggctttttcgattccctcggcaagcgatgctgtgattcctgctacataaatggctgcgcctgcgttcaataaaacaatgtctctcgctggtccggactgattatccagcacagctagcagcatttctttggcatgggctagatcggttactttaatggtttcaatcggtgcactggcaataccaaaatcctctggctcgatcgtatattcataaatttcaccttgcttaagctcacccactcttgtttccccggtaatcgtgatctcatccagaccatcataaccgtgtataaccataacgtgatgactgcccaggcgttgtagcacacgtgcaatgatactgactagcctcgcgtcaaatacacctaataactgatttttggcaccggcaggattagtaagtggccccagaatattgaataatgtgcgtacccccaattcacgccgaacgggggcagcatgcttcatcgcagtatgaaaattaggcgcaaacatgaaaccgacaccgatttgatcaatagactgagcgatttgctgaggggtttgattcagattgaccccgacggcttcgagcacatccgcgctgcccgatttgctggaaactgaacgccccccatgtttggccacctgtgcgcccgctgcagcagcaacaaaagtcgatgcagttgatacattgaaggtatgggaagcatccccacccgttccacaagtatcaaccaaatgcgttaaatccgacacgtcaactcgggtagcaaattcacgcatcacttgggctgcggcagcaatttcttcgatggtttctttttttacccgcaaccctgcaatgatggcagcaatcaatagcggcgatatttcaccaagcatgatctgccgcatcagtgttagcatgtcatcgtatggaatttcccgttgctcgatcaggcgagccaatatcgcttgtgggttcacagattaaatggctttatgaaagaattagatatctgattgttacccgccaaccagaaaatttctgagtaattggtgcccatgctcgctcaaaatcgactctgggtgaaactgcacgccctcgatcggtagtgttttatggcgtacacccataatttcaccatcctcagtccaggcagtaatctccaggcaatccggcaaactttcacgctcgatcacgagagaatgatagcgcgtcgctataaacggattgggcaaacctcgaaacacccccacatcatgatgaaaaatctgcgaggttttcccatgcatgagttgtttggcgtgaacgattcgtcctccaaaagcctgaccgatactctggtgacccaggcatacacccagcgtcggaacctgcccaccgtaatctctaagtaatgacaaggaaatccctgcttcattgggcgtacagggccccggggaaatgacgattctgtcaggatgaagctgtttaatgcgctccagcgttatctcatcattacgaaaaacctcgacttcctcacctaattcaccaaaatattgcaccaggttataggtgaaagaatcgtaattgtcgatcatcagcagcattttttatatcaataaaactcagtaataatagttggaagcagtaaacatcagatgagcttactaaacgctgattttatcacggactaaataaccatcggctaaagttggtagatttgatttacgatttgtaagtctggatacatatcgattgggtagcattcttattcgagcttctttctaaaagtatctatccgaatttgactcaaattgacgctccaagtatttgcctgattattgcttccgtcatcttcctgcccttgcacagacacagaattaccctcgcgccaacggatgcttactgcggtatattctctcagctaagttaactgacaaaactgccaattttaatcctatgatggaaataaaaagggtcgcctatagcgaccctatcatttggtgcatctttcagcttgttagcgtccagagcacaaatcccaatatgctattgttatgttgagtatcctaatagagagagatattatagtcaataaaatcatactaataccttaatcttaatagggaatatgtcatgctgcataagatgcgctatcgactggcacttgatttaggatcaacttcactgggctgggcgatgattagattagatgccaatcagcgaccctgtgcggttatcaaagcgggggtgcgtattttttcgaacggccgcaatccgaaagatggttcttctttggctgtaacccgcagagaagcccgcgccatgcgtcgtcgtcgtgatcgtctgctcaaacgcaaggcacgcatgatgcgtacactcatagaatatggcttttttcctgccgaagaagcgcagcggaaggcactagaaacactcaatccttataaattacgtgctgatggattggataaagcactcactccggctgaatttggccgtgtattgtttcacatcaaccaacgacgcggattcaagagtaaccgcaaaactgataaaaaagatactgatagtggtgcgctaaaaaccgctatcagcaaattgcgcgaaatactgaaaacagaaaactgccgcaccgtgggtgaatggctgcacaaacgcaatcaagcaggtcaaactgttcgcgctcgctaccgccaagacaaaactatcaaggatgatggcaaggcaaaaattgacaagtattacgatctctatattgaccgcgccatgattgagcatgagtttaatgaattatggagaaagcaggcagaattcaatccagccctattcagcagtgcagcctacaccgacttgaaagacgtattgttgtatcaacgtccgcttaaacctgtcaaacctgggcgttgcacctttatgtccgatgaagaacgtgcaccgttagcattacctagcacccaacgcttccgtatgtatcaggaggttaataatctgcgtatcctgcgggaaggcttgaaggaagaacctctgacattgcagcaacgcgatgatctaattgttgtgctagaaagaaacaataaacgcacctttacgcaaattaagaaattgcttggcgttggcggtgcagttcagttcaactttgaagatccgaaacgtgaggaacttaaaggtaataccaccaacgccattcttggcaaaaaagaacattttggtgaggcttggattgcgttcgacgaagctaaacaagacgccattgtcatgcaattaatcaaagaggaaaacgaagctaaactcatccagtggctgcaagatgaaaccggcattgaggaagaacgtgctgaaatcattgccaatgttggattaccggaaggctatggcagtttaggtacaaaggcattagcacgaattctgccagaactgcgccgtgatgtggtgacatacgacaaggcggtacaagctgcaggcttcgagcaccacagtaaactcaatcaaaatagaggaattcccggcatcacgttcaaaatcgaaagcattgatcaagatactggtgagatcaaagaatttcacattcacaaggaattgccttattacggtgaatatctgcaacgccacgttggatttggcagcggcaaaccggaagatcccatcgaaaaacgatacggcaaaattgctaaccccaccgtgcatatcgggttaaatcaggtacgccttgcagtaaacgcgctcattaagcgctacggtcatcccagcgaagtcatagtcgaggtggcgcgtgacttgaaacaaagcaaagagcagcgcagcgaagaaaataagcggcaagctgaaaatcagcaacgcaacaatcggttacgcactgaaattgctagaattttacagattaatgaagagggcatccgtcgcgacgacattgagaagatgattttatggatcgaactcagtgctgatgtcgctgaccggaaatgcccttattcaggtgtaccgatcagcgcaaccatgctcctgagcgacgaagtggaaattgagcacattttgcccttctcacaaacgctcgatgacagtctcaacaacaaaacggtggcgctccgtaaagccaatcgcgttaaaggagaccggacaccgtgggaagcacagcaagattttgctgctcaaggctggagctatgcggatatcctcgccagggcagaaaacatgcgcaaagaaaaacgctatcgttttgccgaagatggttataaacgctggctgaaggatgatgcgggattcctaccgcgcgcactgaatgacacgcgctatttaagcagagtggcacgcgaatacctgcacctgatttgccccaatactcgtgtcatccctggtcgcataaccgccatgctgcgcagtcaatttggtctcaacaaggtgctcggcttgaacggagaaaagaaccgcaatgaccaccgccaccacgcggtggatgcctgcgtaattggcgtgactgatcagggtttgttgcaaaaattcgcaaaagccagtgccagcgcgcgtgaaaagcaactcaaccggctcgtggacaacatggagtcaccgtggaaaaactaccaagagcatgtacaacgcgccattgatgctatttgggttagccacaagccggatcacagccacgaaggcgcaatgcacaatgacacagcttatggcttgcgaggcaatggcaaagtcagtttccataaaatgatggatggtaagcgtgaatacattgaagataatctcaaagtcattgaaattgccgatacaaaagctgcagaacgccatggcttgttgcccaatggtaaacctaaaccctataaaggctacaaaggtgacagcaactactgcattgaaattgttcgcaatgaaaaaggcagatgggaaggagaggttatttctacctttgaggcttatcagctcgtgcgtgaacagggtgccgcacagcttcggcatccggctttgggtatcagcgggaaacctttggtaatgcggttaatgattgatgacacagttcgtttagatgttgacggtcaatcttgcacaatgcgaatagcgaaattaagtagtaatgggcaaatattcatggcagacatatgtgaagcaaacgttgatgcaagaaatcgaaataaagaagattcatttgcctacatttccaaaatggcaggttctcttcaaacagccaaagcacgccgcgtcaccatttctccgattggcgaactccgcgattccggtttcaaggggtaactcagatgataggccgcatcgtagaagtggcggatgaccggcggcatttgttcctttcgcgcggttttctggtggtaaaagacacggaaggcgagcgtaaggaattggggcaagtaccgttggatgatattgctgctgtaatcgccaatgcgcatggcctgagttataccaataaccttttagtggcgctagccgagcgttgcgcaccattcgtgctgtgtgctgccaatcacaatgcggtagggatggtactgacaatagatggtaactatcaacaagcaaaacgatttgatgcacaacttgctgccagtcagccgctcatgaagcggctttgggcagaaattgtcaaatcaaaattacagcaacaagctactgcacttgaggctgcaggtgcgccatttattcctctgtctgctctggcccgcaaagtgcgctccggtgatccggaaaatttcgaagcccaaggcgcgcggcgctactggggacttctgtttggggatgattttcgccgcgatcagcaaagtgacggtcttaacgccatgctcaactatggttataccgtcttgcgcgcagccaccgcacgcgctgtcgttgcggcaggattgcatccaaccatcggattgcatcacagtaacgaaggcaatgcaatgcggttagtggatgatttgatggaacctttccgacctgtgatagacctgaaagtctggcaattacatcagcaaggtgaaattcaggtgacaccagaaaacaaacgcgcattggtaagaacgctatatgacgatatgcaaaccaatgtgggcgcaactcctctgatggtctgcgcacagaagcttgctacttcactggctcaagtttttatgagcgagagaaaaaaacttgatttgcctctgccagggttgccactcgaccttgctgcatcactcaaggacgactaacgtgccatgctttccggatatcgcttaatgtggattgtcgttatgttcgatttgccagtggttgaaaaagatgaacgtaaagcagctacaaattttcgcaatgccttattggatatgggctttgagatgtcacagttttcagtttatatgcgcttttgcagtagccagagccagatagacacctactgcgcacaagtagaaaaaatcttgcctggaggtggaaaagtcaatatcctgcaatttactgataaacaatatgaacgcatcatcacttttcatggcaaagcaaaacaatcaaataaaaaatcaccagagcagtatgaacttttctaataaaagttattttttctttatttccgattacgttaactccatgaataatcatggagttaacgtgcctggagtttagcatattgggatctgtgctctagccggaactaactttagagtcatttggcatagtgataaagtttagcatattgggatctgtgctctagccggaactctggccggtaacaccattacagcgcgcatagtttagcatattgggatctgtgctctagccggaacttgatcacgagcgcacagggatattttggcagtttagcatattgggatctgtgctctagccggaacgtaatctctccagcgaggttctcataatggagtttagcatattgggatctgtgctctagccggaactgcagcatcatgtgattgaactgctgtggtagtttagcatattgggatctgtgctctagccggaactaatacgtattgcgccgccatcaattttgaagtttagcatattgggatctgtgctctagccggaacattttaaataaacaatcactatcaagacggagtttagcatattgggatctgtgctctagccggaactgtaacgtcttacctgcgccatcaatattcagtttagcatattgggatctgtgctctagccggaacactggcgagatattcacaaatgctgaagatagtttagcatattgggatctgtgctctagccggaaccatttgcttagtattcacgtattccttcatagtttagcatattgggatctgtgctctagccggaaccgaaagacttatattagaccttgaccatatagtttagcatattgggatctgtgctctagccggaacattccccacttttacactactgccagtcttagtttagcatattgggatctgtgctctagccggaacacaatacagatgctagcccaccagcagcggagtttagcatattgggatctgtgctctagccggaactatacgatctttgagtttccgcataattttagtttagcatattgggatctgtgctctagccggaacaccatcacgcctaacaccaccgccggtccaagtttagcatattgggatctgtgctctagccggaacttctgccggtaattagcgccatattcaataagtttagcatattgggatctgtgctctagccggaacgggtggaacgaatgcggcatgcgtacatagagtttagcatattgggatctgtgctctagccggaactcggttacagtaaatgctggttccgaggcaagtttagcatattgggatctgtgctctagccggaacaccattccgaatgagttgaaatgacagaggagtttagcatattgggatctgtgctctagccggaacacaatcagaagaacaaaaggtgtcagtcattgcatcttgcaaaacgaacgaattgaccaactaacagtactgtaatgaacattaaaatacgttgcaatttcaaacattgtgtaatatcccgttttgtatagcgcattcattgcttctcctctatcagtaatgccggcaacaatttcatccattggtttcctgggcgatttcttcgatcgcttggtaatatgaatactattactttgcttcaaactaatatatttttgcacctcaccaataaaagcattatcgagtaaggttaggcatgaagcgcctcggcgaactcttctgtggaaacgccagcctgcttgagaagaccagccagcgtaccgatcttcaactcgtgatggttgggaataacgcagccagacgaaccgcggcgcatgacgatgtggcttccgcgttgacggacgacgacgaaaccgaaccgttccaaggctcgcacgacctcggccccggacacaaccggcaatttaggcatgttctggcacttcgaacgtagtcagcaatggccgaccagaaacagcaaggggaaattcttcgagatataactctgtcgcctcgcgcagattgaccaaagcttcttctacggtttcgccttgcgtagtcgtgccggtttcagggttgaatgcgacataccctccttccggggctgggcttaaaacagcggacagttccataaattttctcctttagttgcagggggacgaaatacctaaaacaaatagcatttatccgccaccacccccaagtttacaatagccactaccctatcggcggataaaccttgttgaactaaaccagcaggaagcggcccttatgggaattgtaaaactgtggaagtgaaagtcaactgacagttgtgacgagtgagtatctggtgaatttaaaaaaatagcgtttcaacggagctggactggcacgtttccttctcgatttttgtctggatcggtccattgttgagtcattcatcttgaaaaggtgtcatttattgtatcttgcaaaatgaacgaattaaccgactgatagtactgtaatgagcggtgaattcgtacaccatacaatgactgacaccttatgcgatggatagcggccttcgactgttcgataagctcacagctcaggccgaacggtgtttttgtaaatatcgtgctggaaagttctactggcgaactagccgggttagtcatgctagcaatagcatttcaacaatattcttatgacctatcagtaaagtaaaattaaaaaataggattagcatcacgtttcaagtcaatcgtaactattatctatagggaagaattatgaatcatcttattaagcatactggctggttggtattagccattgcaggtgccttttcttttggcgtcattgccctgcagcaaggcgaatccattaatgcgatctggattgtgattgcggctgtttgtgttcacctgattggctatcgctattacagcctatttatctcacgacgtgtattaggacttgattccgaacgcatgacgcctgcgcataaatttaatgatggactggattatgtgccgactaataagtacgtgttgtttggccatcattttgctgcaattgccggtgctggacctttggttgggccgattctggctgcccagatgggttatttacctggtttattgtggttgctgataggagtggttgtggctggtgccgtacaagacttcatcgtgttatttatgtcgatgcggcgcgatggccgctcgctcggtgacatgatcaaatctgagcttgggccgctccccgggatgatcgcgctagtcggcaccttctttatcatgctgattctgctggcggtattggctttgattgtggtcaaggcgctggctgaatcaccttggggaacctttaccgttgccgcgaccatccctattgcattcttcatgggtatttatgcgcgctatattcgcccaggacagattggtgaggtttcattgattggatttattctgctcatgctcgcgatcgtcggtgggcaatccattcaggaaaaccctgagctggcagctttatttacctttaatggcgtccaactcacctggatgttgattgcgtatggcgcaatcgcttcggtgttgccgatctggctattgctggcaccgcgtgattatctatcgactttcctgaaaatcggcacgattgtcgggttagctgtgggtgtgctggctatttcaccagagcttaaaatgccggctttcacacaatttgttgatgggacgggcccagtctggtctggcagcttgtttcccttcctctttattacgatcgcatgtggtgctgtttctggttttcattcgctaatctcatcgggtacgacaccgaaaatgattaaaaatgagaaggatgcccgtttcattggctatggcgccatgctgatggagtcatttgtcgcgattatggcgctggttgctgcttcaatcatcgaaccagggatctattttgcaatgaatagtccggcagcactgattggaagtacagccgagtctgctgctcaaaccatttcgcaatggggattttatcttacaccggaaatgctgactcaaaccgccaaagatgtgggtgaaaataccatcatctctcgtactggcggagcccctactttggctgtcggcatggcccaaattctgtctaacttcatcggcggacaggcaatgatggcattttggtatcacttcgcgattctgtttgaagcactctttatcctgacagcagtcgatgcgggtacccgtgctggacgattcatgttgcaggatctgctcggtacttttgtacctgccatgaaacgcaccgactccattgtcgcaaatctcattgccacgactttatgtgtcggtggttgggggtatttcctctaccaaggggtcatcgatccattaggtggcatcaatactttatggccgctcttcggtattactaatcagatgctcgcttgcattgcgctcattttgtgtacctgcatcctgttcaaaatgcaacgtgaccggtatgcatggatcaccattgtgcctaccgtttggattgcctgcaccaccttaactgctgcctggcataaaatatttaacgacaatccccgaattggttttctagcccatgcaacctcatatgaagaggcgctaagcttaggaaatctgcttgcgcctgctaaatccacttcccagatgcaacaggtgatttttaacgattatctggacgctgggctcgccgctatgttcatgtgcatactgatcagtatgttgttttttggctttagaactatcctgcttgcacgcagagtagcgcgcgtcgaattatctcctgtcaatccttattaatttttagacttactaaagagaggtttttcatcatgttaaataaaattatccgagtagggagttatctagggcaaagcatgcgattaatgattggtgtgcctgaatacgacgtatatgttgcgcatatgaaagaggcgcatcctgataaggcaatcatgtcttatgaagcattcttccgtgagcggcaggaagcgcgttatggtggcaaaatcagccgctgctgttaaccccgtctattgaaaactgggcgtcttaccaaactcagtcataatgcaggtgagacgctcccaaaactcgtatttctggaacctcaataacagtatttaccggttttataccaaagatactcttgtgcgctgctatttatggctttccagctttttcagcacatgatgggtaatattatttgcaagctcctgttcatccagaaatattgtccctgcgttttctttttgtagtcgtgcagcatcttctacatcatgcgtgctgattaggatctcagcctgcggattcaggatgtgggtggtttcgaccatttgttgtatccgcaacgcatcagcagcggtgataatcaatacgctggcgcgagcgatgtgcgcctggatcaaaacagccggatcagtggcatcacccgctacagcatggataccctgcttacgtaagcgctcgacgacttcgcgattatgatccaccacgacaaaatggattcctttcttggccaaaatttcacctatacgcttccccacagctccataaccaacaattaccacatgatttgtcacataattggatgcaactgccagcggtaattctgccaacggatcaactgaacgctccaatctgcgggcgagtcgggaacgagcacggatccagttctgaatgggctcagctgattgaaatatcaatggattaagcgtaatagaaataaaagcccctactaatatcaggttatatccctcatgcggaagaagccctagagacaagccaagcgaagcaagaataaatgagagctccccgatttgcgcgagactgaccgacaccgtgagagctgtattaagtggatagcgaaaaatgagcacgagtataaaggcggccagcgattttcccagcataatgatcgcaaccacaacaagcacgtgtagcggctcctcgatcaaaatatgcggatcaaacaacatgcctacggacacaaaaaacagcacggaaaaagcgtctctgagcggtaaagattcctgagcggcacgatggctcaaactagactcccgcatcaccatgccggagaaaaatgcaccgagcgcaaaggaaacatcaaacagtattgctgctccatacgcaattcccactgcaacggcgataacgcatagcgtgaacaactcgttcgatttggtgctggcaacatgccaaagcagccatggaaaaagccttttccccacgataagcatcaatgctatgaatgctgacaccttagctaaggtgatgatgagtgtcatcaataattgcgtgcttgcaactgagctagtgtcacctcctacaccaacggagagtggcggcagtaatacaagagccagcacaacgactaaatcttcaacgattagccagccaactgctattctgccattgatcgatttaagcaatccgtgctgctccaatgcacgcaagagcacaactgtgctagcaactgacagcgccaaaccaaatacaatacctgcagctatatcccagccccaactcatcgcgattgtggctcccaaggcagttgccactacaatctgtacaattgcgcctggcagcgcaatgtgtcgaactgccagcaagtcatctagcgaaaaatgcaatccaacaccaaacatcagcagaatgacgccgatttctgccagttgatttgataactcgatatctgccacaaacccaggtgaatgagggccaatgatcatgccggccagtaggtagcctattaaaacagggagttttaatcgttgagcaacaatccccataatcagcgccaggccgagactgactgcaatagtcataattagaattgtgctgtgtggcattcttgaaaaaattgatggttttattaaattatttcaatttatggaagcaaatggggtcaagtatttcaattcattcctggaatgaagcaacacgcataaataacaggcaataagatgcccttgatcaggaaacgccttagggctgggcatttaattttgattaatgcttcagctcatcacgcttttactgatatcttctttgagataattttgtcggcttcagataattctgaagctctagaaaatcattctagcgatttgcagcgatattttagatatgctgcaccggcccagctatggctatcgcgcacaagaaaaggatgattttcatctttcgttgtcagctttacccagatttaagggtaatcaaaatgctcaacctttataaatataattaatataagttgttatcatcatgacaacgaaaagcaccagagacagagcaatacgtattgttaatgatttgaccatacgcgtgccctgcccattatctttaagcatgtagtaaagtgcggatccaagactgtaaagtattatcagcaatagtaaaatagcaaagatcttcaatttttattcctattattgttggaattaaattaagtgatcatcaagcttaagcactcaatgactttatgtgtttcatcccgtttagttgcgactctgcttatataatatattgtaactgattaccataacatatgattgatccagtaatttttagatagtttctcgatattttgctaactccttcaactttttcagaacaacatgttgagtaagcacaacataacagaatttccgcctgctattcttctgatggggccgacagctagcggaaaatcgaatgtagccatggaaattgcccaatattttccagttgaaatcatcagcgtggattcagctcaggtttatcggaaaatgaatatcggcagcgctaagcctgatcagtatgccctggctgcagtacctcatcatctgattgatttaattaacccagacgagcattattctgccgcacaattccgccaagatgcgctcacaaaaatggatgaaatcacagcaagagggaaaatacctctattagtaggtggcaccatgctttatttcaaagccttgaaagagggtctctctgaacttccttctgcagatgaaaatattcggaggaagattgaaatagctgctgcaaagaaaggctggccagaaatgcatcgcatgttgaagcagtttgatccaatcactgcagaacgcgtcaagcctcatgatagccaacgcatccaacgggcactagaagtatactatctcactgacagacctatgtcagaaatactatcgcaacagaaaagcacaccgctcccctataacctgatcagcatcgcgctccttccagctgaccggaaaattttgcatgagcgtattcttttccgtttcgaaaaaatgatagaaatgggattgattgatgaggtacgcactatccgtgatcaattttgtgtaaatgcagaaactccttccatgcgctgtgtcggttatcggcaggtatacatgtatctggacaattttattagcctcactacaatgagggatatggggattgcggctacgcggcaattagcaaaacgtcaattgacctggttacgagcaatgacagaattacaggaattcgactgtcttgcagaaaatttatcccagcaagtgatcgcatacttgcaaaccagagattttgcaactaattgacactcaaggttttcttcccccctatttaaatttaagctaactttaattttaaggagataatatagaaatgcgcaataaattatggattctaattgggatactttctagcattttggccataccgggctgtggtaattcagaaaaagtgcatgaatcctgggtagtacccgctgagggacctcaatacgatgataatgctatttccaacaat

SEQ ID NO: 1827 - DNA, 23108 bp, synthetic construct
  source 1..23108: mol_type = other DNA
  misc_feature 1..23108: note = Synthetic
gatttgcaggcaagcgggcgggtatttgaaccgcgccctttaatacgcgcgccatctcggcttcgatgtgttcgtcctgttcgagctgggtgcgcacattttcagccatgccgggtgtcgggtaacgcagtgcgcgggtcacagcctgcagggcctcctggtagcccgtgccgtattttccgctcagctggaaaaccggcatttgcagcatctctgacatcttgcggctgtcgatgctgatgccgtattgcttagcttcatccgacatgttgagcagcacgacgatattcatgttgagctgtttgagctgcagcagcaggctcatctggcgttcgatctgcgtcgcattcagtatcaccagcgccagatccggcacattgtcatgcaagaaatgccgcacgacctgctcatcgtcagaaaatccgtgcaaatcgtagatgccgggtagatcgataatttcgaccatatccgcgcctagcaggattttgccgcatagcaattcgaccgtgatgccgggccagttacccacgcgtgctgcgccgcccgtcatgcggttgaacagggtggacttgccggtattgggcatgcctagtaacgcgatgcgtttcatgatttgcagatcctgattttggcggcttccagacggcgcagcacgatgtctgtcgtgccgatgcgcacctgcagcggcccgccgaagctggccttgcggattaattctatcgtgcggccggaacgaaagccgagtgccagcagccgctgatgcaacgcttcttctgcgtgaatagcggtgatggtggcgatgtcgcctgtatgcagcgtggcaagtgtggtggcaggcatgaagcgcttagaaattcaacaatggtgcattattccacagccgtcctgtgtttgtcgcgcaaggcgtgtttgcgtgtggtgccaatcggatggaaatcatagtagcggcggtatatttgccgtgcccgttaggttagaatgccacctttgcttgtcacgaaaacgagagtcagaatgatcaagggaagtattgttgcaatcgtcacgcctatgcacgaagacggtagtctggatttgccggcgtttcgcggattgatcgattttcacatcgagcagggtacggatgccatcgtggtggtggggacgacgggagagtcgccgaccgtcgatctggaagagcacgagctgctgatttcagaggcggtgaaacatgctgcgaagcgtattcccgtcattgccggtacaggtgccaattcgacacgcgaagccatagagcttgcccagttttcacagcgtgccggggcggatgcatcactgaccgtggtgccttattacaacaagccgactcaggaaggtctgtacctgcacttcaaggcgattgcagaagcggtggacatgccgcatatcctgtacaacgtgccgggacgtacagtggcggacatgaacaacgacacggtgctgcgtctggcacagatgccgaatatcgtcgggatcaaggatgcgacaggaaatatcgagcgcggcagtgatttgctggcgcgcgccccgaaggattttgccatctacagcggcgatgacgccagcacgctggcgctgatgttgctgggcgcgcacggcacgatttccgttactgccaatgtcgcgcccaaactgatgcacgagatgtgcatggccgcactggacggcgatgtggtgcgggcgcgggaaatcaatttccgcttactgggattgcaccgtaacctgttcgtcgaggccaatcctatcccggtaaaatgggcggtcgcacgcatgggccgcatgaaaaacaccctgcgcctgccgctgacgcccttgtcggcagggatgcatcacgttgttgaacaagccatgcgggacgctggcgtacttacaaattaatcttcgggaataaatatgaaagctttgcatattggaatttgtagtgttgcgctggtctctctggccggatgcggtgcgatgggcttgggtaacaagcgcatcgattatggcgcggctgccgtacaagtgccgaccctcgaagtgccgccggatctgaccactcctgaagtggatgaccgttacaaggtcgcaggtggagagtctgttgcgacttactcggcgtataacagcgaagcggcgccagtcgcgcgcagcacggtgctgccggttgtaaagggcgtcagtctgcagcgcaacggcgctcagcgctggttgaaagtatccgatcagcctgaaaatgtctggccggtcgtcaaagcctttttgcgtgagacggggctgagcattcagactgaggatcaggcagccggtatcatcgaaacagaatgggcggaaaatcgcgccaagattcctcaggatggtctgcgcaatatcatcggcaaggtttttgatggcctgtactcttcaggcgaacgtgatcagtatcgcatccgtctggaacgctcaggagaagcgactgagatttacatcacgcatcgcggcaaagttgaagtgctggatgcggacaaaaactcctcgaagtggcaaacccgcccgaacgatcctgaaatggaagcggaattgttgcagcgtctgatggtgcgttttggcggtacgcctgcgcaagccgttgcagcgaccgaaggcgctgccgtctctacgggcgctgccacgctgctgcaggtattcgatggcagtagcgtcatcgtcattagcgacgcgtttgacaagagctggcgccgggtgggacttgcgattgaacgtgccggttacgtcgtcgaagacaaagaccgcgagaagggcgtttatttcctgcgcaccgtcaaggtcgaaaagggctggatggataagctgcagttctggaaggatgaagaggacacgagtctgcgttatcgcgtcaccgtcaaggatgcgggcgcttcatgcgaagtcgcggtcaccgatcagaacggcgtaagctcggaggcgagtcagtcgcgtctcgatgcaattttcaagaatatcaatcaataaactgattgcagggtaagtaaaaaagctcgcctttgccggtgagctttttttttgaggaaatcggatgaaatttgcctctttagggagcggtagcgaaggtaacgcgttgctggtgagcagcgggcagacgcatgtattgcttgattgtggttttagtctgaaagaggcggtcgcgcgtcttgctcgtcttgatgtgacgcctttccagctgaacggcatcgtcgtgacgcatgagcacggagatcacatcggcggtgtggcgcggctggcacgccaataccgtattcccgtctggctgacgcgaggcacgcaccgggcgcagcccaaggcatttgaaaaggtcgaggagctacacgaaatcgatgtgcatcagtgttttatgattggcgatatggaaattcagccctaccctgtgccgcacgatgccgcagagcctgtgcagtatctgttgtcaggcggcggtaagcggttgggggtgttgaccgatgcggggtgcagcacgccctatatcgagcagatgctgagcgggtgcgatgcgctggtgctcgaatgcaatcacgacagcgatatgctgatgaacggcagctatccctatagcttaaagcagcgtgtggcggggcgtttcggtcatctgggcaatgccgaggcggcggcgctattggccagactcgatacgagccgtttgcagcatctgattgccgcgcatctgagcgcacacaataatacgcaggcgttagcagtcagtgccttgtgcggggtcttgaattgtgaggcggaatggattggggttgcaacgcagcatgaaggattcggctggcgggaaataatatagcgcaggagatagcgctttttgatagggagaccgcaagctcgcacggggcttcccgcgcaactaaacgatgaggccgtaaagttgctgaatgatagtcgcgcgatgcgctcgttgttttaagcgaaaaaaaaccggcttgcgccggttttttcttgcaagcagtctattacttagcagctggagcggcttcaacagcagatgctgcttcagcaacaggagcagctggagctgcttcaacagcagaaacagcagctggtgcttcaacaacagcaggagcagcagctggagcttcagctgccttttcaccacaagcagacaaagcaagagccaacagagcagcaacgagagcggataatttcatgttaagtttccttaaggttaagttaaaaatgattgaaaattttgttcgacttcgctgattcagctaaaatcaaagtcgcggcattctaccagtaaaattaaaaaaatccagtaaattgcagtatttttataagcctaattgcgttgtggatatggcggaatgggagcttgaccacatttcagtgaaggatgcggtcaatgcgcgtgcattatcggggtcgttttgcgcaaagagtccgcgcggatcatcgaaatgaaaccggcgtacatagtgcaggttgtccgctacgctgaagggcgcggtaatgtgttgcaggattttggatgtctggcggatgaacatcctgtcgtcaaactgctgcaacaacatcgtcatgcgcggacacaaagtggacaggtagtgcgtatcgtgcgtcagcacatgcaggcggttgttagggtttgccagcagaaaatggcgcaagcagtcgtaacgtgcctccgagttgaaccccagtccgtcgaaattcttttcaaacaaatagagggtatgccgggcccgctggcataaggcatcgagtgccgcgctgtaatcggtaatgccgtccagatgggtgtgtgtcagcgcgtcatccgtcatgtcggtttcctttaaacgggggaaagatagccgtccagataccattcatacagcgtttcgatcacatgttccgggcacttgggttgtgcgggcaggctgcgattgtcagccagttcgcgcagcaaggcgtagtcggcggcgtccacctgagtggattcgccgttcataaacacggtatcggtgtggcatagcatctggctcttgagattcagtgcaatgccggtgctggcgagtgctttggcgaattttttcagactcagctccgtctccggcgtatcgaaatagatatgcggcttgggttcgctgagataacagccgaggaaattggcgatatcgcctttatcccagcgtacctgcttgatcgcctgttctacctgcgtcagcatatcggaactgatttcggacggatgtgcctgtgttttcaaatcgggatcggcgtagttgccttccaccacgatccggtcttgcaggtaaaccagaaactgttctgcaagctcctgataggccggggtgcgaaaaccgatcgaataggtcatgcagtcgtcttcggcgacgccgttgtgcgcgcattgcggcggcagatacagcatgtcgccggggcccagtacccattcctgctcgaccttgaagtcctgcaaaatgcgcagcggcgcgccttcgatcagcgtgcggtcggcctgcgtggaaatctgccagcggcgatgccccagtccttgcagcaggaaaacatcgtaggggtcaaaatgcgggcctacgccaccgtctttgggtgcgtagctgaccatcaggtcgtccagacgcgcgtgcggaataaaatcgaagcgtttgagcagttcagccgcttccggcaggtgatggtttaagccttgcagcagcaccgtccagtgcgatttgccgaagtctttgaagtcttttgccgtaaagggcgattgcgccagttcaaactcgccgttgtactgggtgatcaggcgcgcttgcgcttcttctgtgcaggcaagtttgatcgcctgtttggggctgagcagtccggtgaattcaggaagggcgccgcgtatcagcagcggtttcttctgccagtagtcgcgcagaaattcgtctatggacaggccgcctagcaatgtggatatatttttcatgcgcgagattatagcctcgtcaggccccgcgttgttgtagttaaaaattagatctatgtgatacaccgtagatgattttaaaagacaagtaagatcaacgatgaaatgaagctcatttagctgcaccctttacccctgcgcaccgccgcagatagtcagtaaatgcggtgcagttgggcgaggactgtttgagtacgtggccgctagcggatcgtgcgagttccgcagccccgctatttactggctatcaagggtatgccgtctggctgggtgcaggcaagacggcacggtaaaccggggtcgccttttagtttcggcgacgcctcactgcaacttcgttgtctttggtattttccagcaaaagaaaacgcagtttgggcgcatcattaaaaataaataaggacgcagccaaagtaaccagctgccgggctgttaccggcaaaaataaaagctcattgtgtggacccgctgtaaatctcatagaagctaaaaatttattaggtgacaacagacaaagtgtttaaaatgtcgcgagattcaggattgaataaatacatattactttcacatacgccgtctatgcttgcactggcgaaattttaaaaaggaaatttaatgaagattgcaaaaaatacagtggtatcgttgcgttacgaattgcgcaatgccgaagtggcaggcgaagtgcttgaaacggttgaagatccgatcagctatctgcatggcggttacgacggtatttttccactggtagaggaagcgctgcatggcaagagcgtaggcgataaagtcagcgttaccctgcaaccggatgatgccttcggcgaatacgagcacgaactggtcgaagtcgaagcgcgcagctctttccctgaagatgtcgccgttggcatgcagttcgaaggcgcacctgaagaatctgacgatgaagacttcattttgtacaccgttgtggaagtgggcgacgacgaagtgaccgtggatggcaatcatccattggctggcaaaacggtcacctttgactgcacggttaccggcgtgcgcgccgcgaccgaagaagaactggaacacggtcatgtgcatgacgaagctggcggtcatttgcactaagcagataaccgttaagcattgaaaacgccccgcagtgcggggcgttttcatttgtgctcccgatacgccggaatggatggtcaaaaaaataggccctatatggaatgcagcggctagttcgaaaactacagcgggaataatacgatgaaatgagtgtgtttcttaacaccgatagcccctgtgcaccgccgaagatagccagcaaacagcggtgattttaggcgaggactgtttgagcacgtttgcagctgctcggaacgtgcgagttccgcagccccgttgtttgccgactatcaagggtacgttttcctgtttggttacaaataggaaaacgcggtaaaccggggtcgccttttagtttcggcgatgcctcactgcaacttcgttgtctttggtatttgcctgcaaatgaaaacgcagtttgggcgcatcattaaaaataaataaggacgcagccaaagtaaccagttgccggtctgccaccggcgatttttaaaataggatttatgttatctactcgaaattacatgcaaccaaaaaaatgacttatgtgaggtttgtcacagacagttgtgtgagctgcccctaatatgcgacccatcaaccacaaggagctcaaaatgaaatgtaactcaggcggcatggatcgtattcttcgggtaattgcaggtctggttctgattgcgctggctgcgacaggcatggtgggcgtatgggggtggatcggtgttgtgccgctgctgaccggaattgtcggtttttgtcctgcttacacgctgttgggcgtgaacacctgcggcatcaaaaaataatccatcagtcctcccagactttagcccggttaattgccgggctttttaaatcaaaggatcgtcatgaataaaaaaatttccctgttggcattgcttagtctcaccgtaggcagcgtctatgccgaagatctgactcaatatcaggacgagagccgtgccgtcgccatgccgtttttgaaacagctgggcgccgcgaatcaaaaagcggtcagcgaaggcggccctgatgcggccgttaaagtctgccgcgacatcgcgccgcaaatgaccggagaaatttcacgcaagaccggctggaaactgacgcgcgtcagccttaaagtgcgcaatcctatgttgggaactgcggatgcctgggagcaaaaggccttgcaggagttcgaggcgcgcgcagctaaaggcgaaaagcctgaaacgctggaattgtccgaagtggtgcaggaaccggctggcaagtctttccgctttatcaaggcgatcccgctgcaagcagggtgcgttgcctgtcacggtgcgacagaacagcttcccgatagcgtaaaggcgcgcttgaatgaagattatccgcacgacaaggcaaccggctacagcgtaggtcaagtccgtggcgctgtgagcatcaagcgtccgctttaagtcaggtttaagagcgcaaattctgaaaaatggagtttttcagatgatctgcctgatttgagtgtacgggcgtcaggaaaacggattgtcacttgaaaacggcccgcaagacgggccgtttttttacgggtgcgccatgatcgtctgacattttcgcgattttccccgcgacaaagcccggtgcggcttaccgctaccgtcaacatccgttaaaatatccgctatgaaaaaattgcctaaaaattccttccacctgttcttctcgctcgtcatgggcgcgatgatggtgtttctgatgaccgctgtgattacgctcgcgaatgttggcatgacggaggatttcttccgccactggttgcatgctttcctaatcgcctaccctgtcgcggtaccggtcatttatctgtttgcgccgattgcccgcaaaattaccgcgcggttcgtcgagcatccgtaacatatccgccgatatctttttcactgaaagcataaccaaatgagtcagattgagaaccactggggcgaggttgccaatatcgaaaccgccttgatgagaaagatgattgcgctggggctggactggcacgatgaagtcgctatgcggcagctggcggcggaatgcaaaacgttcggccccgcacaggtcgaggccgcctacgcatcgaatgaccagagccggatcacgaaggccgagcttttttcgctggcgtccgtgatgatacagacgatggagaatgccacgttcgagcggcgcgatgtacacggcggcgaggtatggaaggcgtttggcagacacctgtatcagtaaatgatttgagccttgtaacataaggctcgcagcgaaatagcaactttctcaataacgcacgatgccgctaacgtgtgacccatgccatccggcggttgccatcaaatgcctaggcgctcaatcagcaggccatccggttgcctgaccacccccacaagtgccgtattcaacttggccgcgccagcttgcaccgcttccagccctccgtcctatccaattttattgcctagccttaatggctaatacttccgtccggggttatccggtatattgaacgaaatttttgctgcgtcgttttgatcgcagcatctcaaccgtgtgatttaagtagatgatgctcagtggcggctatgtgccatctgttgactgtcgaggtatagaataggtagcagcaatgcggtcgctcgcaaccgacagtagtgtgcaatttgcgtatggccctcagtagcagacgatcacattattggctgtatagggaagcactaagtgtccgcgaggagttgtgtacgccccatatctaaagcaaagagccgcatatagcggctctttcatttggtgcatctttcagcttgttagcgttcagcttgttagcgttcagagcgcaaatcccaatctactggtacggcgcatcctagtttgaaaatgtcatgtggtcaaggaaatcgtactagaatcacccactcacgctggggagaaaacatgttacgcaaaatgcactatcgattggcactcgacttggggtcaacttcgctcggttgggcgatgattcggctcaatgcaggcaacgagccttgtgcggtaattaaggcgggtgtgcgcatattctcgaatggccgaaatcccaaagatggcagttcgctagcagtgacgcgacgcgaagcgcgcgccatgcgccgacgacgtgatcgcctgcttaaacgcaaagcgcgcatgatacagacactcatcgaatatggattcttccccgccaaagaagatcagcgtaaagcgctggaaatcatgaacccttttgctttacgtgcaaaaggactgaatgaagcccttacccctgccgaatttgcccgcgcgctgttccacatcaaccagcggcgcggcttcaagagtaatcgcaaaacggataaaaaagacaatgacagcggcgcactaaaaactgccatcaacaagttgcgcgaaacgctaaagacggaaaattgccggacagtgggtgaatggctgaacaaacgcgatgtggcaggacttaccgttcgcgcccgctaccatcaggacaaaaccatcaaggaagatggaaaatcaaagatcaacaagtattacgacttgtatatcgaccgcgccatgatcgaacatgagttcgatgagttatggaaaaaacaggctgaactaaacccaaccctattcaccgaggctgcacgagccgacctgaaagatgtactgctgcatcaacgcgcactcaaacctgtcaaaccgggtcgctgcacatttatgcctgatgaagaacgcgcgccattggccttgcccagcacacaacgttttcgcatgtaccaggaagtcaataatctgcgcatcttgcgcgatggattaaaagaagaatcgctgacattgaatcagcgcgacgatctcattgccgcattggaagagaacaacaagcgcacttttacgcaaatcaaaaaattgcttggactgggcggggtggtcaagtttaactttgaagacccaaaacgcgaggaactcaaaggtaataccaccagcgccatcttgggtaaagatgaacatttcggttcggtgtggtttaaattcgatgaagcgaagcaagatgccatcgtcatgcaattgttcaaagaagaaaatgaagccaagctcttgcgctggctgcaaaatgaaacaggcattgatgagaagcgagccgagaccatcgccaatgttggattaccagaaggctacggcagtctatgtgctttggcactggcgcgcattctgccggaactgcgccgtgatgttgtaccgtattctgatgctgcaaaagctgctggttttcaccatagcgacacaagcaataaccaagaagtgccgggccttacttttccaatcgaactagtcgttaccgaaactggagaaatcaaaaccaaacatatatttcacgaacttccttactatggcgaatatctacaacgacatgttggctttggtagcggcaagcccgaagactccgctgaaaaacgttacggaaaaattgccaaccccaccgtgcatatcgggttgaaccaagttcgccttgtggtgaatactctcatcaagcgttacggacatcccagcgaagtaattgttgaagtggcacgcgatttaaagcaaagcaaagacttgcgcgatgaagagggcaagcgtcaagccgaaaatcaaaaacgcaacaagcgaattcgcacagccattgcaggtgttttgcagacaagtgaagagcgggtcaggcgcgatgacattgaaaaaatgattctatgggaagaactcagctttgatcccgctgatcgccgctgcccttattccggagtacaaatcagcgcagccatgttgctaagcgacgaagtagaaatcgaacacatcctgcccttctcacaaacactggacgacagcctcaacaacaaaacggtagcgctccgtcaggccaaccgcgtcaaaggcaaccgcactccttgggaagcatttggtgcgcaaagcacggctggctttgactacgcgaccatccttgccagagcggaacatatgcccaaaggaaaacgctaccgttttgccgaagacggctaccaacgctggctcaaagacgatgctggatttttaccgcgtgcgctgaacgacacccgccacatgagcaaggtggcgcgtgaatacatgagcctgatttgtcccaacacccgcgtcatccccggtcgcatgactgccatgctgcgcggcaaattcggcctgaatgatgtgcttggcctgaacggagaaaagaaccgcaacgaccaccgccaccacgcggtggatgcctgtgtgattgccgtgacagaccaaggcttgctacagcgcttcgccaaagccagcgccagcgcgcgcgaacagcaactcaaccgccttgtggaaaacatgccgttaccgtgggaaagttatcgggagcatgtggaacgcgccattgatgctatttgggtgagccacaagcctgatcatagccacgaaggcgcaatgcacaacgacaccgcttacggcttgctcggtgatggcaaagtcagcatccacaaaatggtagaggggaaacgtgagcgcattgaggaaagcctcaaggtcatcgcattcactaacgcaaaagccaatgatcgacacggcttactagacaacggtgagccaaggccatacaaaggctacaaaggtgacagcaactactgcatcgaaattattcgtaatgaaaaaggcaaatgggaaggcgaagttatctccacgtttgatgcttatcagctagtccgagaacacggagtagcacggctacggcatccgactttgagtgttagcgggaagccattggtgatgcggttgatgaaggatgaaaccattcgcatggtgacaaatgaaaagccaatcaccgcaagagtttgttgggtcaggtcagacacccgcatagcctttgcgagtacgagcgaagccaatgtagatgcgagagatcgggataagaatgactcattcagctatatcgtaaaaacggcaagcgttttgcaaaaattacaagcgcgccgtataagtatttcgccgactggcgaactccgcgacccaggtttcaaggagtaagagccatgataggccgcatcgtcgaagtggcagatgacaggcggcacttgttcctctctcgcggctttatggtggtgcaagataccgaaggtgagcgcaaagagctggggcaagtaccgttagatgatgtcgcggctgtcatcgccaatgcacatggcctgagctataccaacaacctattagtggcactggccgaacgttgcgccccctttgtgctgtgcgctgctaatcacaacgcagtgggtatggtgttaccgatagatggcaactatcaacaagcaaagcgtttcgatgcgcaaatcgccgccagtcaaccgctaataaaacggctatgggcagacattgttaaatcaaaactccagcaacaagccgccgcactcgaagccactggcgcaccatttattcctctgtcagctttagtccgcaaagtgcgttcaggcgacccggataattttgaagcgcaaggagcgcggcgttactggggacttttgtttggtgatgactttcggcgcgaccaacaaggtgacgggctcaatgcaatgctcaactatggctatacagctctacgtgccgccaccgcacgtgcagttgttgcggcaggtctgcatccaaccatcgggttacaccatcgcaatgcagggaatgccatgcgcttagtggatgacttgatggaaccctttcgccccatgattgatctgaaagtctggcagctacataagcaaggcgaagggctgattacgccggaaagcaaacgcgcattggtgagaaccctatacgacgatatgcaaaccagtgcaggtgcgactccagtgatggtttgcgcgcaaaaattagccacctcattagcgcaaatatttatgggagaaaaagataaactcgacctgcctttgccgggcttgccgctcagccttgctgcatcatttcaagacgactaacgtgacatgctttccgggtatcgccttatgtggattgtggtgatgttcgacttacccgtcgttgaaaaagttgagcgcaaagccgccacggattttcgcaatgccttgctcgacatgggatttgagatgtctcaattttccgtttacatgcgtttttgcagcagccaaggtcaagtagacacctattgcacacaagtagaaaagagtttgcctaaaggcggcaaagtcaatatccttcaattcaccgacaagcagtatgagcgcatcatcacttttcgcggtaaagccaaacagccgagaaataaattacctgaccagtacgatcttttttgatgaaacacatatttttcgatgtccaaaaacgcaacaaccacccagtaaatcaggtggttgcagcactggtattgtagcagattgggatttgcgctctgaccggaactttgctggccttgctgttgagcctgcgcaaattgtagcagattgggatttgcgctctgaccggaacttgtcccatgccatcacggacagttgcaacattgtagcagattgggatttgcgctctgaccggaacttcagactgattcctgtcaacaacgcacaaattgtagcagattgggatttgcgctctgaccggaacagccgcacacgtcgtgaacgtagcagcgcgattgtagcagattgggatttgcgctctgaccggaacccttgctcgccagttgcagatgctgcgcctattgtagcagattgggatttgcgctctgaccggaacacgggtgaaagttcggtgcgaatcgatttgattgtagcagattgggatttgcgctctgaccggaacaagtgttggtcgctcgtctttcatgtgcatattgtagcagattgggatttgcgctctgaccggaacttggttgaacccatcgaccccgtggcagtcattgtagcagattgggatttgcgctctgaccggaactcggtcattaccgatactaccgcaaacaggattgtagcagattgggatttgcgctctgaccggaacgtgatgcgaccgttggtgcggctaaagtcaattgtagcagattgggatttgcgctctgaccggaacccgagatccagtcatagaacactctaatctattgtagcagattgggatttgcgctctgaccggaaccttgatatgcttgggcgagtcaatgacctgattgtagcagattgggatttgcgctctgaccggaactatattcatcagggatctcattgcgctgtaattgtagcagattgggatttgcgctctgaccggaaccactccttgacgtaatcgctcagggccttaattgtagcagattgggatttgcgctctgaccggaacatcagtgcatcagcttcggctttagccttgattgtagcagattgggatttgcgctctgaccggaacaatacgctgttgaattgcgcgttaaacatcattgtagcagattgggatttgcgctctgaccggagctaaggtgcgtgaatatctgcaaggtgtctgttggaaaaatcaatcccaccaaattgcttgccggatagcggacgctccccaaggttggctctgtctcgttagctgactttcacagtgctagcttcactgactgatttggccgagttgccgctatcggtggttcctttcttgtctcgccaagaaaggaaccgaaagaaggcgacccggtttgccgcgcctgcggcgtgccttagatagtcacaaacaaacggggctgcgcaactcgacctcgctaccgctcgggactcggtcagtgctcgccttaaagcaccgtttgtttgtaactatcttcagcggcgcacacgggaatagggattgccgggtgaggggtatacccctcaccgttctgttttacgagagtgcttttttgatgcgtttgagtgcttcgacgaggttgtccatcgaggtggcgaacgacaggcggatatagccttcgctgccgaaggctgaacccggcacgaccgcaacgccggcttccaccagcaggtattccgataaggcgatgtcggtttgcgcggtgatgatccctttgttgaacaggttggcgattgcgaccctcgcgtcggggaacgcataaaatgcgccgcccgccatcaggcaactcacgcccgggatcgtgttcaattcgttcacgacgaatacatggcgttcgcggaaggctttgatcatcggtgcgaggcagttctggtcgccgttcaaggcggcttcggctgccacttgcgagatcgacgtcgggttggaggtgctttgcgactgcacgttttccatcgcggtgatgatggcttctgagcctgccgcgtagccgatgcgccagccggtcatcgcataggctttggagacgccgttgagcaccatggtgcgcgaatacagatcaggacaggcatcgagaatgttgacgaatttttcatcggtcagcgcgatgtgttcgtacatgtcgtcggtggcaatcaaaatgttcggatgttgtcttagcacttcgcccagcgccttgaggtcgtccagcgtatacaccgcgcctgaaggattgcttgggctgttgatcaccagcatgcgggttttcggcgtgatggcggcttcgagttgtgccggcgtcagtttgaaaccctgtgtgatatcggtgtgaacgatgacgggtttgccttcggcgatgatgatgatgtcaggatacgacacccagtacggcgcgggaataatcacctcgtcgcccggatcgatcacggcgagtgccagattgaagaagctttgtttgccgccgcaggaaaccagaatctgcttggccgtgtaatcgaggttgttgtcgcgttttaacttggcgatgatggcagtcttcagcgacggcgtgccgcccacggcggtgtacttggtaaatcctgcattgatcgccttgatggcggcatccttgatgtgttgcggcgtgtcgaaatcaggctcgcccgttcccagtgcgatgatgtcacggccttctgcctttagttttgcggcgcgggcggtaacggcaagagtaggggagggtttgatggcctggacgcgtttcgagagggacacggtatttttccttggagtatggacagtgggcggaattatacacctgagaagcggggtgcggattgccgtacaatgccgctcatggatactcaacaccctttcagtttactcactcccgatctcgtgctcgatgcgctggacagcgcggggctggccggtgacggtcgcctgctggcgctcaatagttacgagaatcgcgtctatcaggcaggcatggaggacgggccgccgctgatcgtcaaattttatcgccccgcccgctggaccgatgacgcgatactggaagagcaggaatttgtcgcaacgctcgctgcgcgtgaaattccggtggtgccggccaatctcatcaacggcacgaccttgcatgaattcaacggtttcaggttttcagttttcaacaggcacggcggacgggcgccggagcttgaccgcccggatacgctcgaatggatgggacgttttctcggccgcattcatgcggtaggcgcgctagaaacttatgttcatcgcccgacgctggatattgacagcttcggcatcgaacctgttgcgtacctgatggcgaacgactttatttcgcctgccttgcgcgaggtgtatcgcggagtggccgctcacgcgctggacggggtcaagcgctgttttgatcgcgcgggagaggttaaatcgctcaggctgcacggcgactgtcatgtcggcaacgtgttgtggaccgatgacgggccgcacttcgtcgattttgacgacagccgcacggggcctgccattcaggatttgtggatgctgttgtcgggcgaccgcgcagagcagacgcggcaattcggcgatttgctggcaggctatgaggacttttatgatttcaacccgcgcgagatgcatctgatcgaggcgctgcgcaccttgcggctgattcattatgctgcgtggatcgcgcgtcgctgggacgatgcggcttttccggctgcattcccgtggttcaacacggaacgctactggcaggatcgtatcctggaattgcgcgaacaaatcgcgctgatggatgaagcgccgctgcattgctaaggctgctttgccgatttataaatactataacgattagaaagaatatatgtctgaggaaaccatcatcgcggcaacacaggactggctggaaaaggccgtcatcggtttgaatctgtgcccgtttgccaaggccgtgcatgtcaagaaacagatacgctatgtggtgagcagcgccacaaccgaggatgcgctgttcgaggaactgatcgccgagttgcgtcatctgcaggctgcggatcctgatgagatcgacactacgttgctgatacacccgtatgtgctgaccgattttttagactataacgattttctcgacgcggtcgacatcgccaccgcagagcctgaatttaacgacgcgtttcaggtcgccagtttgcatccgcaataccagttttcgggcaccgaacttgatgacatcgaaaattacagcaaccgcgcgccttatccgaccttacatctgctgcgtgaagccagtgtagaccgggctgtggatgccttccccgatgccgaccgtattccggatgccaacatcgagatgctcaagaagctcggacatgcaggctgggagaagctgggactgatcaaatagacctgacggcattacgccttgttggcgacgatctgctgaaataattccagtcggcgcgcgttgatgtcgccctttgcgaccgcctccagcagcgcgcagccgggttcgtgcagatgatggcagtcgcggaagcggcactggcctaagtatttgtcgaattcgatgaaaccctgttcgatttcgccaacactcaaatgatgcaaaccgaaagcctgtacgccggggcagtcgatcaggctgctctcttcatcgagtttgtagagcttggcgtgggtcgtggtgtgtttccccgaatcgagcacggtagaaatttcgcgggtagccgcttgcgcatcgggcagcagcgcgttgatcagggtggatttccccatgccggactggccgaccagcacgctggtgtggccttgcagcaaagggcgcagcgtcgttacatcctgcagggcggagagttccagcacgtggtagccgatggcgcgatagggtgccagttgctgtcgggctgccgcggcgggcgcgggtaagtcgcatttattcaatacgatcagcaccgatagattctggtcgaatgccgcgatcaggcagcgggtgacgacttcatcgctgaaggacggttctgcggccaccacgatgatgatctggctgacgttggccgcgatcagttttgagcgataggcatccgagcggtgcagcaaagagctgcgcggtgcggtacgttcgatcacgccctgattgtcgccgcttcgtttaatgtccaccttgtcgccgcagaccacatcgctcttcttgccgcgcgttaaacaaggcagcagactgccgtcggccaatctcaccagatactggcgaccgaaggcggcgacgatgcgcccgttaaggaggccctccatttatttgaggttgtaataacggttgagataggcgcctaaatgctgctcctcctgcgcgctgagattagcgcccacattaccgctacattgtttgatctgggcgatcaactgagcagggttatgtaccttgcggttggcgcgggtgaacatcgcgtttccatcgccccccaacatatctttatggcaactgttgcactggtacttgtcgaacaaggccttgccggcagacgcttgcccatccgggaaaggtgcggcctgcaggcctgttgtacccagcagcaatagtagtgcggtgatccgtttcatgatgtctctttcagagtgattgcaggtgcctgatgcgaattgcagcaggcgggtgcgagtcatagaattttgaatacaaggggtccggggtcagcgtcgcggcattgtcctgatacagcttgaccaaagcgctgaccagatcggcggcacgggtttgtttggctgcataggcgtcggcttcaaactcgtgtttgcgcgaataggctgacatgacagggctgatgaaaaagccgaataccggcatcaccataaaaaacagcagcagggccagcgcggtgtgcgcctgtcccgaacttagggcaggatcaacgcccagtccctgataaaaccatgtggtgttcatcagcagactcagcagccataaaaaccccagactcatcgcgaaagtcgagacgatgcgttttacgacgtgacggtgtttaaaatgccccagttcgtgcgccagcaccgcttctacctcgtctacgctcagccgctcgatcagcgtgtcaaaaaacacgatgcgtttagattttccgaaaccggtgaagtaggcgttgccgtgcgcgctgcgacggctgccgtccatcacgaacaggccgctgctggtaaagccgcagcgggataacaaggcttcgatgcgcgttttcatcgcctcatcctgcaaggggctgaacttattgaacagcggagcgatgaaggtcgggtagaggaacaggatcagcagattaaagcctacccagacgctccagacgtacagccaccagttggcgcccatctgctccatcagccacaagacgccgaacaacagcggcagccctaaaatggccccgatcagcaggccttttgcggtgtcgagcaggtacagtctgaacgtcatcttgttgaagccgaagcgcgcttcaatgcggaaggtgcgatacagattaaaaggcatttcaagcaaggacgagagcagcaggactgcgacgatgatcgccatgccttgcgcaatcggctggctgaataggctttggcactgtacggaaatccactggatgccgccgcctgcggtgaaggcgagcagcagcagggcgtcgaactgaattcccagcgtcgaaaagcgagtcttggcagtcgtatagtcggcggctttctggtggtcggagagctgaatttgtccgctgaaagcgtccggtacggctgtgcggtgagcggcgatatgggccagatgacggtgcgccagccaaagttttagcagggtagacagggcgaggacttcgataaaaaggtaggtgaattgtgtggctgacataaaggttatacgttttggtagtatgggtaatcgcggttgtgacacaatacgcgtccgaccattctatacaagcgcacgaattatggcacaaaatcaaaactaccttgtctggatagacatggaaatgaccggcttaagcccggataccgatcgcattatcgaagtcgcgatcgtcgtgacagacaataatctggaaaccattgccgaagcgccggtgctggtcgtgcatcagcccgacagcatcatggacgccatggacgcatggaataaatctacgcacggcaaatcaggcctgatcgaacgggttaaggcatcgaccctggatgaagcggcggtgtcggcgcaaatggtcgcatttctcaaggaatatgtgcctatccgcacgtcccctatgtgcggcaattcgatctgtcaggacaggcgtttcatggcgcgctggatgcccgaattcgaggactacttccattaccgcaatctggatgtcagcaccctcaaggaattggcccgccgctggaagcccgatatggcaaaaggcgtcaaaaagcatggcaaacacgaagccctcgctgacatctacgagtcgattgaagagctcaaacattatcgagagcatttcatcaaactttgattgcttcccgtcgccggcttttttgaggttattttagatgagtttaaaattgagctggcgggaattgggtgtgcagaaaaaactgcacatcctgatacaaggttcgctgatcatcttattcgttatctcgatgaactgggtaatagagcgtttcgagaagcagattatcagtcatgccgagcagcgtgcggatgaaacggcggacgggctgattaacggcatgaatttgctgatgctgaccggcgcgatatcgaacccgctcaatcgccagttgctgctggaaaagacgcgacgttccgagggggtgcgagagttgcgcatcgtacggggcgattctgttgtttctcagttcgggccggggctgccggaggagcgcgcgcaggacgagatggatcgaacagcactggccaccggaaaatcggcattccggcgtatagacgaaccgggcaaaccgccgatgctgcgggtagtcgtgcccttcatcgcgcaaaaggattttcgcggaacgaactgtatatcctgtcacaatgcggccgagggcagtgtcaacggactggccagcgtcaatatcgatttgagtcaggacatggctaatctggctgacattaagcgcagtttgtggatcggtcacatattgattcagctgtttctttcatggctgatctggctgtttgtgcgcaatctgattgagcggaatatcgcggatcctgtcaaaaaattgaagctgaccatggcggaaatacagcacaacaacgatctgtccaagcgggcggatgtcgatgagcgaaatccggatatcggcgatatggcccgttcatttaattccttgctgggtacgctagaacaggccaacgagcggctggaactgtttgccaagatgtttgaaaacagcagcgaagcgatcatcatcaccgatgcggataagcgtattctgacggtgaatcctgcgttcgaactaatcactcagtaccgcagtgcagaggtcatcggatccgatcctaaaattctgagctcgggtaagcagactgccgaatattatcaggccatgtggttgataatagaaagcgctggcaagtggtcaggtgaaatctggaatcgccgcaaaaatggtgaggtgtatccgcagtggctgtccatcggtgcggttaaaaatcacaacgggaaagtgattaattatatttcgctgttctcggatatcactcagcgcaaagaggatgaacatagaatcgagatgcttgcgcatt

SEQ ID NO: 1828 - DNA, 23102 bp, synthetic construct
  misc_feature 1..23102: note = Synthetic
  source 1..23102: mol_type = other DNA
attttcgtgaccacgtaatcaatcgatggctcaaatgaagcaggcgtttgaccgcctgtgatgtcattttgcaactcatccaacgtgtaaccaatcgccaattttgcagcaatttttgcgatcgggaagcccgttgctttcgatgccaatgcagacgaacgcgacacacgcggattcatttcaatcacaatcatgcgacccgtatcagggttgaccgagaattgcacattcgagccacccgtgtccacaccgatctcacgcaacaccgccaatgacgcattgcgcatgatttggtattctttatcggtcaatgtttgtgcaggcgcaaccgtgatcgagtcacccgtgtgcacgcccattgggtctacgttctcaatcgagcacacgatgatgcagttgtccgccttatcgcgcaccacttccatctcgtattctttccagccaagcaacgactcttcaatcaacaactcattggtgggcgacaaatcaatgccgcgcttgcaaatcgtttcaaactcttctttgttgtacgcaatgccaccacccgtaccacccatcgtgaacgatggacggatcacaatcggatagcccgaattgtcattggttttggcgatcatcgcgtgcaccgtttgcgcctcttcccacgtgtgggcgatgcctgacaacgctgaaccgaggccaattttggtcatcgcatctttaaacttcatgcggtcttcggccttgtcaatcgcttcaggcgatgcgccgatgagctgcacattgtgtttatccaaaacaccgtggcgatgcaaatccaaagcgcaattcaatgccgtctgcccacccatcgtcggcaaaatcgcatcaggcttttctttctcaatgattttctcaaccacttcccaggtgatcggctcgatgtacgtcgcatccgccatctctgggtcggtcatgatcgtcgcagggttcgagttgaccaaaatcacgcgatagccttcttctttcaaggctttgcaggcttgtgcacctgaataatcaaactcgcacgcctgaccaatgatgatcggacctgcgccgatgataagaatactttttagatcttcacgttttggcatttctttactccaacaatttcaataatttaattcgatttgtagggtgtaataagcgtttatttcgcatgacacccagactttatttcatacttaactcatacatgcggcgcaatgcactgtgtttattgcgccctacttgctcataaataacaacgttgaaacattactatgtactctgttcatgtctgcgtttacatactacaagagcaactcgtttagccagcatgataaggccaaccacaaaagccacatacacacccaacggcatcaacaacataaaagcggaaaaaagaagcaatccataataaacgtctgcataagcacgggcaaaaggaaaatcaacgacacaaccacttacagccatgctgccctcattccaacccgaacaattgaccatcgccagtatgggcaaaacaaaaccacaaaacgatataattaacatgctcactggaatcaaccaacattttccttgtttttccatcgttattacctttatgtcagtgctattgcttatccacgctcaaactggatttttaccaaggaacacccaacccaccatccacgtagacctcaagacatcaaaaaccacatgaccatgccgaacttggttcgatatctaccagcactagggattttgcgggtcagcccgcaatgacgtgcaaatcacaacgtcgccatacccaacttcaccccaaacccaataaacaaacagccaaccaaaagcgttccgacgaccatccaaatcggacgcgaacgaaacgtttgtgcaagttgtgcgcctgcaaaaatcagaccgctcaagtacgctaagctaacaaattgcaaaattaagcccagcaccaaaaatgcgacatacgggtgcgcggcatcagcggagacgaattgcaaaaaaaacgacagcacaaacaatatcgcttttggattgatcaaactaatcaacaaggcacgtttgaatgggcttgagcttttttccagctgcgccatttcagacgcgttggtatggggcttgctgcgattctgccaaatgcgccacgcgccaatgagcatgttgatgcccaagtaactcaaatacaacgcgcctgcaattttaagtgcgatgaacacttgcggggcttcgcgcaaaatcgtggcggcaccgatgacggcagcgaccatgatgatggtgtcgccaacaaacacgcctgctgcccccgcataaccgcgccgcacgccttgctgcgcggcggtggtcaaaacgtacatggaattcgggccaggcaataaaataatcgccacagtaccgataaggtatgcggtgatgttggtgatgcccagctgagtgaaaaactccatgtgtttagtgctttacgttgatctgtcattgccaaatgatgacgatggctgtggtttgataaataatccgccgtgccgcgctaacacggcatcttctcgaacaggagattgcggatcaagtccgcaatgacgcattcagttgtttactaattatttgctttgcgccatcaaatcaatgaatcgatcgaacaaatacgcaatgtcatgcgggccgggtgacgcttctggatggccttgaaaactaaacgcaggtttatccgtgaatgccaaaccttgcaagctgccgtcaaacaaagacacatgggttgggcgcacatttgcaggtaaagtcacttcatcagcggcgaaaccgtggttttgtgatgtgatgaccacacgccccgtgtccaaatctttcacaggatggttcgcgccgtggtgaccaaacttcattttcaaagtcttcgcaccagcggccaaagccatgatttgatggcccaagcaaatgccaaaaacgggtacatttttatccaaaaattcacgcgtggcagcaatcgcgtaatcgcacggttctggatcaccagggccatttgacaagaaaacaccatcaggattcatcgccagtacatcggcagccgatgtttgagctggcacaacggtgatgtcgcaaccacgttcagccaacatgcgcagaatattgcgtttcacaccaaaatcataagcaaccactttaaattttggattactttgctgaaggtaaccttcacccaaacgccattcggcttcagtccacgggtatgctgcagtgaccgatacgaccttggccaaatcttggccgctcatgccgccaaaaccagccgccaattcggttgctttcgccacatcatcgccgaccaaaatgcaaccgccctgcgcacctttttcacgcaatacgcgggttaaagcacgggtatcgatgcctgcgatggcaacaatgttgttggctttcagataatcaggcaaactttgcgtcgcacggaaattcgacacaacaggcgatacatctttgatgatcaagcctgctgcatacactttatccgcttcaacgtcttcttcattgacaccgacattgccgatgtgcgggtaggtcaaggtgaccatttgccccgtatacgatggatcggtgaggatttcttggtaaccagtcatggcggtgttgaacaccacctcggcgaccacgtggccaggtgcgccaatgccgtaaccttgaaacaccgagccgtcggccaacaccagcacggcttttggatattgattagaaaaaatgggtaacacgttcaaactccttaacatcttggacacacaactccacatgagacaaaatggcagacataaaaaaaaccgccccacatcaataaaaaactttactgtgttgggcggtttttgcctgttttcgtctttagtagccagtgtgtcatcttaatttcgtcgtttctgtaaaatatattgctaaacccagtcattttagcagaaaaaccaccttacttaaagactaagacgaaaattgacgcaaaaattacgctacaattaaaatgcgagacgtcatattcttttcaattggagcacacacatgagcacattagaccaacttaaagccttaaccacagtcgttgccgacactggtgattttcaagcgattgcgcaatttttaccacaagatgccaccaccaacccatctttaattttaaaagcggtacaaaaaccagaatatcaacccctgtttgaatcaaccgtcaaagcccatgtcaacgagtcagtcgccgacatcatggatcatgtgttggtggcttttggctgcgagattctcaaaatcatccctggtcgcgtatcatctgaagtggatgcacgtttatccttcgacaccgaagcttctatcgctcgtggtcgccgcgtgattgctttgtatgaagcccaagggtttagccgcgaacgcattttaatcaaagtggcatcgacatgggaaggcattcaagccgccaaagtcttggaaacagaaggcattcacaccaatttgacattgatgttcaacctcgcacaagcggttgcttgcgccgacgcccacatcacattgatttcgccatttgtggggcgcatttacgactggttcaaaaaacaaacggggattgactatgacatgagcaacgatcctggcgtctcttctgtgaccaccatttacaattattacaaaaaatttggtatcaaaacccaagtcatgggcgcaagcttccgcaacgtcggccaaatcattggcttggctggatgcgatttactgaccatcagccctgatttattggccaacatgcaagccagcaatgatgatgttaagcctgccttgaccgaagccgccgcactcgcacaggacattcaacctttgacactgactgaagccaagttccgtttattgctgaacaacgatgccatggcgtgtgaaaaactcgcagaaggcattcgtgcattctgcgtagacacagaaaaattagtgacattaatcgaacaagctcgtaaataaatttttttcaaaaaattatttaaaaaaaagccaacccaatgttggcttttttaaagccaaaaaacaaacacaaaggcatatttaaataaatcacaagcattggttttgctgtttttaaaacaagcacttatgttgcacttcacacccaacttacacagttgatgacgtaacttaacgcataaaaagcaagcaaaaacttaacgaaaaatgacaaatttccaacggcagagtatgcgtttttttgttatgatgcaccccatcacactttcatcattgactcgccttgctgcgttatggtttttaaaaattatttgcaaatattatttaaaaatcaaatagttaatacacaagcattgcatacagggaaccatgtggaactcatggactgtggcgcaactgtaagggatcgctgttcttttgagcatcgaggattgacctctcgattagactcgatcagttcccccaagtcagatacctatcaatgatcatcgtgtgcaggccttcgtaccaaaggcatgcacatcctgtcgttttttcgcgcaagccattgcgtgcgaagcgtctctatttgtgcccccttttggtaaagataaatcattcaccatcgttactttaggggcgcggacatgtctaattacaccattgagcaaccatcgtttttcagcgacacttttgatccatcgctggagcccattttggcgcacaatccgcaacgattcgttttactccccatccaacatcccgatctttggcagcagtacaagcaacacaaagccagcttttggacagcccaagaaatcgatctggaatccgatttggccgactggtggtcgttgtcttctggtgagcgtcattttgtcagccatgtgttggcatttttcgccgcttcggacggcattgtcaatgaaaacttggctgtgaacttcatgaaagaggttcaaattcctgaagcccgttgtttttacggcttccaagtggctatggaaaacatccactcagaaacttattcattgttaatcgacacttatatccaaaaacaagacgaaaaagaccatttattcaacgccattgacaccattcctgcggtcaaagaaaaagccaactgggctttgcgttggattgatcaaggtaattttgccgaacgtctggttgcctttgcagcggttgaagggattttcttcagcggcagcttctgtgcattgttctggttaaaaaaacgcggcttgatgcccggtttaacattcagcaatgagctgatcagccgcgatgaaggcttgcattgccaatttgcctgctccctctatcacatgctcaagcaacgcttatcgagtgacaccattcatgccatcatacgcgatgcggtgcgcattgagaaaaacttcatttgcgaagctttgcctgtgagtttgattggcatgaatgccgaattaatgagccaatacattgagtttgtggccgatcactggctggatgcgctcggctacagcaaactatacaacaccaaaaacccatttgatttcatggacatgatctcacttgaaggcaaaaccaacttctttgaaaagcgcgttggcgattaccaaaaagctggcgttttgggcacaaaaagcgaacaagtgttttcactcgaagaggatttctaagcgttagtttcagctgttcacttaagttgtttctaataccacccagaccgtcgattgcctctcttgcgcgtgactcaatcgacatgagctgtcgcttcacacaatccaccttccttcaggccaaatgcatcccattggcctgttggttttcaacattggtagcatacacacccattcactctgtacacacaacagagcgcagtacacaattaacaaagtaaaaaaaggatcaaacaatgctcgttctcaagcgcaacggtaaatctgaagccgtcaaattcgacaaaatcacagcccgcatcgaaaagctgtcttacagcctgaatccattggttgaacccgttgaggtcgcgaaaaaagtcatcatgggtttgtacgatggtgtatccaccacagaactggacaacttggccgcagaaacagcagccagcatggccacacaacacccagactttgcgattttggccgcacgcttggcgatcagccgtttgcacaaaaacacgaccaaatcgttctctgaaacgatgcaaaagctgtatgaccacattgatttaaacacaaaaaaacactcaccgatcatcactgaagacgtgctgaacgtggtcaaagcacatgcagatctgctcgactcgaccatcatttacgaccgtgatttcaactcagactattttggtttcaaaactttggaacacagctatttgttgcgcatcaatggcgaaatcatcgaacgcccgcaacacatgtacatgcgcgtcgccctcggcatccacggtgatgatattcaatctgcaattgaaacctacacattgatgtcagagggctggttcacccacgccacgcccaccctgttcaactcaggcacaccgcaccctcagatgagcagctgcttcctgctcaccatgcaagacgactcggtcgaaggcatttacaacacgctcaaacaaaccgcattgatttctaaaaatgcaggaggcattggcttatccatccataaagttcgcgccaaaggcagcaccattgcaggcacacacggcacgagcaacggcatcgtacccatgttgaaagtattcaacgacaccgcacgctacatcgatcaaggcggtggtaaacgcaaaggcgcattcgccatgtacctcgaaccttggcatgccgatatctttgaatttctacaattgagaaaaaaccacggtgcagaagaaatgcgcgcccgtgatttgttctatgcaatgtgggtcaatgatttgttcatggcacgcgttcaagccgatggcgaatggagcttattctgcccgcacgaatgcccaggtttggacgattgctggggtgaagcctttgaaacactgtacacgcgctacgaagccgaaggcaaagcacgtcgtgtcatcaaagcgcaagaactctggtttgccatcttagaatcacaaatcgaaacaggcacaccttatttactttataaagaccacgccaaccgcaaaagcaatcaacaacaccttggcacgatcaaatcaagcaacctgtgcacggaaatcatccaatacacatcgccggaagaaatcgccgtgtgtaacctcgcatcaattgccttaccaaaatttgttgaagacaacgcattcaatcatcaaaaattgtatgacgtgacctatcacgccaccaaaaacctcaacaaaatcatcgacaaaaacctctatcctgtcgaagaagcacgcacatcaaacatgcgtcaccgcccgattggcttaggcgtccaaggtctggccgatgcattcatcatgctgcgcatgccgtttgactctgaagcagcgcaaacattgaatcaacgcatttttgaaacgatgtactacgctgccatgagtgcatccattgatttggcgaaagaactcggcccatacgaaagctacccaggctcacccctgtccaatggcattttgcaatgcgacatgtggggacacacaccatcaaatacatgggactgggcacaactgcgtcaagatttagcccagcacggtgcgcgcaactcactcctgctcgccccaatgcccactgcctcaacctcgcagattttaggcaacaacgaatgcttcgagccctacaccagcaacatctacacccgtcgcgtcctcagcggtgaattcatcgtcgtgaataaacacctgttgatcgacctggtcaaacgcggcctgtggaacgacgccatgcgcaacgacctcatccgcgccaacggctcggttcaaaacatcgatcgcattccagaagacctgaaagcactgtacaaaaccgtctgggaaatcaagcaaaaagtcctcatcgacatggctgcagatcgtggcgccttcatttgccaatcgcaatcgatgaacctcttcatggcgcaacccaccatcgccaaactctcttcaatgcacttctatacgtggcaaaaaggcctgaaaacaggcatctactacctgcgcaccaaagcaggcagccaagccgtacaattcaccgtcagtgccgccgaaaaaacgccagtggccaaagacgtggttgaagaagaaatgatggaaggtgccgtgtgcacaatggaagaaggttgtatcagctgtgggtcgtgatgttgtgatcaacaaccttaaataacctgatgtcattgcgggcttgacccgcaatctcccacctcaggagaggccatgtcgagcatggtatgacggaacatttacacgttttatcataagaaccgcgataaaaacacagaaaagacaaaagccacgcatgcgtggcttttcatttggtgcatctttcagcttgttagcctccagtacacataccccaatctgttagtaactacagaatacacgaagaaagttagttatgtcaattctgtagtaattaacttattcggatatgtgtactggttggaacttaagtcatcacttctaatacaattaacttttataaaattgttaaaggcaataacttaaataaatttcattaagtcatcgaatagtgctataaaattacaacttgactttatacgaaattaaacgtattatagatgtgaatctgaataaaagcaaccccctgccgtgcgccaacacaaacagagggtcaggtttacaagcatccctatcaatgagataacttattaacttttggcgttagccaaaagcaatgaattatctcacaaattaacttatttttggagataacaccatgatacctaacaaagtcaccttgaccctcacatatgaacgaccttatattattggtcaatacctgcaaagtcgtaacattccagtcgattcaaataccatcaagaaaacaaacgaggcgatagaatattttttagctcaaaccccaattgataaagatgcactacatatttttttagaccgctgcttattataatttcagggagtaaactaatgtttaaactgtcttatcgtctcgcattagacctcggcaccacgtccatcggctgggcgattctacgcctgaataacgagacaccgccgcgcccctccgccattatcaaagcaggcgtgcggatttttaataacggccgcgatgccaaaaccgaagcgtcgcttgcggtaaatcgccgtgaggcacgcggcatgcgtcgccgccgcgaccgtttgctcaaacgcaaagcgcggatgatgaaaaccttgattgagtatggttttttccccaaagatgccgccgagcgcaaagccttggaaaatctcaatccatacgaactacgcgccaaaggtttggacgatgccctgacgcctgccgagtttgcgcgtgctttgtttcacatcaatcaacgccgtggttttaaaagcaatcgcaaaaccgataaagccgacaatgacagcggcgcactcaaaaccgccattagtgcactgcgccaaacattgctacaaaccaattgccgtacagtgggcgagtttttgcacaaacgatttacagatgaaaccttaacacccgaagagcgcacggtacgtgcacgttttcgccaaaaaccgattgaaatcgacggtaaaaaacggattgataaaagttacgatttatacattgaccgccaaatgattgaagatgagtttgatgcgctgtgggcgaagcaagcgcaattgaactctgcccaattcaccgaatcagcccgtactgatttaaaagatgtgttgttgtttcaacgtaatctaaaacccgtgattccagggcgttgtactttattgcccgatgaagaacgtgcgccattggctttgccaagtgtacaacgggcgcggatgtatcaagaagtgaatcatttgcggattttggctgaaggcttgaaagagcaggttttaactgtggcgcaacgcgactcattgattgtggctttagaagccaacagcaaacgcagttttacccaaatcaagaaattactcggtttgggtggcgcggtgcagtttaactttgaggatgtaaaacgccaagactttaaaggcaacaccaccagtgcgattttgagcaatgacaagtactttggcaaggcatggctcaacctcaccgaaagtttccaagacgaaatcgttatgcagttggtcaaagaagaaaacgaagccaaactggtgcgttggttgattaaacacacaggcgtggatgaagcaactgccgagcgtattgccaatgtaggtttgcccgaaggttatggcagtttgagtgcagcggcgattgtgcgattattacccgaattgcgtaaagatgtggtgacctacgacaaagccgtgaaagccgctgggtttgaccaccacagtcatttaaacccttctaaagtgacgggtgagattttgcccgagttgccttattatggcgagccgttgcaacgttttgtcggttttggtaccaataacccagcggatgtacctgaaaaacgctatggcaaaatcgccaatccgaccgtgcacattggcttgaatcaaatccgcacggtggtgaatgcgctgattaaaaaatatggacacccatctgaaatcattgttgaggttgcgcgtgatttgaaacaaagcaaaatccaacgcgaggaagaacaaaaacgtcaagcagcaaaccaaaagcgcaacgagcgcattcgccgcgacattgccaatgctaaattcggtggcaatgaagagcgcgtgaagcacgccgacattcaaaaatggattttatgggaagagttgagttttgatgtggtggatagacgttgcccctacacaggtgtacaaatcagtgccgaaatggtgttgtcggatagcagcggcgtggaaatcgagcacattttgccgtatgcgcgaactttggacgatagtttgaacaataagaccatgtctatgcgtgttgctaaccgtattaagggcaatcaaacgccgtgggaagcctttggtgttaagcaagttgctgattttaaatacgaagaaattttacaacgcgccgagcggatgcccaaaggcaaacgctaccgttttgcgcccgatggctacgagaaatggctcaaagacgacaaagattttttggcacgcgctttgaacgacacgcgttatttgtcgcgcattgcgaaagaatacttggcattagtctgtccccaaaacacccgtgtcattccagggcaaatgacggcaaagttacgcgctcaatttggcttgaataaagttttgggattagatggcttaaaaaaccgcaacgaccaccgccaccacgccgtcgatgcctgcgtgattggcgtgaccgaccaaggtctactgcaacgattcgccaacgccagccaatccgccaatgctttgcagttagatagactagttgaaaaaatgcccgacccttggccgacttatcgcgagcatgtcaaacgtgcggttgcgcatatttacgtcagccaccgccccgaccacagttacgaggggcaaatgcacgaagacaccgcatggggcttgcgccccgatggtgtgaccacgcgacgcgtgcgtaatgatgaaacgggacgacgcgagcgtgaatacaaaaaccgcagcgtgattccgttcaacagcacacgagaccctaaccgccacggtttggatgaaagtggtcaagtcaaatcctataaaggctatgtgggcggcagtaatttttgtatggatattgtctgcaatgacaaaggcaaatgggagggcgagattgtatctacttatcaagcctatcaaatcgtgcgagaatatggacgtgacaaaggtttggcaatgttgcgctcacgcagcaccagcatttcgggcaagccattagtgatgcgtttacaaaatggtgatattgtcaaaatgatggtgggcgagcgcttgtgtttgatgcgcgtggttaaaatgggggcgaatggtcaaatgttttttgccgaacataatgaagccaatgtaaatgagcgaaactcaaataaaggagagttattttcatacatttcaaaatatgctggctctttacaaaacaccaaagcccgccgcgtcaccatctcccccatcggagagataactgaccaaggttttaaggagtaagccatgataggccgcattgtagaaatcgccgacgataagcgtcatctgtttttacatcgcggctttatggtggtgcaggcatctgacggcgagcgcaaggagttggggcaagtaccaattgacgatattgctgccgtcatcgccaatgcgcacggcatcagttataccaacagcctgctcgtcgcgctcgccgagcgcggtacgccgtttgtgatgtgcggcgcgaatcataatgcggcaggcatgctcatcaccgtggacggcaattacaaccaagccaaacggtttgacgcgcaaatcgctgcgaccaaaccgacgcataaacgcctgtgggcagaaatcgtcaaaagcaaactacaacaacaagccgccgtgcttgaagccgtcgggcaaaacgccacaccactcaacgcactcgcacaaaaagtcaaatcaggcgaccccgacaaccttgaagcccaaggtgcacgcaaatactggacaatgttgtttggcaatgattttcgccgcgaccaaaacagcggcgacatgaacgccctgctcaactacggctacaccgtggtgcgtgcctgcactgctcgcgcggtgattgccgctggactgcatcccaccatcagcctgtttcacagcaatgccaacaacgccatgcgcttggtcgatgacctcatggaaccgtttcgccccatgattgacctcaaagtttggcaattggtgcaacacggtgaaaccgatgtcacccccagtagcaaacgcgccttggtacacgttttgtatgacgacatgcaaaccaacgtcggcgcaacccccgtgatggcgtgtattcaaaaactcgccacctctttggcacaagtgtatttgggcgagcgcgacaaactcgacttaccattacaaggcttgccattggatttggcgagcagttttttggatgaatagcatggaggcattatgttatcaggatacagactcatgtggttagtcgtcatgtttgacctccccgtcatcgaacgcgccgagcgcaaagcagccacggcttttcgcaatgacctactcgatatgggttttgaaatgagccagttttcggtgtatgtacgattttgcagcggccctgctcaggttgaaaattattgcaaccgcatcgaaaaattcttgcccgaaggtggtaaagtcagtatattgcaatttaccgacaaacaatacgagcgcattatttcctacaaaggcgcagccaaacaagccgcgcaaaaaccacctgaccaatatgatttattctaaaaccaccaccatttttttgaaactgaaatgccaaaaagcccttgaaattcaagggcttttgactggtctattataaccgattgggatatgggtactggctggaacttgaaggcaaactttaataccatcaattgaattataaccgattgggatatgggtactggctggaactagataacgaggcctgtagcgacgagggccattataaccgattgggatatgggtactggctggaactcggtatactggggaagaacgtggaggtatattataaccgattgggatatgggtactggctggaactgcgctgacaatgtggacaagacagttaaaattataaccgattgggatatgggtactggctggaactgcgcagcggagctttaccacccgctgactattataaccgattgggatatgggtactggctggaactaagttgctaaacatgtcaccgttggttttattataaccgattgggatatgggtactggctggaacgtgcggtcatgcgttgtgtgttttggtttgattataaccgattgggatatgggtactggctggaacattgtttttggtgtccttgtgccggtaataattataaccgattgggatatgggtactggctggaacaaattcagcctctcggtcaaacagcattccattataaccgattgggatatgggtactggctggaaccgtatcaagcgcaagacgggcaggtcatcaattataaccgattgggatatgggtactggctggaactcatgcaccggcgcggctgcacccacagtcattataaccgattgggatatgggtactggctggaactggaggtgccgatacccaaaaaattgatctattataaccgattgggatatgggtactggctggaaccatgacgccttattcaaggactgagttttaattataaccgattgggatatgggtactggctggaacttcgccgacagttggaggattccatgttttattataaccgattgggatatgggtactggctggaacaaaagcaacgggcaggcggtgctgcagtctattataaccgattgggatatgggtactggctggaactttaattagcttaacaacagcagctagtttattataaccgattgggatatgggtactggctggaacatttagaggcgcatcatcgcggcgacttgcattataaccgattgggatatgggtactggctggaaccctggcgtgcgggcgcagtgatcacgccaaattataaccgattgggatatgggtactggctggaacttaaacgaacaaattaaccaccaccaatcaattataaccgattgggatatgggtactggctggaactgaccgacgaagcgcagcgcaatggtgctgattataaccgattgggatatgggtactggctggaacatgattggccaaaccgacaaactgaatcgcattataaccgattgggatatgggtactggctggaacatgattggcgcacagttgaaaatgattacaattataaccgattgggatatgggtactggctggaacaatcggcagcggagtgcgtaccgttgaggcattataaccgattgggatatgggtactggctggaaccaagcgcgatgcgggcattctcaatgccatattataaccgattgggatatgggtactggctggaacaaaaacagtcatatatttatcagccactgtattataaccgattgggatatgggtactggctggaactaaatcgactgtacatctagataataatggattataaccgattgggatatgggtactggctggaactcgttctatgggggcgcgtgaagattactgattataaccgattgggatatgggtactggctggaacaccgaaggcttcccagttgttacagagcaaattataaccgattgggatatgggtactggctggaactgtcggagtgatacccatttcaatgagtatattataaccgattgggatatgggtactggctggaacaagtaattgccattgccatcaaccccgccaattataaccgattgggatatgggtactggctggaacttattgggctatctgctgtaggcttatcgtattataaccgattgggatatgggtactggctggaacttaaacgctcaattttcgacgagagcgcatattataaccgattgggatatgggtactggctggaaccagagctggttgagcgatacacccagcaatattataaccgattgggatatgggtactggctggaactcggcaggtgagtcggaacttttcggcaatattataaccgattgggatatgggtactggctggaacggtaccgtgccgcgtggcttgataaacctcattataaccgattgggatatgggtactggctggaactgagtttggcgattgccgcacgggcgaaaaattataaccgattgggatatgggtactggctggaacgtacgaccctcattgattttgcacaacggtattataaccgattgggatatgggtactggctggaaccatccggttcagttcgggcacgtctttgatattataaccgattgggatatgggtactggctggaactgtggttttgatgctggcatgcccgcacagattataaccgattgggatatgggtactggctggaacccatgttcgcgcaagccattgcagccagcgcattataaccgattgggatatgggtactggctggaacttttaagcgttaaagtgagttgtttgttttattataaccgattgggatatgggtactggctggaactgcgtgcttgcttttcttgatctattttggattataaccgattgggatatgggtactggctggaacagcaatcacaaattaataaaaaaagcgagaccaagtctcgctttttcaacaaaatgatttgaggcatcaccacattacttgtagtttgcaacgccttcgttgatttctttgtgcgcttcatccacatcgccccagccttggattttcacccatttgcctttttcgagtgctttgtattgctcaaagaaatgttggacattgtctttgatgtattgtggaacgtcagcaatcgctttgatgtcggcggtcattgggcatactttgtcaacaggtacaacgatgagcttggcgtcttggcctttttcatcgtccattttcaagatgcctacagcgcggcagcgcaccactgcgcccgccatgattggaaatggtgcgaggacgagtgcgtcaactgggtcgccgtcgcctgccaatgtttgtggaatgtagccatagctcaaagggtagcgcatgccggtgccgatgaagcggtcaacccacaatgtttgtgtgtctttgtccacttcgtatttcactggatcgctttgtgctggaatttcaatgatgacgttaaagtcgtttggaatgtctttacctgctggaatcgcttcgtaacccatggtgtatccttttgttcaatggaatgtgatttgtccgatgtggcgtgcatagccgcccatagcttgcgcattatataataaatcgaaaaaatgaacccttacttttatggatgatgtgctgcgaaatgtggcttggatctgcatgcttgaaccatttggtcttcggtgaatttgaattaaaaagcgtgtgctttagaccttttaagaagtggaggggttaatgcgatgatcattttatattttgcaagccattactctaacgcatatgtctgacactgggctgaataatttaaatgcacattgcgtcctttttcacgttcttttttgtatttcttttctctgtttttttgacgtacaggcggcgtgatttttatgagaaaatgaccacaaagtttcattcttaatgtttttatatggacatgcaatggcacacatccaaacgttattaaatcactcagttgggtttgatttccctctcattcaagcgccaatggcgggttcacaagatcatcgattggcggctgcggtggctcaggcaggcggtttgggttcaataccatctgcgatgttgacgcccgatgccctcgcgctgcaactgtccaattatcgcgccatgactgatcgtcctgtcaatgtgaacttctttacgcacacatcaccgttacccgatgaggcggtagaaaagacgtggcaaaccatgttgtccccctattacgatgagttcggcattgacagtacaaaaacaatggcagcagcaagtcgattgccctttgatcatgccatggcggatgtgttggatgcattcaagcccgaagtggtcagctttcattttggcttgcctgcacctgacttgcttgcgcgcgtgaaatcatgtggtgctttggtcatgtcgtcggcgacaaccattgaagaggcacgttggctggagcgcaatggcgcagacatcgtgatcgcacagggtttagaagcaggtggacatcgtggacattttttaagcaacgatgtgttggatgtcagcgcacagatgggtacatttgcctttttaccgcaaatcatgcgtgcggtgaatgtgcctgtggtggctgcgggaggcatcgctgatgcagcgggtgttcgcgctgcaatgggtttaggagccgcaggtgtgcaaattggaacatcgtttctgttgtgtcacgagtctaatgccagtccaatgcatcgagcggcattaggcagtgaaatggccgtacacacatgtttgaccaatttattcacaggacgcccagcgcgcagcatcgtcaatcgcatcatgcgtgaaatgggggcaattaatcgccacgcaccttcatttccgttggccacggctgcgatcatgccgttgcggacagcggctgaagcacaaggctcaatggatttttcaccgctgtgggcggggcaaaacacatcgggttgtcaggccatcagtgccactgagctgacgcttaagttggcaaaagggtttagctgagagcagcagaagatgttttagcagaaacgtgtcatttattgccatgcatctcactcaatctcatctcactcactgaatcacatctcatcagagctcatgatttttattcagcggagttccaagagcacatcatccaaggtacaatgtgggtcactctttagatacctttattatgaaacaatacctcgatctcatgcgccatgttcacgaacagggtgcagacaaaatggaccgcacaggcacgggcacacgctcggtcttcggccaccaaatgcgttttgatttgacccaaggctttccgttattaacaacgaaaagggttcaccttaaatccatcatttatgaattgttgtggttcatccaaggcaacaccaacgcaaattggctcaaagagcgcggcgtgaccatttggaacgaatgggcgcgtgaagatggctcgctcggcccggtctatggtcaccaatggcgctcatggcctgatggtcagggcggccacattgaccaactcgctgaggtcatcgagcaactcaaaaccacacctgactcgcgtcgcatcatcgtcagcgcatggaatgtcgccgacatcccgcgcatggctttgccaccatgccatgctttttttcaattttatgtcgccaatggcgaattgtcgtgtcagttgtatcagcgcagcgcagatattttcctcggtgtgccgttcaatattgcctcctacgccctgctcacgcacatgattgcgcagcaaacaggcttggttgcgaaagagttcatttggacaggcggcgactgtcatttgtataacaatcattttgaacaagtgaacacgcaactcgcgcgcgaaccgttgcctttacctcaattgaacatcaagcgcacacccgcatcgatttttgattatgaatttgatgattttgaatttttaaattatcaatatcatgcacccattaaagcacctgtggcggtttaaattgagttgaaccaacgatcgtcaaaacacagaccaaaaaataatgacgacgtctgatttagggagcgacaaagacgtcaccgtctttgcagcaaaaatacaatgacaatgcaatattgattttaaaaatgaccaaaacactttcacgccttcaagccaacttacttctccttctcgcagcatgtgcatggggttgcgcttttgtcccacaatccattgccaccaaattcattggcccctttagcttcactggggtgcgttttttattgggtgcattggtgatttcacctttggtatggcgcgaatggaaaatgctggtggccgcccaacgcacgccgtcaaaacgtgactggttacaaattgccctgatgggggttttgttgtgcatgggtaccagcttacaacaggttggcatggcgttcacaaccgtgaccaatgcaggttttttaacaggactgtacgtcccacttgtcccgttactcggctggattttgtacaagcgccgtgcgcattgggtggtttggcctgcggccgcgggttgcttgatcggcacttggttgctcacaggcgcaggtgcagtggatttgaacatcggtgatttgtgggtgctggccacagtcattccattcaccttgcatgtgttgtgggttggtggtgttgccgacaaattgcatgcacctttgctggtctcatggggtcaattcattgtttgcggcttgctggcaagttgctttgctttgcctttagaaaattttgacagcgcacatttggccgacgtgttttggccgattgcttacatgagcgtgatttctgtgggggtcggcttcacttcgcaagtggttggtcagcgttttgcacgccctgctgaagcggccatcattttgtctgcggaaaccgttttcgccgctttggctggcgcacttgttttggatgaacgtttgaacacgatgggctatctgggctgtgctttgattttagcgggcatcatcattgtacaaatcgtcccatcgccatcgcagctgattgaacaacattaatttttaaaaacataaacgtagattaaccatgaccacaccccgcatcaccctcattgctgccgttgcacagaaccgtgctttgggtaaaaacaaccaactgttgtggcatttgcccaatgaccttcagttttttaaacgcaccacactgaatcaccccatcatcatggggcgaaaaacgtatgattcaattggtcgcgcgttacccaaacgtttgaacattgtgatttctcgtcaaacggatctcaccattgcgggctgcaccgttgtccccacgttggaaaaggccattcaactggccagcgaacccgcacatcaaccagaaaaaaccacacccgaggtgttcattattggtggtgcacaaatctatgccgccgctttgcccctggcaagccgcttggtattgaccgaagtcaaacgtgattttgaagcagatgtttttttccccgagtggaacaaagccgagtggcttgagatcgcacgtgaaaccaaccatgatgcggtgacaggcttgggttatgattttgtggattaccagttaaaagcacatgaattaaatgacaaaaagtgagttccaaaaaacaacttgaaaaaattgagcacttaatgcccaagaacaaatttattttaaacaccgtcaaatacaacataaaaaatagtgagcgacccgaagaatccagcgcaagcgcaaacaccgcatttaaaatgtgaatttaaatacgagaaacataaagccttttttggagattattcaatgaattcaccctcattgaagacagacagcgtgaggttggcgcagcccacagcaaatgccacaaaccaataaggatacgcgaggcaaaggttgattgactcaatcctaaaatcggattatgccgtaaccccgtatgagatgatcatgcgcagatcaaacgcctgttctccgaaatgcctttaacggaggcaatccatcgccaagcttcactgggcaatgctgaaacaatgcatgagaacgccaactttttcatgtatgtttcagcaaggcctagcaccaaagttaagcttaaccccactaattaccattacgtgacatcacctgccgcttcttcgatcaatgctgccacctcatcggctttcgaggccagcgatgcatggcccgatgccaacgtaatgatcttgcgtggattgatgcgtgcagacattttcttttggttttctgggttgatcatgcggtcttcgctggaaatctgataccaactcggtttatttttccatgcgggtgcggtgacgttgtcaccgaaggtcgaggccaatggtgctttctgtgtgaccgccatgatcagcccctcatccgcggtcaggtcttggcagaagctttcatgaaacttgtcttgttggatccagaggtaaccgtcgctgtcaggaacgacattggcgatggcggcgggtggattgctttgcgtgatgctgccagggctctcacctgcatcaggtacgaaagcagcaatgtaaaccagcccaaccacattgggcatgttaccggcttcggtgatcacggcgccaccgtatgaatgaccaaccagcagcacaggcccagattgttgcgccaccattttgcgcgttctttcagcgtcatcagccaacgaggtcaacggcaattccaccgcattcaacttggcaaaccccttgcgcgaaagcgcgaggatgactttgctccaatgcgccgccccgccccaaaaaccgtgtacgaggatgattgtgggtttttcactcatgattcaa

SEQ ID NO: 1829 - DNA, 23090 bp, synthetic construct
  source 1..23090: mol_type = other DNA
  misc_feature 1..23090: note = Synthetic
cagcaagcgctgataccagcggctgctggcggacacgtcatggacgcagatcagcggggcgagttgcatggcggctctccaggaacgccgtgaaatgctagcgccaaggtggggtcgattgccagaaaatactggatatccatacagtcttgtgatctcattcaagctccggattcttcccccgacctgcctgtttcctggccatgttgtccgcttctctcgcctcctgtgtcccttgcgctgccttgcggcccccgctcgtccccctgccgctggacgacgcccggctgcaggggtggctgtggcgcggcagcagcctgagcaccgccgccgatccgacgctggccagcggttttgcggcgctggacgccgaactgcccggcggcggctggccgctgcgggcagtcaccgagttgctgacatcgcagcccggcgtgctggagtggcggctgctggcgccggctctgcgcggctggtgggcggcccaggccctgccggcggccgctcccggccgtcgcggacgcgtggtcacgtcggcgctgcgttcgctgctgctcatcaacccgccccacacgccccatctgccgggcctgcaggccctgggcctgccaccctcggcactgatctgggtggaggccagcacgccggctcaagcgctctgggccgccgagcaggccatcaagtcgcgcgtggccgtgctggcctggctgcccgaggcgcggccggagcagatccggcgcctgcaggtcaatgcgctgagttccgatgcgccggccttcctgatgcggccggagcgcgtgcagcagcagtcctcggccgcgccgctgcgcctgatcgtgcagccgggcgagggctgggacctggccgtgcacctgctcaagcgccgcgggcccgcgcacgagggctggcttgaactgcccgccgtgcccggcgcggtggaaccgctgctgactgccgccaagcgcaagcccctgcctgcccccatgccggagcccgcgccggctccggccagccctccgatggagcgccctcatgcgctggctcgccctgtgctgcaggcctgatgcccaaggcaacgccgggccgccccaagttgccttgaccccctcggggggcgggcagggcgcagccctgccctgggggtcaacaggtcatattggcgatgttgacgccctcggctggctggcgctgagcttcacgccgcgcgttgcgcggctggaggaagcggtggtggccgaggtgtcggccagcctgcggctgttccgcggcgcacgggcgttgcggcagcggctgcagacgcaggcaacacaagccggcttggccctgggcgacatggcctgggcgccgacagcgctgggcgccttggcactggcgcgttgcagcgacatcaatcctggccgcctgagcgagcgcctggacgcgctgccgttatcggcactgagcgccgcccaagcccatcacgccatgctggcccgcctgggctgcacgcgcctgggcgagctgcgccggctgcctcgcccggcactggccaagcgctttggcccggcgctgctgacggcgctggaccaggcctatggcgacctgcccgagatacacagctggctgaccctgcccgatcgcttcgacgcccggctggagctgccctaccgcgtcgagcacgcgcccgtgctgctgcactttgctgaaaccctgctgcgccagctctgcgccttcctcgccgcccgccatgccggtgtgcgtgcgctgcgactggcctggcagcacgacgcgatgcgcccccgcgacgtggccgacagcggcgagctgaccgtggccacggcggacacgacgcgcgatctgaggcggcttacaaggctgctgtccgaacacctgggccgcatgacactggccgcgccagccggcgaaatccgcctcagcgccgataccgtgctgccgctggaggaaggcagcagcagcctgttgcccggccccgccgatccgcaggagcgcacgacgacgaatgcgctgctggagcggttgtcggtgcgcctgggcgccgaccatgtgcgcgaaggccggctgcgcgaagaccatcggctggccgaaatgcagcgctggcagccttggccagcaccgcctgccgtagctgtgcgctctccaccagggccgcagccgacctggctcgtcgagccaccacagccactgcgctgcgatgcgcaggaacagccgctgtacgccgggccgctggcgcgagtcagcggcccgcaccgcatcgaggccgggtggtgggagggccgcggcggcctgcagacgcgcgactacttcgtctaccgcagcgccgcgcgcgggttgctgtgggtctatcacgagcgcctgccggacgcggcaacggccacatcgggatggttcctgcatggggtcttcgcatgacgccgccgatgtcggaccgcgacgagcggctggcgatgctgcgcgagcagggaatcgcctcggaagccgacctgcgccgcgccgccgatgggtggcaacgggcccagcccggctcgcgcaccgacgtgccgcggtatgccgagctgcactgcctgtcggccttcagcttcctgcgtggcgcgtccgagccggccgaactggtggagcgtgcctgcgacctgggctacgaagcgctggccatcaccgacgaatgctcgctggcgggcgtcgtgcgcgcgcacaagcaattgcgggagatgcgcgaggcagcgcaccacgccctgaaagaggttgcacgcgaggcgggccagaccgaagacgacattgcgcaaccgcagctgatgcagttgctgatcggcagcgagttccttgtgcgcgacgacaccggcacgccgcgcttcaagctcgtgctgctggcgcagaacctcaacggctacggcaatctcagccagttcatcacccggctgcggcgtgccagcccggtcaaaggcgagtacacgctgcactggcgccagatctcacccgagaaactgtccgactgcttggccctgctcgtgctgccgcgcgaggccccagatgccgagctggcgccggcggcgcattgggtgctgcgccatttcgccggccgcgcctggatcgccgtcgagctgctgcgcgaggccagcgatgcgctgtggctgcagcggctgcaggcgctgtccgaggagacggcgctgccgctggttgccgccggtgacgtgcacttccacgtgcgctcgcgcaaggcgctgcaggacgtgatgacggccacgtgcctgggccgcacggtggccgagtgcggtttcgacctgcagcccaacgccgagcgccatctgcgcagccgctaccggatctcgcagatctatccgcaagcgttgatgcgagagacgacgcaggtggcggctcgctgcacgttcagcctcaacgagatcagctaccgctaccccagcgaggttgtgcctgccggtcgcacgccgcgccagcacctgcgcgacctgacctatgccggtgcctacaagcgctggccagaagccaagggcggtgtgcccgacaaattcaagcgccgcatcgaggacgaactggaactgatcgaggagctggcgtacgaacactacttcctgaccgttgccgatgtggtcgacttcgcgcgcagcatcggcatcctctgccagggtcgcggctcagccgccaacagcgtcgtctgctactgcctgcacgtcacatcggtggaccccgaccgcagcacgctgctgttcgagcgcttcatcagccgcgagcgcaacgaaccgcccgacatcgacgtcgacttcgagcatgagcgccgcgaggaggtcatccagcacctctacaagaaatacggccgcgaccgtgccgcgctgacggccgtcgtcatctgctaccggcccaagagcgcgatccgggatgtcggcaaggcgctgggcttcagcgaggcgcagctcgaagtgatgagcaatgaccacagcggctggtccacccaggtgctgcccgaagaacatcggatcgagctgctgcagcagcttggcttgccggacgacgatccgcggcttcagcaactcatcaccctgggccgccagctcaacgggctgccccgccacctctcccagcacgtgggcggcttcgtgctgacgcaaggctcgctcgagcgcctcgtgcccatcgagaacgcgacgatgaaggaccgcagcgtcatcgagtgggacaaggacgacatcgacgagctgaagatgatgaaggtcgacgtgctggccttgggcatgctcagcgccatccggcgttgcttcgatctcgtcaacccgatgcgcggcacggccatcgacctgaccatccccgacaacgacaccgccacctacgacatgatctgcaaggccgacaccatcggtgtgttccagatcgaatcgcgagcccagatgtcgatgctgccgcggctgaagccgcgcgactactacgacctggtcgtggaagtcgccatcgtccgccccgggccgatcgagggcggcatggtgcacccctatctgaagaaccgcgcattgccggcagaccaggtggagtaccccagcgaggcgctgaaggaagccctgtggcgcacccggggcgtgcccatcttccaggagcaggtcatgcaggtggccatgatcgccgcgggcttcagcgccggggaggctgaccagctgcgccgtgccatggccgcgtggaagcgccccggcgtgctggagaagtactacgacaaggtcgtcaagggcatgcgagaacgaggttatgaggacgcgtttgccgagcgcatcttcagccagatcaagggcttctcctcctacggcttccccgagtcccatgccgccagcttcgcgctgctgacctatgtcagctcctggctcaaatgccacgagcccgcggccttcctgtgcgcgctgctgaactcgcaaccgctgggcttctacacgcccagccagctcattcaggacgcgcgccggcacgaggtcgaggtgcgcgccatcgacgtgaaccacagcaacaaggacagcacgctggagccccgaccgggcgagcaccaacccgccgtgcggctgggcctgcgcctcgtcggcggcctgggcgacgaggcggccgagcgcatcgagcaggctcgcgctcgcgacggcgaattcgcccacccgcaggacctggccttccgagcccgcctgacgcagcaagacatgcaacagctcgccgccgccgatgcactgacgtcgctggccggccatcgccgccagcaggtctggcaggcctcggccctgcatgccatgccggagctgctgcagggcagcctgctgcccgaggatgatctcgaactacccgccgccgccgagggcgaggaggtgctgtgggactacgccgccacgggcctgacgctacgccgccacccgctggccctgctgcgcccacgcctgtccaagcaagggctgctcagcgcccagcagctcgacgccgtcaagagcggccgccgcgccaaggcctgcggcatcgtcaccgggcggcagaagccgcagacggccaagggcaccctgttcgtcacgctggaggacgagaccggcaacgtgcaggtcatcgtctggcccaaggtctatgaagagcaccgcaacaccatcctcggcgcacggctgctggccgtggaaggcgtctggcagcgcggcgacggcgatgtgcgccacctgctggcgcagggcttcaccaacctcaacccgctgctgggccggttgccgacggagagtcgggacttcaagtgagctaaacccggcaagtcccgcttccgaacaccgggccgcacatgggcccaccatgaccgccacttcgggccgctgccaagtgcgcactggatgcagcagccagtaatgagcggaggagcgaagccctgcgccccaatgactccaatcggtcagaaatttcaatccactcccataagacgggtgcacagccagtatctcattcgcgacatacccttacggaaatctgctctaattattctgaaaaatcagtccccaatccggagggccagcgatgaagaccccgcaaaaccgtcgcatcctgttggtggatgacatgcctgcaatccacgaggattttcgaaagatcctcatgccgcaagcgccggaacacgcgcaactcagcgccgtggaagcagctttgtttggcgaagaggacagcgcgctcccccaaatcgcctttgaactcgattctgcctatcaggggcaggaggggctttcaagattagaggccgccctccacgaaaacaggccctatgccatggccttcgtggatatgcgcatgccgcccggctgggatggtgtgcaaaccattgaacatctatggcagcgcgacccacgtttgcaggtcgttatttgcacggcatatgccgacggttcgtgggccgatatcttggcgcgcctggacgtgtccgaccgtctgctgatcctcaaaaaaccctttgattccatcgaggtcttccaactggccacggcgctcaccaccaaatggcaaatgatgcaggatgcggcggcgcaccgcacccttttggaagacgcggtacgggaacgcaccagtgaactgctcaccgtcaacgaagttttacagaacgagataagggagcgcaagcatctggaagggcaattgatccaatcagaaaagctggcctccatcggtcagcttgcggcaggtgtcgcgcatgagataaacaatccgatcggctatatcttctccaaccatggcaccttggatggatatatcggaaaactattcgagctgattgccgcctatgaacacgcagaaaccagcatcacggcacccgaggtgattgcaaatctgcgcgcactgcgtgaacgtgtggagctggatttcttgaaagaagacattccagtgctcatacgagaatccaagcaaggcattgtgcgggtgcgccagatcgtccaggatctgaaggacttttcccgcattgattcgtcgcaagactgggaatcagccgatctgcaccagggcatcgattcgacgctgaatatcgtcgccagcgaaatcaagtacaaggccgatctggtcaaggaatatggcgccattcccaatattgaatgcctgccttcacagatcaatcaggtggtgatgaaccttgtggtcaatgcgactcacgccattggtgaaaaacgtggccgcatcgccattcgaacgggagccgaaggggcgcacgtgtggatggaggtggccgacacgggcactggcataccacccgacacgctcaagcatattttcgagcccttcttcaccaccaagcccgttggcaaaggcacggggctcgggctatcggtgtcctacggcatcgtgcagaaacaccacggccgcatcgacgtggaaagtgtcgtgggtcaaggcaccacgtttcgcgtcacgctgcccgtgcgacagacaaaaacgcaagccgaagtgccagtgtccgatatctgaagccacttcatgcaaggcaacccatcatgaaaacatggcctgccccaaacaagggccgtattctcgtcgtggacagcaatcccgacactcacggcgcctttcgcaacatgttggtcgaagatgcccatgcgcaagggaaattcgaactggactgcgcccgcgacacccccgacagccttgcccttatgcagcagtccctgctggcctcacaaccttataccttggtattcataggcgcctctcaaacgaaggcatggacagcggtcgaaatagccccccaaatttgggcaattgatcccagagttcagatcgtgctttgcgcggagcggctcgcttcttcctctgactcgttattcgaagccatgggagcaacgaatagcaggtggctgacgcttcaaatgcctcttgaccgcgtcgaagtcatccagctgtcacattccctgacagagaagtggcatttgcaacagtttgccgaggcgcatcaaggcgtgaactcgtcggcagagacgacagcggcagagagcccagtggatgcgtcccagatcaatgagcaagatttgctgcgcacactcctggacaactcacccgatcatatttatttcaaagatatgcagtcccgttttctcaaatgcagcaaagcccaggcgttgcaattcggggccgcgtcgccggcggcattggtaggcaagacagatttcgattttttttccgaagagcatgcgcgccccgcctatgaggatgaacaggaaatactgcgcacaggccaaccgatgattggcaaagcggagaaggaaacctggaaggatggccgcgccgagtcctggacgctgagtaccaaaatgccgctgcgcaacagtgcaggagtcatcatcggcaccttcggcatctccaaggacattactgcgctgaagcagtcggaagcagcgctggcatatcaccacgatttgctgagcacgctgatggagaattcgcctgattccatcttcttcaaggatttgaaatcacgcttcgtcaaaataagccgttcagagctgcataacctgctgcgactatcgatcagccgctaccgcgcagtacatcccggcacggatgaagacgcactcccgccgcatttggccaacgtggatgagtttgaaaaatatgtgatcggcaaaaccgatgcagacctttacggccaggacagggcgagtgaattcagccatgatgaagaagaaatcctccggaccggaaaacccatcgtcgaaaagagcgagaaaaccgtccatcccgatgggcgcgttgtttggtatctcaccaccaaaagcccctggagagaccggcatggtcaactgatcgggaccttcggaacgtcaaaaaacatatccgaactgaaggaagccgagcgaaaaattgaagaggtgcaggcccaactgctgactgcggcacgcctcgccggcatggcagagatcgcaaccaacgttttgcacaacgtgggcaacgttctcaacagcgtcaacgtatcggccgacttgattggcgcccagttgcgggcatccaagctcaagggactcgcccgctccgtggctttgatggatgcgcataccgaggatttggggcagttcctgacgcaggacagcaaaggcaagctgctgcccacctatttgcgtgaactggctcgaacactcgagggtgagcacgaagccataacgactgaactgggcgcgctgtgcggcagcgtggaacatatcaaacaggtcatcgcaacccagcagtcatatgcaggcacgccgcgtgttgtcgaatccgccaaggtggacgaactgctggacgacgcgctgcgcatgcacacggttgcgctgacgcgtcacaaagtggatgttgtaaaaaactacccgaccttgcccgctctcttactggatcggcatcgcgtgttgcaggtactggtgaacttgatcagcaacgccaaacaagcgttgagcgcgaccgcggacaaacgcgccttcattacgctcggtgctgttttgatggaagggcctgtgctgcgcatcacggtgacggacaacggcgaaggcatcgcgccggagaatctgacccgcgttttctctcatggtttcaccacgcgcaagaacgggcatggctttggtttgcacagctgcgttctggccgcacaggagatgggcggcagcttgagcgtccatagcgatggccctgggcaaggtgcgtcgttcatcctggaggttcccgtgaacgtgccggcgggatccgcgcgctgaatgtttgaggcggcggggtatccaccacgccgtcgagcctcgggggcgctgtcgcagcgccgcgaccacagttgctccgcacaaggacgaaggccgcgcgtcttgcgacttcgcggccttccatttggtgcatctttcagcttgttagcgtccagagcgcatttcccagcgatctaacgtgtgcatgctaacgccgtggctaccgccctccctgcggagcaaccctgatacgaccggagacgcgatcaacgtccaatccaccggcggcatcaatacaagaactccagggaggagtgcccatgaaatatcggctggctttggacctcggctcgacttcactcggctgggccatcgtgcaactcaacgccaaggatgagccttgcgccatcgtgcgcgccggcgtacgcatcttcccggacgggcgcaatccgaaagacggctcctcgctggcggtcacgcgccgcaacgctcgcgccatgcgccgacgccgcgacaggttgctcaagcgcaaggcgcgcatgcagcggcttctgatcgagcacgacttattccctgctgacgaggcggcccgcaaggcgctggagacgctcaatccctacgagctgcgcgccaagggtttggacgcggcactgacgccggccgagttcgcccgcgcgctcttccatctcaaccagcgccgcggcttcaagagcaaccgccgcacagacaggaaggacaacgacagcggtgctctgaaggcagccatcggcggcttgcgcgcacagcttgatacggcaggcgccgatggcagggcgcggacggtgggcgaattgctatggcggcgcatgagcgatccgaacgtcctcaccgtgcgtgcccgctatcgcgagcagcgcatcaccaaggacgatggcaagacgcgcgtcgacaagagctacgacctgtatgtagaccgcgcgatggtggaggcagagttcgacgcgctgtgggccaaacaagcggaactcagtcccacccagttcggcgaagccgcccgcgccacgctgaaggactgcctgctgcaccagcgcaacttgcgtcccgtccgccccggccgctgcacgctggagcccgacgagccgcgcgcaccgctggccctgcccagccagcagcgcttccgcatcctgcaggaggtcaaccacctgcgtctgctcggcggccggttgctggaagagtcactgagcgttgagcaacgcgacaagctggtggcggcgttggaggacggcagcaagtccttcaagacggccatccccaagctgctgggcctaccgggcacggtgcagttcaacctggccgacgccaagcgaaccgagctgaagggcaatgccaccagcatgctgctcggcaagaaggatttcttcggcccggcctggcacggcttcagcgaggcgcgccaggacgagatcgtcatgcgcatccaggaggaggaaagcgaagcacggctggtggactggctggccacatccacaggcgtagacgaggctcacgcgctgaagatcgccaatgccgcgctgcccgagggctacggctcgctgagcgccaaggcgctggccaagatcctgccggccatgcgcgccgaggtcatcacctacgacaaggccgtgctggccgccggctacgaccatcacagccacatcagccacgcggcctcgaccggcgagatcttgcccgagctgccctactacggcgagtacctgcagcggcatgtgggattcggcactggcgaactgaatgacacgccggaaaagcgcttcggccgaatcgccaacccgacggtgcacatcgggctgaaccaggtgcgcgtcgtcgtcaatgcgctgatcaagcgctacggccaccccaccgaggtgatcgtggaagtggcacgcgacctcaaacagagccaggaccagcgccgcgaaacgcaggagcagcaagcgaagaaccagaagcgcaatgagcggctgcgcaaggacgcggcggccatcctgggcattgccgatgagcgcgtgcgccttgcggacatccagaagctgatcctctgggaggaattgagcttcgacatcgcggaccggcgctgcccctatagcggcgtgcagttgagcgcggccatggtgttgagcgaacaggtggagatcgagcacatcctgccgttctcgatgacgctggatgacagcctcaacaacaagaccgtggcgatgcgcctggtcaaccgcctcaaaggcaaccgcacgccctgggacgcgcgcgaagcctttgccggacaaggctgggactacgacggcatcctgatgcgcgccgagcgcatgccccgcgccaagcgccagcgctttgcgccggacggcttagagaagtggctgaaggaggataaggacttcctggcccgggcgctgaacgacacacgccacctgagccgagtggcgcgcgagtatttgagccttgtctgccctgccagcacacgcgtgattccggggcagatgacggcgatgctgcgcgccaagttcggccttaacgacatcctcggattgaacggcgagaagaaccgcaacgaccaccggcatcacgcggtggatgcctgcgtcgtggcagtgaccgaccagggcctgctgcagcgctttgcccaggccagcgccgacgcgcgcggcaaaggactggaccggctggtcgagaccatgcccgacccgtgggacagctatcgcgagcatgtgcagcgcgcagtgaattcgatctgggtcagccataagccggatcatggcttcgagggcgcgatgcacgaggacacaacctatcgcccgccgcatctcgaccccaagaacatgtggcgcacgcgcggcatcggcggcggcaagccgaatgaaaaggaagccgactccaaggcgatggtcggcttcaccgggccggagcatttgcaacgccaccaccgcgacaaggccggtcagcagttgccctacaagggctacgtggccagccccaagttttgcatggacatcgtgcgcaacgacaagggtcgatgggagggcgaggtcgtgtcaaccttcgaggcatatcgcctggtcagcgagttcggcagagatgccgccttggcgcacatccagtcgaagagccgcagcatttcaggcaagccgttggtgatgcgcctgcaaggcggtgacatggttcgcttcgacgacgacgagggccggcctgtggtgctgcgcgtcgtcaacatgacgggtaacggccagatcttctttgcgccgcataacgaagccaacggagatgcgcgcaatagagacaaacaagaccagtttgtctatctgtccaaatatgccggatcacttcaaaaagcccgtggccgccgggtcacggtctcgccggcgggcgagctgcgcgaccccggcttcaaggagtagctcgcatgatcggccgcatcgtcgaagtggccgatgaccgccggcacctgtccatgaatcgcggcttcatggtggtcaaggacacggagtcgggcaaggaactcggccaggtgccgctagacgacatcgccgccgtgatcgccaatgcccagggcctgagctacacgaacaacctgctcgtggcgctggccgagcgcggcgcgccgttcgtgctgtgcgcggccaaccacaacgcggtgggcatgctgctgcccatcgagggaaatttcgagcagtccaagcgcatcgaggcgcagatcgctgccagcctgcccacgcacaagcgcctgtgggctgctgttgtgcgatccaagctggaacaacaggccgccgcgctggaggccgccggggcacccactgcgccactgaccgcgctggccgccaaggtgcgcagcggcgaccccgacaacctggaggcccagggcgcacggcgctactggggcctgctgttcggcgacggcttccggcgagatcagcagggcggtggtgtcaatggcctgctgaactatggctacacggtgatgcgcgctgcgatggcccgcgccatcatcgcagcgggtctgcaccccggcatcggcctgcatcacagccacgacaacaacgcgatgcggctggtcgatgacctgatggaacccttccggcccgtcatcgatctgaaggtctggcagctgcgccgcaatggcgaagagatagtcacgcccgagtccaagcgcgccctggtgcgcacgctctacgacgacatgcagacagctgcgggggcaacccctgtcatggtctgcacgcagcggttggcggtttcgctggcgcaggtgtacctgggcgagcgggacaagttggacctgcccctgcccggcctgccgctgtcgctggcgtcagcgctgcaggccgacgaatgagccgcgccccatgcttacgggataccggctgatgtggatggtggtgatgttcgatctgccggtggtcgagaaggccgagcgtcgcgcagccaccgagtttcgcaacgcattgctggatatgggcttcgagatgagccagttcagcgtctacatgcgcttttgcaccagcggcacccaggtagagacctactgcaaacgggtcgaaggggcattgccggccggcggcaaggtcaatatcctgcagttcaccgacaagcagtacgaacgcatcatcagctaccagggcaaggccaagcagccggccaaaaaaacgcccgaccaattcgacctgttctagccatgcgcacgttttcggcccgtccagaaggcaaaaaccccttgacgaatcaaggggttgttgccggccgagtctagatcgctgggaaatgcgctctggccggaacgatcgccttgccccttagctccttgttggtagtctagatcgctgggaaatgcgctctggccggaacgaggcgaagccgccaacgccgatccagccgagtctagatcgctgggaaatgcgctctggccggaacacggccgagccgtactgttcctgccaaaggagtctagatcgctgggaaatgcgctctggccggaacggtgtgaggttgaggccgcgctgcgcgagcgagtctagatcgctgggaaatgcgctctggccggaacgccattctggctcactgccgacgaacccgtagtctagatcgctgggaaatgcgctctggccggaaccctacaaggtgctgaccgcggggtccaaggagtctagatcgctgggaaatgcgctctggccggaactcggcggcgtgaccgctaccggccactggaagtctagatcgctgggaaatgcgctctggccggaacgtgcacgcagtcgggctcgtcgctgtagccgagtctagatcgctgggaaatgcgctctggccggaacaggcccaggtgatgcgcgcgcagctccaggagtctagatcgctgggaaatgcgctctggccggaactcacgatcttcgatgcaaccagcaattcggagtctagatcgctgggaaatgcgctctggccggaacagatacgcgccgtactggcctggctcgcagagtctagatcgctgggaaatgcgctctggccggaacttgaccaacaggctcgagcgacacggcgagagtctagatcgctgggaaatgcgctctggccggaactagcaatccttgctgacgcaggtatcggccagtctagatcgctgggaaatgcgctctggccggaacaatggcgttctgctgccgactggcaatgcgagtctagatcgctgggaaatgcgctctggccggaaccgcgttccgtcggcggctacacggtctgggagtctagatcgctgggaaatgcgctctggccggaacctggatcaccaggtgcagttggccggctggaagtctagatcgctgggaaatgcgctctggccggaactcggcggcgtatcggccacaggccactggaagtctagatcgctgggaaatgcgctctggccggaactggttctgcgcgctggcgttctgggcggtcagtctagatcgctgggaaatgcgctctggccggaactcattgatcaagtgggtgtcctgcagatccagtctagatcgctgggaaatgcgctctggccggaacagtatcagcagcaccgcggcacgcaccaccagtctagatcgctgggaaatgcgctctggccggaacggcgacagagacatgatggccgaggccgcgagtctagatcgctgggaaatgcgctctggccggaactggtcatgcccaacatgaacacgtcgatgcagtctagatcgctgggaaatgcgctctggccggaactcaacatccaatggaacgcgctcggcgacgagtctagatcgctgggaaatgcgctctggccggaactcgaagtcgccggcatcggcaagttcattcaagtctagatcgctgggaaatgcgctctggccggaacgacatgagccagggggcgtaggtggtgaagagtctagatcgctgggaaatgcgctctggccggaacgcgaccacgcacatggcctcgtagccgttcagtctagatcgctgggaaatgcgctctggccggaacgagcgcggctacaacccgcagaccatcaagagtctagatcgctgggaaatgcgctctggccggaacagcacatcaacgtcgatgccaagaccgtgaagtctagatcgctgggaaatgcgctctggccggaacccgcctggcgcttcgacgcgggcgactgccagtctagatcgctgggaaatgcgctctggccggaactggatcacgccgcgcgacatcaccaggctgagtctagatcgctgggaaatgcgctctggccggaactcgctgccggtgaggtcctcgcggccgtcgagtctagatcgctgggaaatgcgctctggccggaaccagcgcagttcatgcgagtggcagacgtggagtctagatcgctgggaaatgcgctctggccggaacccggtggcggtctggttgctgatcccggttagtctagatcgctgggaaatgcgctctggccggaaccgaattaccgcgccatcgtcatcgacagggagtctagatcgctgggaaatgcgctctggccggaacgaggccagggcgttggtgttggtgtccagcagtctagatcgctgggaaatgcgctctggccggaacacgagaccccgcgcgccgccggtgcccgcgagtctagatcgctgggaaatgcgctctggccggaaccgcgcgctggcgcggtgcaacttcgtccccagtctagatcgctgggaaatgcgctctggccggaaccccgccgtcatgtaggaagacgttgatgcgagtctagatcgctgggaaatgcgctctggccggaaccgcagaaccaaacgcgccaaggcgcacgctcctgacgccgataaagcaacatgaacaggccgacttatcagcgaccgtcgagaacacaaagcccaggacacgccttttgccggcgccggtggagggcgcgggatttgccatgacgtagggcagcctttcatccgacggtgtaagttgcgcccgtcctggcccgacccagcctcagcccacagacccgagagcccctcatgctgattcgaacgaccgcccttcacgagcccctgtccagcgagatcacgccccgccgggtctacctgaaccgccgcactgccctggccggccttggcctggcaaccgcgtcaccgctggccctggcccaggcccaggccgcgccaggtggcggcaagctgcccaagctgccgggcgcccgctcggccgtggccagtgcgatggtgatggagaaagtcaccagctacgccgatgcaacctcgtacaacaacttctacgaattcggcaccgacaaggccgaccccgccgagcgcgcccacacgctcaagccccggccatggacggtcagcgtcgaaggcgaatgcgccaagcccggccgctacgacctcgacgcgctgctcaagctcagcgccatggaagagcgcatctaccggctgcgctgcgtcgaaggctggagcatggtgatcccgtgggtgggctactcgctgtcagagctcatcaagaaagcagagcccaccggcaaggcgaagttcgtcgaattcacgacgctggccgatcgcgcgcagatgcccgggctgcgctcgtcggtgctggactggccctacctcgaaggcctgcgcatggatgaagccatgcacccgctggcgctgctgaccttcggcatgtatggcgaggtgctgcccaaccagaatggcgcgccggtgcgcatcgtgctgccctggaagtacggcttcaaatcggccaagagcatcgtcaagatccgcttcgtcgagaagcagccgcgcagcagctgggaagagagcgcaccccaggaatacggcttctattccaacgtgaatcccaccgtggcccatccgcgctggagccagctcagcgagcgccgcattggcgaagacggcctgttcgccaagaagcggccgtccttgatgttcaacggctatgaagcgcaagtgggccagctctatgcgggcatggatctgaagcgcaatttctgatgcggcgtgcgttgacggcggcgctgctcagccgcggcgccaaaccggcgcttttcctgctgtgccttacgccgctggcgtggctggtcttcggcgccgtagccaaccggctcggtgccaacccggccgaagccatcatccgcggcctgggcgactggacgttgcgcggcctgtggctgacgctggccatcacgccgctgcgcgagctgacgggcctggccgcactggcgcgctttcggcgcacgctgggcgtgttcaccttcagctatgcctcactgcacctgctggcctatggctggctggacatggggctggatttctccgacatcgcccgcgacatcgccaagcggcccttcatcctgatgggcttcaccgcctggctgctgatggcgccgctggcggcaacgagcttcaacaaggccatcaaggccctcggcgccaagcgctggcaggcgctgcacaagacgatctacgccgtctccgtcatcgcgctgctgcacttcatctggatgcgcgccggcaagcacaacttcgccgagccggccgtctacggcgtgatccttgccgcgctgctggggtggcgcctcttcaaacgcctgaacacgaaaaaggcgcgactgggataattcgtggttctgcccgaaccaccccatgcccaaccccacctccatcgacgtcgccatcctcggcggcggccccgccggctgcagcgccgcgtcctggctgggccagatgggcatgacagccctgctcgtcgagcgcgaatcccgcctgtgcgccgcgctggccggcctgaacttcgcccaggactgggtgctgggcgagcccgccgcccgcctggctgctttgggcgagcactacgccgcccaggcccaggccacgccgggcatgacgctgcgcctgggcacgcgggccgagtccgcccgccacacgcccgcaggctggaccctgcaactggccaccggcgagcatgtgcaggcccgcgccctgctcgtcgccaccggcctgcgcctgttgcgcccggcgcgctacttcgccgtgccgcatgagcgcgtgctggacgcctcccagttgaccgcccgccgcgaggccctgtcgccagggcgcgtgctgctgctgggcgccggcgacaacgccgcagagaacgcccttttcctggccgagcgcggccatgaggtgactgtctggtcgcgcggcagctggcgcgcccagatccacctggccgagcgggcgacagcccacccccgcatcacggtgcaactggccacgccactgcccgaggccctgctgccggacgaccgcggcgtcactgtcggcgccgaacgtttcgactttgtcgccgcactgctgggcttcgagcccgagccttccgcctttgcgctgctggacgaagcctcgcgccaacgcgccttcgtcgccggtgacgccagccgtcgctggcatccatgcgtgcagacggcgctggccgatggcgtgcaggcggccaagcagatcgaactggcgctgcgcccgcaggtcgccgccgcgccgcagcgctacaacaaccgccaggtcatccatctgcagggcctgcgttttcgcgccaacctcggcgtgctcgacttcgagcgcaccgggccccagcccatccaggtcgatgccgaggtcaacctcggtgccatgcctgtcgtcgcgcgcgacgccgacatcggccatgtgctggactaccgccgcgtgcgcacggccatcatcgacgaatgcaccgccgagcacaccgacctcgtcgaggccctgctcggcaagctctgcaaccgcctgatgagcctgcccggcgtcgtcggcgtgcgcctgaagctgaccaagctcgaaatctttcccgactgcgaagtcgcaatcagcaccgaactgggtgcatggtgaacaacatgtctgaacttgatttgcccccacgctcgcacggcgagctgccccccgagggggctgtcagcggtttcgggcggccgggcaccgctgacgtcctcgatttcgccgaacaagccgctgccgacaagaaggccgcgtttgagatcaacaagctgtccaagcgcctgcaccgccaggtcggccaggccgtcaccgacttcaacatgatcgaagacggcgacaaggtcatggtctgcctgtcgggcggcaaggacagctacgcgatgctggacatcctgctgaacctgcagcagcgcgcgccgatcaagttcagcctcgtcgccgtcaacctcgaccagaagcagcccggcttccccgaggaggtgctgcccaactacctgcgttcgcgcggcgtggacttccacatcgagaaccaggacacctattccatcgtcaagaagctcatccccgagggcaagacgacgtgcagcctgtgctcacgcctgcgccgcggcatcctgtaccgcgtggccggcgaactgggcgccaccaagatcgcgctgggccatcaccgcgacgacatggtcacgacgctgttcctgaacatgttcttcggcagccgcatgaagggcatgccggccaagctggtcagcgacgacggcaagaacgtcgtcatccgcccgctggcctatgtgaaggagcccgacctcgtgcgctgggccgaacaccgcgagttccccatcattccgtgcaacctgtgcggcagccaggacaacctgcagcgcgtgcaggtcaaggccatgatcaacgagtgggaaaagcgctaccccggccgtatcgacaacatcttcacggccatgggcaacgtcgtgccctcgcacatgatggacaagaagctcttcccgttcgagaccatgaaggccacgggccgggccgagcccgacggcgacatcgccttcgacgacgatgaaagctgcgcgacacccgcgcaggcttcagtcatcacgctgcaacgctgatttacacgcgggcaatctgagcgggtcagaatgacggcatctcgttgatggaggtgccgtcatgaaccgccgcctgattctcgccaccctagccgctgcctcggtcgctgccttcaccggctgcgccggcccgtacacggtctccgctgacgtctccagttatggcaattggccggccgaccgcaagcccggcagctatgccttcgaccgcctgccctcgcagcagcagagtgaggaagccgccaagcgccaggccacgctggaagacgccgccaaggccgcgttggaaaaggccggcttcaggcctgccgccgatgcgaagagcgctgacgtgctcgtcacgctgggcgcccgcgtcaccgcctacgaccccgtgccctgggatgacccgctgtggtggcgctggcgcggccgcctcatttcgccgcgctatggctatgtgccaggctggagcggctttggctggcgtcacgatccgttcttcgatcgccgctacgaccgcgccgtggccctgctgatgcgtgaccgcgccagcggcgaagccctgttcgagacccatgccagcaacgagggcgtgaccatgggcagcgacgccctgctgacgccgttgttcgacgcggccatggccgagttccccaaggtcaacccgaaatcgcatcgcgtctccgtgcaagccgtccgctagcggcgaggacagcagggaacagcgccccgcctgcccataatcgcggcttcgttcaaacgtagtcgcaaggcaggcatggcgctcaacatcgtgatcatggcggcgggcaagggcacccgcatgaagtccgcaacgcccaaggtgttgcacaagctcgccggccgctcattgctggctcatgtgctgaagagctgcgagcccctggccgccagcgcgcgcatcgtcatcaccgggcatggcgccgaccaggtcgaggcggccgtctcggctgacggcatctccttcgtgcgccagatgccccagctcggcaccggccacgccatccagcaggtcgtgccggcgctgttgggtgaaggcaccacgctgatcctgaacggcgacgtgcccctgatcgaaaccaccacggccaaggctctcatcgacgcctgcgccggccacgccctggtgctgctgacggtcgacctcgccgatcccaccggctacggccgcatcatccgcgaccccgatgacggcggcgtgctcgccatcgtcgagcacaaggacgccacgcccgagcagcgcctcatccacgagggctacagcggcatgatggccgcgcccactgcagcgctcaagcgctgggtcggccagctgaccaacaacaatgcccagggcgagtactacctgaccgacatcgtcgcgatggccgtcgccgagggcctgcccgtgctgggcatcaaggcccacagcgagatcgaggtgctgggcgtcaacgaccccgtgcagctctcccagctcgaacgcgccttccaggtccgccaggcggaaggcctgatgcgcgccggcgtgcgcctggccgacccggcccgcttcgacctgcgcggcacgctgacgcacggccaggacgtcgagatcgacgtgaactgcgtcttcgagggcgatgtgagcctgggcgatggcgtgcgcattggcgccaactgcgtgatccgcaacgtgaccatcgccgccggcgcacgcatccacgagttcacccacatcgacggtgaagcagcgggcgccagcgttggtgagggtgcactgatcggccccttcgcccgcctgcggcccggcgcacaactgggcgccgaggtgcacatcggcaacttcgtcgaggtcaagaactcgacgctggccaagggtgccaaggccaaccacctggcctatctgggcgacgccaccgtgggcgagcgtgtcaactatggcgcgggttcgatcacggccaactacgacggcgccaacaagcaccgcacaacgatcggcgatgacgttcatgtcggctccaactgcgtgctggtggcgcccatc

SEQ ID NO: 1830 - DNA, 23090 bp, synthetic construct
  misc_feature 1..23090: note = Synthetic
  source 1..23090: mol_type = other DNA
gctgctggacgtggccatggccatcctggccaaccagggcgcgggctttctcaacgccggcaacgtccccaagcgccagggcaacacccaccccagcgtcgtgccctaccaggacttccccacgcaggacggcaacatgctgctggcgatcggcaacgacgggcagttcgcgcgcttctgcgaggtcgctggcgtggactgggccagcgacgagcgcttcacgcagaacgccggccgcgtcatccaccgcgacacgctgatcccgatgatggccgccctcacgcgcacgcgcagcaccgccgaatgggtgcggctgctggaggacaaggccgtgccctgcgggcccatcaaccacatcggccaggccttcgacgacgaacaggtgcgtgcgcgcagcctgcgcattgtgcaggaacgctacccgggcgcccagccccccgccggagagaccgtgaaccgcgtggtgaccacggccagcccgttgcgcctgtccgatacccccgtgaccctgcgccacgcgccgccggccctgggccagcacaccgacgaggtgctgcacgagcgcctgggtctggatgcggcgcggctgcaggagctgcgcgccaagggcgtgctttgagactttgagaagcagggcgcccagagaggcagggcttgcagggccggggcatcacgcgcgcgcagcgtggtgggcctgcacggccgccatcagcgcctgtgcatgcgcgggcagcccctgcagcgtgcgcaccagcatgtagcgcggacgcacggcccagctgtccatcagctggacctggtgcacatgcgctccctgggcgtagcgcatggcgccgctttcgggcaccacggcaatgccgacgccggcggccaccatgcggcacatggcgtcgaagctggccagctggatgcgcagcttgagcgtatgccccagctgctgtcccatgccgtccagaaaggtctgcagcgtactggtgcggtgcatgcccacgaaattctcgtgcagcacctgggcgaacggaatttcctggatagcgcgccaggccggggtgggcggcgtgatcagcaccagccggtcggtgctgaaatgcaggctttgcagcccgtgggtgtccacctcgccggccacgatgcccaggtccgcccggccttcgcggatgtcctcggcgatacgggcgttggggcgctcctccaggtccacgctgatgtgcgggtgcgccgtcaggtacgccgccaggatgtcgggcatgaagtccgtgaccgccgtggtgttggcgaacacgcgcagatgcccgcgcaggcccgcgccgtactcctgcagctcggcctgcaactggcgcgcctgctgcaggatggctcgcgcatgaaacaggaaggcctccccgggcggtgacagacgcacgccccgagcctctcgtatcagcaaaggcatgcccacccgctcctccagcgccttgacgcgtgcgctggtcgccgccagggacaggtgcagttgctccgctgcacgggaaaggctgccgagctgggccacgagtaaaaaaagacgcagatccttgagttcgaattgcatggcggccggacgcacgaggcatgtgcaggttcttgaaaaaccgaagcctggattctgatatgaaagattgcgcggacgcgggccggcggcgaacatcggcacattactcaataggcattccaccaggagacaaccacatgcgctgtgccgacttcgccatcatcacccgccgcgccctgtgcgctggcgccgtcctggggtgggccctgaccgccgcccccggggcttgcgcgcaaggcgcctaccccagccgtcccatcgtgatggtggtgccccaggcggcgggcggcacgaacgacatcgtgggccgcgtggtggcgcaaaagctcaccgagaagctgggcggcagtgccgtggtggagaacaagccgggcgcgggcggcaacatcggcacgcaggccgtcgccagagcgcccaaggatggctacacgctgctcatgaccatcagcagcagccaggccatcaacccggccctgtacaaggcgccaggcttcgaccccgtggccgacttccagcccatcagcctcatcggcgcggtgcccaatgtgctgctggcccacccctcgtttcctgccaagaccgtgcccgagctgctggccctggccaagtcccagccgcgcaccctgcagtacgcctcggccggcaatggcacgctgaatcacctgctgggcgaaatgctgaaccagatggccggcatcgagctgcagcatgtgccctacaagggcgtggcgcccgcgctcaacgacgtgctcggcggccagctgccgctgctgttcggcagtctgccgtccacgctggcgcacatcaaggcgggccggctgcgcgcgctggcagtgagcagcccgcagcgctcgcccgtgctgcccgacgtacccgccctggccgagttcgtgcccggctacagcggcacgttgtggataggtctgttcgcgcccgcgggcgttcccaatgaggcgctggcccgcctgcaggacggcatgcgccaggccatggctgacaaggagctgcgcgacaagctggaagcccagggcgtggaactggccggcactgccaacaagccggtcacgcccaacgagtttgccgccctgctcaagcaggacatcgccaagtgggcgcagatcgtgaagacctcgggcgccaccattaattgagtgcgcatgccaacaccgcgggtgccgcagccctgagctatctgccattgcggctggcctccccaccccagccctttccccaagggggcgagggagaagcgctacctgttccccattgcctggagtcctgcatgccccgccccctcgacggcatcaccgtcgtctcgctcgaacacgccgtcgccgccccgttctgcacgcgccagctggccgacctgggcgcgcgcgtcatcaaggtggagcgccccggcagcggcgacttcgcgcgcggctacgaccagcgcgtgcgcggccagtcgtcgcacttcacctggatcaaccgcagcaaagagagcctggcgctggacgtgaagcacccccaggccaaggccgcgctgatgcagctcctgaagaccgccgacgtgctggtgcagaacctggcgcccggcgccgccgcgcgcatgggcctgtcgcatgaggcgttgaaggagcacaacccgcgcctgatcgtgtgcgacatcagcggctacggcgccgacggaccgtaccgcgacaagaaggcctacgacctgctgatccagagcgaggcggggttcctctccgtcaccggcacgcccgagacgccctccaagtccggcatctcggtggccgacatcgccgccggcatgtacgcctacagcaacatcctgtcggccctgctgctgcgcgccaggacgggcgagggcagccacatcgacgtgtccatgctcgaagccatgggcgagtggatgggctacccgatgtactacgcttatcaagacgcgccgccgccgccgcgcaccggcgccagccacgccagcatctacccctacgggccgttcacggccggcgacggcggcaccgtgatgctgggcctgcaaaacgagcgcgagtggaagaccttctgcgacgccgtgctgcagcgccccgaggtggccaccgacgcgcgcttctgttccaacgcccagcgcaaccagcaccgcagtgagctgcaggcgctgatcctggaagtcttcgccgcactcacggcggcacaggtcgtggagcgcctggatgcggcggcaatagccaacgcgcgcgtcaacgacatggccggcctgtgggcgcacccgcagctcaaggcgcgccagcgctggcgcagcgtgggcacgcccgcgggcgaggtgccggccctgctgccgccgggcgtgaacagcgcgttcgattaccgcatggatgccgtgcccgccgtgggccagcacaccgccgccatcctggccgcgctgggctggacggacgggcagatcgacgaagtcatcacgccctccccctctggggaagggtaggtgcgggggccagccgccgctggctcagggatacagcccgcgcatctcgcgcgcgtgcaggatgcgcttacaggccacgatgaaggtggcggtgcgcaggctgaccttgttctcctgcgccacgttccacacgcccgcgaaggcctccttcatgatgcgcaccaggcgggcgttgatctcgtcctcggtccagaagaagctggaaaagtcctgcacccactcgaagtagctcaccgtcacgccgccggcgttggcgattacgtcgggcagtaccagcacgcccttgtcgtgcaggatgtcgtcggcctcgggggtggtggggccgttggcgccctcgatcaccatcctggcctggatcctgccggcgttgtccttggtgatctggctttcgagcgcggcggggatgaggatgtcgcaggccacgccccagaaggcgtcgtcggccatgggctcggcgccggcgaaaccggccacgccgccggtctgctgcacgtgggccagcagcgcgggcacgtccaggcccttgtcgttgtggatggtgcccgtgtggtcctgcaccgccaccaccttggcccctgcctcggagaatagcctgccggccgtgccgcccacgttgccgaagccctgcacggccacacgcgcgccctcgatgggcatgccggtcaggcgcgcggcttccacccccacggtgaacacgccgcggcccgtggcctccacgcggcccagcgatccgcccaggtccacgggcttgcccgtgaccacgccggtggcggtggtgcccacgttcatcgaataggtgtccatcatccaggccatgacctgggcgttggtgttcacgtcgggcgcgggaatgtccttggacggcccgatgatgatgccgatctcgctggtatagcggcgcgtcaggcgctccagttcgccgcgcgacagcgtcttgggatcgacgcggatgccgcccttggcgccgccgtagggcacgttgacggccgcattcttgatcgacatccaggccgacagggccatcacctcggacagggtcacgtcctggtggaagcgcacgccgcccttgcccgggccgcggctgacgttgtgctgcacgcggtagccctcgaagtgggcgatggtgccgttgtccagctcgatcggcacgtccacgatcagcgcacgcttggggcgcttcaaggtctccacccagcgcgccaggttgcccaggtagggcgtgacgcgatcgacttgctgcaggtacacgccccaggggccgaggtggttggggtcgagataggagggcagaggatgggtgccggagggggacgtcatggattgtccttgtgaaacaaatcgagaaacgagactctatgcctgcgtacctgtgctgtccaacacgtatctgtatgcctgtaatgcagccgatgcatagaccctgcggcgatccctggcaataggccggccccggcaaaaccctggccgggcgcggcgcaggctgcgcacctatactgccgcgccatgaatgcaacgcgtacggcccgtggcctgcagggcccctggcgccgcctggtcttcgtctccctgtacgagctgatcgccatccttgcctccagcctgctgttcatggccataggccagggtgcgggcgcatcgggcgccatggccgtggtggcctcgacgctggccatcgtctggaacgtcaccttcaaccacctgttcgagaaatgggaggcacgccagagcgtcaagggccgctcggcgatgcgccgtgtggtgcatgccatgggcttcgagggcggcctggcattggcgctcattcctctcatggcctggtggttcggcgtgagcctgtgggaggccacgctgatggaagcggggctgctgctgttcttcctcgtctacacctacctcttcaactgggccttcgaccgcatcttcggcctgccggcgtcggcacagcctgcttgaattttgatagctatctccgcttgatgggcgggcgctgagggtcggtatgactaatgccatgcccctggcccagacttcttcccgcatgccgcgctgcgccctgctggcggcactggtcgttggcgctgcgctgggggtctatttccagctgccagcgatgacatactactgggggcagagcctgcgccaggaagcgcagttgcgccccgtttcgctgtggctgccggcctaccaggccacgatccagggtcggccgctgcgcggcgtggagaagaacctgtccggcctcaccttcaacaatggcacgggcacgctgtttgcctccaccaacagccctgcacagatcgtggagctgagcgtggagggcgaggtgctgcgaatcatccgcgtgagcggcgcgcaggatacggagggcatcgcgcatgtcgagggcgggcgcttcatgctctccgggggggcgccacaacgcgctgtatgccgtggacatcgggccggacagccgcgaagtccaggcccgcgagttggtgcggctgccgctggacacgctgcacagcaacctgggggtggagaccgtgtcgtgggacgaatccgcgcagcgcctgctggtgggccaggaaaagtggccgctgcggctgctgagcctgcggggcaacccccgggtggagcccatatggctccggcaggactggggggcgctgttcatcaatgacctggcctcggtcacgacgcatgcgcccacgggcaacctgctgctgctcagcgaggagtctgcgatggtcgtggagtacgacccgcggggcatgccggtgagcctgctgccgctgtggcgcggcctgcacgggctggcacgcaagatcccccagcctgaggggctggcgctggcgccggacggcagcctgttcatcgtctccgagcccaacctgttctaccgcttcgagaagccccgcgcagccgcacggcccggcacgctggcgggcgagtgaaacgatagaatccgtgtttccccaaggagcgttgcagcgggctgggcgacctcccgtcaggcttggggctttcctcttggcaacgacgctcgcctgtccctgagaaccgattgcacaggtgagtctgatgtccgccgtaaccccgccccccatgaagctgtccggcctggagccggtttttattggcgaaggcagcctgttcgtcaacgtcggcgagcgcaccaacgtcacgggctccaaggccttcgcgcgcatgatcctgggcgagcagtacgagcaggccctgtcggtggcgcgccagcaggtggagaacggcgcccaggtcatcgatgtgaacatggacgaggccatgctcgacagcaaggccgccatggtgcgcttcctgaacctcatcgcgtccgagcccgacatcgccaaggtgccggtgatggtggacagctccaagtgggaggtcatcgaggccggcctgcgctgcctgcagggcaagggcatcgtcaactccatcagcatgaaggagggcgtggaggagttcaagcgccaggccaagctcatcaagcgctacggcgccgccgccgtggtcatggccttcgacgagcagggccaggccgacaccttcgcgcgcaagaccgagatctgccagcgcgcctaccgcatcctggtggatgaggtgggcttcgcgcccgaggacatcatcttcgaccccaacatcttcgccatcgccacgggcatcgaggagcacgccaactacgccgtggacttcatcgaggccacgcgctggatcaagcagcacctgccgggcgccaaggtgagcggcggcgtgtccaacgtctccttcagcttccgcggcaacgaccccgtgcgcgaggccatccacaccgtgttcctgtaccacgccatcaaggccggcatggacatgggcatcgtcaacgccggcatggtcggcgtctacgacgacctcgaccccgagctgcgcgcgcgcgtggaggacgtggtgctcaaccgccgccccgacgcggccgagcgcttgctggagatcgccgaggccgccaagggcgcggccaaggacgacagcaagaagctcgaatggcgcggcacgcctgacaacccccgccccgtgggcgagcgcctggcgcatgcgctggtgcacggcatcaccgacttcatcgtcgcagataccgaggaggcctaccagcagatcgtggtgcaggggggcggccgcccgctgcacgtcatcgaaggcccgctcatggacggcatgaacatcgtcggcgacctgttcggcgccggcaagatgttcctgccccaggtggtgaagagcgcgcgcgtgatgaagcaggccgtggcgcacctgattccctacatcgaggaagaaaagcgccagcaggaggcggcgggcctggacgtgtcgagcaagggcaagatcgtcgtcgccaccgtcaagggcgacgtgcacgacatcggcaagaacatcgtcaccgtggtcctgcagtgcaacaacttcgaggtcatcaacatgggcgtgatggtgccctgccacgagatcctggcgcgcgccaaggccgagggcgcggacatcgtcggcctgtcgggcctcatcacgccgagcctggaggaaatgcagtacgtcgccggcgaaatgcacaaggacgactatttccgtatcaagaagatcccgctgctcatcggcggcgccacctgctcgcgcgtgcacaccgccgtcaagatcgcgccgcagtacgaaggccccgtggtctacgtgcccgacgcctcgcgcagcgtgagcgtggcgcagagcctgctgggcgagggtaaggacgcctacctggccgaggtgcaggccgactacgaccacgtgcgcgagctgcacgccaaaaagaagaaggtgccgctgtggcccatcgaaaaggcgcgcgccaacgccgcgcggctggactatgtcccggtcgtgccgcgcgcgctgggccgccgcgtgttccgcaacttcgacctggccgagatcgccaagtacctggactggggcccgttcttccagacctgggatttggcgggggcgttcccggccatcctcgacgacgatgtcgtgggtgaggcggcgcgcaaggtctacgccgacggccaggccatgctcaagaagatcatcgagggccgctggctccaggccaacggcgtgatcggcctgttccccgccaacagagtgggcgacgacatcgagttctacaccgacgagacgcgcacccaggtcctcatgacctggtacggcctgcgccagcagaccgaaaagcaggtggacgccgaaggccggctgcgccccagccggagcctggccgacttcgtcgcgcccaaggagtcgggcattgccgactacgccggcatgttcgccgtcacggcgggcataggcgcagagaagaaggaaaaagagttcctcgacgcgctcgacgactacagcaacatcctcttcaagggcctggccgaccgcctggccgaagccttcgccgaatgcctgcacgagcgcgtgcgcaaggacctgtggggctatggcgcagacgagagcctcagcaacgaagacctcatcaaggaaaaataccagggcatacgccccgcccccggctaccccgcctgcccggaccacacggccaagatcgccctgttcgacaccctgcaggcgcgcgagatcggcatggacttgacggagagcatggccatgttcccggcgtccagcgtcagcggcttctacctggcgcacccgcaggcgacctacttcgtggtgggccagatcggcgacgaccaggtgcaggacatggccgcgcgccgcggcatggacgtcgaggaactgcgccgcaggctggcgccgaacctgggatagacactcccaaaagacgaaagccccgcatgcggggctttccatttggtgcatctttcagcttgttagcggtcagagcgcatatcccagtgaactgagtggttgcaatataactaaattggttacaacatgcaagtgttttttgatggagagggaaacgtatgcggagtttgcgctaccgcctggcacttgatttgggatccacctcgttgggatgggcgcttttccggctagacgcatgcaataggcccacggcggtcatcaaggctggcgtgcgcattttcagcgatggccgcaatcccaaggacggctcttcgctcgccgtcacccgccgtgcggcccgggccatgcgccgccgccgcgaccggctgctcaagcgcaagacgcgcatgcaagccaagctggtggagcacggtttctttccggcagatgcgggcaaacgcaaggcgctggagcaactcaatccttacgcgctgcgtgccaaagggctgcaagaagcattgctccccggagagttcgcgcgagcgttattccatatcaaccagcgccgcggcttcaagagcaaccgcaagacggacaagaaggataacgacagcggcgcgctcaagaaggccatcggccagttgcgccagcagatggccgaacaaggcagccgcacggtgggcgaatacctgtggacgcgactacagcaggggcagggcgtgcgcgcacgctaccgcgagaagccttacaccaccgaggaaggcaagaagcgcatcgacaagagctacgacctctacatcgaccgcgcgatgattgaacaggaattcgatgctctctgggccgcgcaggccgcattcaaccccacgctcttccacgaggcggcacgcgccgacttgaaggacacgttgctgcatcagcgccccctgcgccccgtcaagccgggccgctgcacgctgctgcccgaggaagagcgcgcgccgcttgcgctgccgagcacgcagcgcttccgtatccaccaggaggtcaaccatctgcgcctgctggatgagaacctgcgcgaagtcgcactcactctggcgcagcgcgatgccgtggtaactgcgctggaaaccaaggccaaactcagcttcgagcaaatccgcaagctgctcaaactctcgggcagcgtgcagttcaacctggaggatgccaagcgcacggagctcaaaggcaacgccacgagcgcggcactggcgcgcaaagagttgttcggtgccgcgtggagcggattcgatgaagcgctgcaggacgaaatcgtctggcaactggtgaccgaggaaggcgagggcgcactgatcgcctggctgcagacacatactggcgtggacgaagccagggcgcaggccatcgtcgacgtgagcctgcccgagggctatggcaacctgagccgcaaggcgctcgcgcgtatcgtgcctgcgctgcgcgccgctgtcatcacctacgacaaggcggtgcaggccgcgggcttcgaccaccatagccagttgggcttcgaatacgacgcgagcgaagtggaggacctggtgcatccggagacgggcgagatccgttccgtgttcaagcagttgccctattacggcaaggcgctgcagcgccacgtggcctttggcagcggcaagcccgaggacccggatgagaagcgctacggcaagatcgccaaccccacggtgcacatcggcctgaaccaggtacgcatggtggtcaatgcactgattcgccgttacggccggccgaccgaggtggtgatcgaactggcgcgcgacctcaagcaaagccgtgagcagaaggtggaagcgcagcgccgccaagccgacaaccagcggcgtaatgcgcgcattcgccggtctattgccgaggtgctgggcatcggcgaagagcgggtacgcggcagtgacatccagaaatggatctgttgggaagagctgagcttcgatgcggccgatcggcgctgcccctacagcggcgtgcagatcagcgccgccatgctgctgagcgatgaggtggaggtcgagcacatcctgcctttttcgaagaccttggacgacagcctgaacaaccgcaccgtcgccatgcgccaggccaaccgcatcaagcgcaatcgcacgccgtgggatgcgcgtgccgaattcgaggcacagggctggagctatgaagacatcctgcagcgtgccgagcgcatgcccttgcgcaaacgctaccgcttcgcgcccgacggttacgagcgctggctgggcgatgacaaggacttcctggcccgcgcgttgaacgacacgcgctacctctcgcgcgtggccgccgagtatttgcggctggtatgccccggcacgcgcgtaattccaggccagctgacggcgttgttgcgcggcaaattcggcctcaacgacgtgctgggcctggatggcgagaagaaccgcaacgaccaccggcaccatgccgtggatgcctgcgtgatcggcgtgacggatcaggggctgatgcagcgtttcgccacggccagtgcccaggcgcgcggagacggcctcacgcgcctggtggacggcatgcccatgccttggccgacctaccgcgaccatgtggagcgtgcagtgcgccatatctgggtgagccaccggcccgaccatggcttcgaaggcgcgatgatggaagagacctcctacggtatccgtaaggacggctctatcaaacagcggcgcaaggctgacggcagcgccgggcgcgaaatttccaacctgatccgaatccacgaggccacgcagcctttgcggcatggcgtgagcgcggatgggcagcctttggcctacaaaggctatgtgggggggagcaattactgcatcgagatcacggtcaacgacaaaggcaagtgggagggggaggtgatctcgaccttccgggcctacggcatcgtgcgcgcgggaggaatggggcgcctgcgcaatcctcatgagggccagaacgggcggaaactgattatgcggctggtgatcggtgacagtgtgcggctggaggtggatggagcggagcgcacgatgaggattgtcaagattagtgggagtaatgggcaaattttcatggcgcccattcatgaggccaatgtggatgcccgaaataccgacaagcaagatgcctttacctacacctccaagtacgcgggctccttgcaaaaagccaaaacccgtcgcgtcaccatctcgcccattggcgaagtgcgggatcccggtttcaagggctgacgaccatgatcggtcgtattgtcgaaatcgcagacgaccggcggcatctcttcgtcaatcgcggcttcctggtcgtgcgtgacaccgaaggcgaacgcaaggaactgggtcaggtgccactggacgacattgctgctgtcatcgccaacgcccacggcctgacctataccaacaacctgctcgtggcactcgctgaacgcggcgccccgtttgtgctgtgcggccctaaccacaatgccatgggtatgctgctgcccatcgacggtcaccatgtacaagccaagcgcatcgaggcgcagatcgcggccagcctgcctgtgcacaagcgcctgtgggcggcggtggtcaagtccaagttggagcagcaggccgctgcattggaggccgctgccgcccctaccgctcctttgcttgcactggtgagtaaggtcaaaagcggcgacccggagaacatcgaagggcagggcgctcgccgctactggggcctgctattcggtaacacctttcgccgcgaccagaacggtgatggcgtgaacgcgctgctcaactatggctacaccattctgcgctcggccacggcgcgggcagtggtggctgcgggtttgcacccgagcataggcttgcatcacagcaacgatagcaatgccatgcgcttggtggatgatctgatggagcccttccgccccgtggtggatttgaaggtgtggcaattgctggcccagggggaagcgcacgtcaccccggaaaccaagcgcgctcttgtgcgtgtgctgtatgacgatatgcagaccagcgtgggcgtgacgcctgtgatggtctgcatgcaaaaactcgccatctccctcgcgcaggtctacttaggcgagcgcacgaaactcgatttacctctacagggtttgcctttggccttggcgggaagttccgagtcggactgattcaaacgacctgttagaggcatgctttccggataccggctcatgtggatggtggtgatgttcgatttgcccgtggtggaaaagtctgagcggcgcgcggccacgggctttcgcaacgcattgctggacttgggcttcgagatgagccagttcagcgtctacatgcggttctgtaccagccaaacacaggtggacaccctgtgtcgcaacgtggaaacggccttgccgccaggcggaaaagtccatatcttccaattcacagacaagcagtacgaacgtgccatcaccttccatggccagcgtcgccaaccaggccaaaaagcacccgatcagttcgatcttttctgaccatgcaacctattttctggtgcctagaagcacaaaaccccttgaaaaatcaaggggttagcgcgatctcattctagatcactgggatatgcgcactggccggaacgcgtgaagtgcatcctgtacacggtgccagattctagatcactgggatatgcgcactggccggaactgagtgaaatacaaacagcaatcgtcggcgattctagatcactgggatatgcgcactggccggaactgaacggggcggcggatgaggtcggcaagattctagatcactgggatatgcgcactggccggaactgaggttcctgaacaacgaggcgcccgacaattctagatcactgggatatgcgcactggccggaaccctacgtatttgcctatttctttgatggtgattctagatcactgggatatgcgcactggccggaacatcacacgctgaccaccgatctggcgcaggattctagatcactgggatatgcgcactggccggaaccccagcgactcctgaacgcgattggccagtattctagatcactgggatatgcgcactggccggaactattgcttctttctaaggagtacgaaatgaattctagatcactgggatatgcgcactggccggaacggtgtgcttgacccagccgccgtcgtcttgattctagatcactgggatatgcgcactggccggaactgtacatccccgcgctgcacgctgccctcgattctagatcactgggatatgcgcactggccggaaccgatgacgatgtactacggctcgcccgattattctagatcactgggatatgcgcactggccggaactgcccgctgggcttgccggcaaacgagaggattctagatcactgggatatgcgcactggccggaacaagaagcgggcgcggtaggtgctcggtgggattctagatcactgggatatgcgcactggccggaaccagtgaccttttcgatcgacttgctcaagtattctagatcactgggatatgcgcactggccggaacggcctacgccaaggccgggaccgaggcgcaattctagatcactgggatatgcgcactggccggaactcggcgcaggcggagtgtccccgctgatggattctagatcactgggatatgcgcactggccggaacctgtagtagttgcgcgtttcgcgcggcgctattctagatcactgggatatgcgcactggccggaacgccaggcccgcgatgccgatgccgatttgcattctagatcactgggatatgcgcactggccggaaccctcgtggcggttttttcatttgtgcatcaattctagatcactgggatatgcgcactggccggaactgtctagccaaatgcttgaatcacgccatgattctagatcactgggatatgcgcactggccggaacgtgcaggcgtgcccaattgacccgcacggcattctagatcactgggatatgcgcactggccggaaccggcacgctggcacactgtcaaggcgcctgattctagatcactgggatatgcgcactggccggaactgaaccgcatcaacgcccaaacccgccgccattctagatcactgggatatgcgcactggccggaaccccagggttggaacgaaggcgcggccctggattctagatcactgggatatgcgcactggccggaacaccacccattgctaggtgatcggtgactttattctagatcactgggatatgcgcactggccggaactacagcgagtccgaaaagctcgccatcaacattctagatcactgggatatgcgcactggccggaactccaatggcgccccgctgttcagacgagggattctagatcactgggatatgcgcactggccggaaccagcgcttgtttctctggtcgtaacggataattctagatcactgggatatgcgcactggccggaaccacagccgcgtggtgccggatggcacccgtattctagatcactgggatatgcgcactggccggaacgtcttctgctctttgatgttcccttcggcaattctagatcactgggatatgcgcactggccggaacgcagggcgccgcgctgttctaccctgtcggattctagatcactgggatatgcgcactggccggaactgcgttgcgcttgtccgctacggtgttgtcattctagatcactgggatatgcgcactggccggaactgtatccaccgccgccccacgagctcttggattctagatcactgggatatgcgcactggccggaacctcccggatcggttcatgcgacgggttcagattctagatcactgggatatgcgcactggccggaactctttgaattccgcgccgctcatcatctttattctagatcactgggatatgcgcactggccggaactgaggccgcaggcgtatgaatcaggtattgattctagatcactgggatatgcgcactggccggaacagcaggccacggttgtacttaacgaagtgaattctagatcactgggatatgcgcactggccggaactacgacagattgctagcgatgcgagagcgtattctagatcactgggatatgcgcactggccggaacttcagccttgaccggctacccgcttccacattctagatcactgggatatgcgcactggccggaacgctttcgtagtagcaagcaatcgtcgccgtattctagatcactgggatatgcgcactggccggaacatacgtgtagcggtgcttgatgacgatcttattctagatcactgggatatgcgcactggccggaactcgcgcgttgtgtggtcaatttagaggcccattctagatcactgggatatgcgcactggccggaaccgccctgctgctgggccttgatcgttgtccattctagatcactgggatatgcgcactggccggaactccacgtcaatctgattggcgcggaacagcattctagatcactgggatatgcgcactggccggaacacgccctgaacgtgacgattcaacgattgaattctagatcactgggatatgcgcactggccggaacatgaccacggggtcgtcaccctcggcgatcattctagatcactgggatatgcgcactggccggaactcagcggcaacgccatacaaaacccgctcgattctagatcactgggatatgcgcactggccggaaccaacgtgttgtttgcatgcaaattagatgtattctagatcactgggatatgcgcactggccggaacggatgtccggcacgtggaacgatggggcgaattctagatcactgggatatgcgcactggccggaacgtgtgggatgagctgcccacagcgccggaaattctagatcactgggatatgcgcactggccggaactgagtgaaatccaaaccgcaatcgtcggcgattctagatcactgggatatgcgcactggccggaacccttgccgcgcccgcccttccgccgcaaaattctagatcactgggatatgcgcactggccggaacgctgagcacgatatgccccaggtgctgtccattctagatcactgggatatgcgcactggccggaactagaggctgctgcacgagccgcgcggcgggattctagatcactgggatatgcgcactggccggaacggggctttgatgtacgtctcggcgtagatgattctagatcactgggatatgcgcactggccggaactcaacggtaatgtgcacgcgcgcgggcaggattctagatcactgggatatgcgcactggccggaactcgcaaccctctacacgtcggctacgcaaattctagatcactgggatatgcgcactggccggaactcgcgttcgcccctctgggatggcgcgccgattctagatcactgggatatgcgcactggccggaacacatttgtgaagcactttggtgcttacacaattctagatcactgggatatgcgcactggccggaacgcaggtacttctggtagatcgcgcggtcgaattctagatcactgggatatgcgcactggccggaacaatgggcggcgctcaatggaaagggtttgcattctagatcactgggatatgcgcactggccggaactgcgccagcgtgaacccgccgcccggctggattctagatcactgggatatgcgcactggccggaactgctctcgagcatcagtgttccaacggggtattctagatcactgggatatgcgcactggccggaacgagcgagggcgctgcaatgaccttctactcattctagatcactgggatatgcgcactggccggaacgccaaaaggtcaatggcggatgcgggttgcattctagatcactgggatatgcgcactggccggaactgctcatccttcttggtctgctctgctgccattctagatcactgggatatgcgcactggccggaacaccgccaggacgcagaggcgctctcgtcgcattctagatcactgggatatgcgcactggccggaaccatcgcaaaaggcgatggcggcggaaatcgattctagatcactgggatatgcgcactggccggaacccacgagctcggcgtgtgccacggccgcccattctagatcactgggatatgcgcactggccggaactagagcggtgtttccttgcgcttgagcctgaattctagatcactgggatatgcgcactggccggaacggccgagctgttgacccgccagcccggcagattctagatcactgggatatgcgcactggccggaactaggccaggtgcaggcgccaggtggccatgattctagatcactgggatatgcgcactggccggaacgggtgcgagatagagggccatgtgtgctccattctagatcactgggatatgcgcactggccggaacaaggccacacgtgccgacagacgtcggctgattctagatcactgggatatgcgcactggccggaacatgcgcaagcagatcctacggtgtgacctgattctagatcactgggatatgcgcactggccggaacaggggatgatgattgacatgagccctgtggattctagatcactgggatatgcgcactggccggaactgcgcggccttcatggcctcgcgtgccgcgattctagatcactgggatatgcgcactggccggaacctgctggttgtagtctcgccgcccccacaggattctagatcactggggggcacctctaaaaacccacgatttccgcgccgatgatgcgcgcaaccgagctcgcgtttagcaatgcctattttttaggcaaatccggcgtgttttgggcgttttcatccatttttcccccgctcctcacgcattcgccgttttcaggcgtgtctcgctctttgatgggctggtggccgccttgtagaacgcatccaccccgtccttgaggaaaccggccaggcgcttgaggttgtagcaagtggccatcatggtcatggctgccgtcgccctggcctgtccaatggtgcggatgagcttgccgcccatgtgctgtatctgcgcaaaggggtgttccacccgcgcacgggtgcgggcaatgcgggtgttgcgtttcttttggcactcgctcaacggcttgccacgctgggccttgcgctggatatgttcgcggtaacccagggccttgagcatttcactgcgcgctgcgctggggtagcccttgtcggcatacacatcccggctggtgttgccatcgtcgagcacctcgtcaaagtgcgtgctgtcgtgctcgctggcggtgcccgtggtgatcttgcggatgaacttgtggcggacgtccacgccgatgctcagcttgtagccgtggtagctcttgccgtgtttcttggtgtgcgtggcgtccagatccttttgccggcgtttggctgggctccagtcgctgggcacctggccctcatcgagcagcgccttctcctgcttggtgaagtgctggatgggcgcgggtaccagggtggcgtcgatgatctgcccgcggcgggcgatgtagccatggcgcagcagctgcgcgtctgtggcctgaaacagcgccgtcgtgccatcaacgcccaggcgctgctggtagtgccagatggtgttgcgatcgggtacgttggcgctgtcagagagcaggcaaaagcgttggaagctcatgcgatcgagcagttggtactccacctgttcgtccgacaggtcgttgaggtacttaagcaccaggatgcgcaccatgaccgcggtggggtatggcgggcgcccacccttgcgggtgtcggcccggggacacaggccatcaatgacgcccgccaggtggtcaaagtcgatgtgtttggcgatgacctgcaacgggtcgcccagcgcctcgatcttgcgttggcgtgcctggtcggcgaacaggtcgaacttgacggcgctgcgcgtgcaaggttggttcatgaggggaattgtcgggcctgttgggtggcaatgaggacaactatggggggtttttagaggttccctgggatatgcgcactggccggaacctggctgactgtgactcgcacgcccggcgaattctagatcactgggatatgcgcactggccggaactgggtatcgccttcggtcggattgagcttgattctagatcactgggatatgcgcactggccggaacagcatcccgcttgaaatgcgtcaacccaccattctagatcactgggatatgcgcactggccggaacctggaacaatatcatctccctttctgatcaattctagatcactgggatatgcgcactggccggaacatgtccggccgttcgcccgtgccagacataattctagatcactgggatatgcgcactggccggaacaagggcacggtgcaggccgaagagctgcgcattctagatcactgggatatgcgcactggccggaactttcatcgcctgcaagcccgcgacgagctgattctagatcactgggatatgcgcactggccggaacacccaggccgcatggaagaaggccctggaaattctagatcactgggatatgcgcactggccggaaccatagagcaccaccaatccagcattgatgaattctagatcactgggatatgcgcactggccggaacacacgtgggagcgtgccaatgccttcctgcattctagatcactgggatatgcgcactggccggaacaggcaggcgtagcccttgccgatggcgtccattctagatcactgggatatgcgcactgatttgaaaggtttggatctatgtcgagctgtgaatagggagttgaatgattcaaatatttgcggtttattcgcctggggatggtgttggtattgagggtatgattgttaaaattataggttgtaaatatatttactgaaatttccaaaggctgtgcgatgaaccttgcattgtcggacccattcacatacacgactttcccacgcgcgccagtgtggtcgccaccggcaggcactgcagcacgcctgtgagatgcatatttgccgtatcttgatcgtgcctgtggaactggcgctggcgcacattgggcacagcgcggcagatatatgccggaaagtacctcacgtgttgaggtctggcttgccgggtgccatctccaactgcatcatggccatgttgaccagcgtgttcaccgtgggccggccggtctctatgacgtagcgcgcggtctcgcggtacagcgggtcgcggtcgcggtagagctcgcgcaggcgggccagggggtcggccacctgcagcagcgggcgcgtgcggtcgtgcttgatgcgccggaagatctcctcgggcgaggcgcgcaggtacatcacgtgggggaagctgcggcgcagggcctcgcggttctccgggcgcagcacggcgccgccgccggtggacaggatcatgccgccgggctcgtcggccagcgcggccagcagggcggactcgtggtcgcggaaggcctgctcgccgtgctgctcgaagtagttgcggatgctggtgcccagctgctgctccagccgctggtccaggtcgatgaagggcagccccaggcggcgggcgagctgccggcccaccgtggatttgccggaaccgggcatgcccaccagggcgcaacgcgtttgcatgcttgaattttcgtaggggaaggcggcgagtgtaaggcgcgctgtcggcctgcgccgacacccggagcccgtggccgtgcgcacaatcgggccatgccttcatccatgcagaacctgaaccagggcgcccggcgcctgatgcagcctgcggcgccgctgctgcgcgccgtgcagctgtggctggacgcggagggcctgcgcatgagcgccgccatgtcgttctacggcatgctgagcctggcgccgctgttgctcctgctggtgggcgtgctgggctggtgggtcgacaaggcctatctggagagcagcctcatcgcccaggtgcagggcgtgatgggcgagcgcggcgccgaggtggtgcgcatggcgctggccagcgccaaggcgccggcgcagggctggctggcctccatcgcgggcttcgtgctgctgctctcgggcgccacgggcgtgttcgcggagctgcagtcggcgctcgcgcggctgtgggtccatggccgggccgcgcccgagcgcaagccatggtggcacatggcgtcgctgcggctgcgcgggctggcctat

SEQ ID NO: 1831 - DNA, 23081 bp, synthetic construct
  misc_feature 1..23081: note = Synthetic
  source 1..23081: mol_type = other DNA
ggcaccgtcttggtcgccgccaccgcggcctgcgccgtgggcgtggcgatgccgacgatggcgtccggcttgtcgccgacgaacttgcgcgcgatctgcgccgccgtgccggtgttgccctgcgcgctctggtactgccacttcaggttcttgcccgactcgtagcccgcgtccttcagcgcggcctgcacgccgtcgcgcacggcgtccagcgccgggtgctcgacgatggccagcacggccaccgacttttcctgcgcgctggccggggccaccgccgccatggccagcgccacggcacccaagggcatccacgcccactttgtcaactgcttcacctgcgaacctctttgcgtgtgtaaggatggaatgggccggccgcgccaccctgtcgggcgcgcggccggtggggcaagtctacgccagatcgcgcgccgccgctttcaagccaaatcggcctctggcccttatggaacaagcgccagaagctatcatttttacatttcggagtagttgggcccgccgccgccctcgggcgtgacccagacgatgttctgcgtcgggtccttgatgtcgcaggtcttgcagtgcacgcagttctgcgcgttgatctgcaggcgcatggcgccgccaccctgcccctcgtcgggcacgaattcgtacacccccgccgggcagtagcgcccctcggggccggcgtactgcggcaggttgatgcgcaccggcaccgtggcgtccttcagcgtcaggtgcgccggctggttttcctcgtggttggtgttgctgatgaacacgctggagaggcgatcgaaggtcagctggccgtcgggcttggggtagtcgatgggcttgaactggctggcgggcctcagctgcacgtgatcgggctgcttgcgatgcaccgtccagggcatgtggccgcgcagcgcgtactgctcgaagccgttcatcacggtgcccaccgtcaggcccttcttgaaccagttcttgaagttgcggtccttgttcagctcgcgcgccagccagctggcctcgaaggcctcggggtaggccgtcagctcgtcgccctggcggccggccagcacggcatccaccgcggcctcgccggccagcgcgccggtcttcatcgccgcatggctgcccttgatgcggccgacgttgaggtagccggcgtcgcagcccaccagcgcgccgcccggaaacaccgtcttgggcagcgccagcacgccgccggcggtgatggcgcgcgcgccgtaggacaggcgcttggcgttgaccttgccggcgttgtcggtgaagtaccacttgatgcgcggatgcgtcttccagcgctggaattcctcgaacggactgaggtacgggttgctgtagttcaggccgatcacgtagccgcaatagatcttgttgtcctcggcgtggtacatgaaggcgccgccgtaggtcatctcgtccatcggccagccggcggtgtgcatcacgaagccgggggtgtggcggctggggtcgatttcccagatttccttgatgccgatggcgtagctttgcgggtcgctgtgctcgtcgagcttgtagcgcgcgatcagctgcttgcccaggctgccgcgcgagccctcggcaaaaatcgtgtacttgccgtgcagctccatgcccagctggaagtggtcggtcggctcgccgtccttgccgatgcccatgttgccggtggccacgcccttgacgctgccgtcctcgctgtagagcacctcggcggccggaaagccggggaagatctccacgcccagttcctcggcctgcgcggccagccagcgcaccaccttgcccaggctggcgatgtagttgccgtggttgttggcaaaaggcggcaggaacatgttgggcacgcgcgtgccgccggtctcgttcaaaaagacgtaggcgtcctcggtcaccggctggttcaggggcgcgcccttttccttccagtcggggatcagctcggtcaaggccttggggtcgatcacggcgcccgacaggatgtgggcgccgggctcggagcccttttcgagcaccaccaccgacacgtcctggcccttttcggccgcgcgttgcttgatgcggatggcagcggacagaccggccggcccggcgccgacgatgaccacgtcgtactccatggactcgcgggggccgaacttctggatgatttcctcaggggtcatgggcatggaagactcgcgtttgaaataatggaaacccgggggccagccgaagcgcccagcgcgcgccggcccatccatcgattctatgcatcgccgcgggcgcctcgaacgccccggtttgggagccaggctcatgagctatcacatcgatctgtcgggccgcgtggccctcgtcaccggcgcctccagcgggctgggcgcgcagttcgcccgcaccctggcgcgcgccggcgccggcgtggtgctggccagccggcggctggaccagctcaagaacctgcgcgcgcgcatcgagggcgacggcggcgacgcccacgtcgtggagtgcgacgtgaccgacgtgcagtccatcaaggccgccgtggcgcatgccgagaccgagatgggctcgatcgacatcctggtcaacaactcgggcgtgtccaccacccagcgcctgcaggacgtgagcgaggacgactacgaccacgtcttccacaccaacgtgcgcggcgccttcttcgtcgcgcaggaggtgggcaagcgcatgctggcacgcgcccagggcgcggcgccgggcagcttcaccggcgggcgcatcatcaacatcgccagcatggccgggctgaaggtgctgcccaagatcggcgtgtactgcatgagcaaggcggcggtgatccagatgaccaaggccatggcgctggaatgggggcgccacggcatcaacgtcaacgccatctgccccggctacatcgacaccgagctgaaccgccaccactggcagaccgaggccggccgcaagctgatcggcatgctgccgcgccgccgcgtgggcacgcccgccgacctggacgcggtgttgatgatgctggcctccgacgagagccacttcgtcaacggcgccatcatcagcgccgacgacggttttgcggtctgatggggcgccagcgcccgtccagcaagcgccgacagcaatcatttcaatagcatcgtccaacaacaaaccctgatgaagatcgaccttcccgaacagaaaaagctcgtccacgagatgctcatccccatccgctggggcgacatggacgccatgggccacatcaacaacacggtctacttccgctacatggagacggcgcgcatcgaatgggtcaacgccatgggcctggcgccgcggccgggcggcgaggccatcgtcatcgtcaacgccttctgcaacttcatccgccagttcgaatatcccggcgaggtgcgcatcaagaccttcgccagcaaccccggccgcagctccttcgacacctgggccacgatggagcgcaccgacgaccccggcaccgtgtacgccagcggcggcgccaccatcgtgtgggtcgacatggcggcgcacaagtccgcgccgctgcccgagtggctgcggcgggccgtcgagccggcgccggccgagtgaatggccgagcgccccggcagttcaggcacagtacccgtcatgacagcaacctccctcccccacccctacgaagacctgatgcgccacgtgcaggcgcacggcgtgttcaaggccgaccgcacgggcaccggcaccaaaagcgtgttcggccaccagatgcgcttcgacctgtcgcagggctttccgctggtgaccaccaagaaggtgcacctgaaaagcatcatttacgagctgctgtggtttctgcgcggcgacggcaacgcgcgctggctgcaggagcgcggcgtgacgatctgggacgagtgggccaagcccgacggcgacttgggccccgtgtacggcgtgcagtggcgcagttggccgacgcccgacggcggccacatcgaccagatcgcgcaggtggtgcagcagctcaagagcaaccccgactcgcgccgcatcatcgtgagcgcctggaacgtggccgagctggatcggatggcgctgatgccctgccacgcgttcttccagttctacgtcgccgatggcaagctgagctgccagctctaccagcgcagcgccgatatctttctgggcgtgcccttcaacatcgccagctacgcgctgttgacgcacatgctggcgcagcagtgcgacctgcaggtgggcgacttcatctggaccggcggcgactgccacatctacagcaaccacgaggcgcaggtgcgcgagcagctgagtcgtgcgccctaccccccgccgcagctgcacatcaagcgccgtccgccctcgatcttcgactacgagtacgaggatttcgaggtgcgggactatcagcaccacccggccatcaaggcgccggtggcggtgtgaattttgatccaatcggcctgcagcgcttgcgcaacaagcgcgggcagctatcaactttgaagcaaccgaatgactgacctgctttccctgtaccgcaccatggtgcgcatccgcgccttcgaggacgcggccgaagtcgccagccagggcggcgtggcggcctggggccatgccgcgtccgacaagccggcattggtgcgcggcccgctgcacctgtccaccgggcaagaggccgtggccgccggcgtgtgcgcgcacctgacgcccgccgacctgctgaccagcacccaccgcggccacggccacacgctggccaagggggccgacccgacccggatgatgtgcgaactgttcggccgcgccagcggctacaacggcggcaagggcggctcgatgcacatcgccgacttttccgtcggcatgctgggcgccaacggcgtggtggcggccggcctgccgatcgccgtgggcgcggcgcaggggctgaagattcgcggccaggacgccatcgcggtgtgcttcttcggcgacggcgccatcaaccgcggccccttcatggaggcgctgaactgggccgtggtgtaccagctgccggtgctcttcgtgtgcgaggacaaccgcatctcggccaccaccgaaagcgccgccatgacggccggccccggcgccagcgcgcgcgccgccgccatgggcatcgcggccgtgcaggtcgacggcaccgacgtgcaggccgtgagcgaggccgccggcgcgctgattgccgacatccgcgccggccacggtccgcgtctgctgcacgcgctgaccgaccggcacaagggccacgtgtcggtcgatccaggcctgtaccgcgaccccgaggccgtggccgccgccctggcccgcgacggcttggcgcgcacgcgcgcgcgcctagtcgaacaaggccacgtcgcgcaggtcgaacagatcgagcgcgcggcccaagccgagatcgacgccgccgtggccaccgccacggccgcgcccttgccggacaagagcgcggcctacaccgacatccagaacgtgggcgaaggagtgtgggcatgagcgccgtgcagatgacttatgcgcaggccgcggcactcgcgctggcgcaaacgatggacaagaacccccacgtcatcgccctgggcgaagacctgggtcgcggcggcgtgttcggccagtaccgcgacgccgagggcgcgcccctggtgcagcgcttcgggccggatcgcatcatcgacacgccgatctcggaggccaccatcgtcggcgccgccgtcggcatggcgctggccggctgcacgccggtggtcgagctgcgcgtggtggatttcgccctgtgcgccatcgacgaggtggtcaaccaggccgccaagaaccgctacatgttcggcggccagggccgcgtgccgatggtgctgcgcatgccgatcggcatctggtcggcgtcggcggcgcagcacagccagtcgctggaggcctggttcgcccacatccccggcctggtcgtcgtcgcgcccgccacgccggccgacaaccacggcctgctgctggccgcgctggcctcgggcgacccggtggtctacatggaacacaaggagctgtggggcgtgccgggcgacgtggtgccgggtgaagtggtgccgctgggccaggcgcgcatcgcgcgcgcagggcgtgacgtgacgatcgtctcgtggtcgcgccagctgcaggcctgcgagcaggcggccgagcagctggcggcgcaaggcgtgcaggtcgagctgatcgacctgcgcaccatctggccctgggacaaggcggcggtgctggccagcgtggccaagaccggccgcctgctggtggtgcacgaggcgatccgcgccgccggcttcggcgccgagatcgccgccacggtggccgaggaaaccggcgcgcgcgtggccagactgggcgcgccgcgcatcccggtcggctacgcgcccacgctggaggccgaggcgcgcgtcagcgccgcgcacatcgtcgccgcggcgcacaagctggtcacatgacgcacccgcgcatcggcctgatctgggcgcaggcgcgcggcggcgtcatcggccgcggcggcgtgatgccctggcacctgcccgaagacctggcgcacttcaagcgcgtcacgcagggccacccggtcatcatggggcgcaagacctgggactcgatcccgccgcgctttcgccccctgcccgggcggcgcaacatcgtcctcacgcgccaggccgatttgaatgaaacaggctttgagccggtgtccagtctgcgcgaagcgctacaactttgcgagaactcggcacatgtctggatcatcggcggcgcgcagatctacgcccaggcgctcccgctggccgacgagctggtggtgaccgagatcgacgccgacatcgccggcgacgccttcgcaccggccatcggcgccgactggcgcgagctggcacgcgagccattcgcctccagcaccgggctgcgcggcgccttcgtcacctggcggcgcgcggccgcatcatcacctgaacgccccgaccggccgaccgagccatgaccgcctccgaccccgccttccgcaccctgcccgagctgatcgccgagcacgcacgcctgcgccccggccaccccgccctgcgctgcggggacgaaaccctcagctacgccgtgctcgacacgctgatggaccgcatcgccgccacattgcaacgcgatggcgtgcagcccggccagtgcatcgccgtctgcgccagcccttcggtgcgctacgccgcgctgttcatgggcgcgctgcgtgccggcgtggcgatggcgccgctggcgccttcggccaccgccgaggccctggcctcgatgctgcgcgacgccggtgcgcgcctcctgttcgtcgacaccgaggccgcgccgcgcctgcccgcgcccgagccggcgctaccgcgcatcgcgttggacggcgccgccgccggccgggcctttgacgactggctggcgcccgccggcacgcgcccgcagcccgtggccatcacgcccgagacgcccttcaacatcatctattccagcggcaccaccggcacgcccaagggcatcgtgcagtcgcacggcatgcgctgggcgcacatccgccgcggcgccacctacgactacggcccgcacggcaccacgctgctggccacaccgctgtactccaacaccacgctggtggtgttcgtgcccacgctggcctacggcggctgcgcagtgctgatgcccaaattcgacgccctgcactacctgcagctggccgagcaatatcacgtcacgcacaccatgctggtgccggtgcaataccagcgcatcatggcgctgccgcagttcgggcagttcgacctgagcgcctttcgcaacaagttctgcaccagcgcgccgtttcgcgccgaactgaaggccgacgtgctggcgcgctggccgggcggcctgaccgagttctacggcatgaccgagggcggcggcacctgcatcctcgacgcccaccggcaccccgacaagctgcacaccgtgggccagccggccgtgggcagcgacatccgcctgatcgacgaggccgggcacgagctgccggctggcgaggcgggcgaggtggtgggccactcggccggcatgatgaccggctatcacggccagcccgagaagacgcgcgaggccgagtggttcgacgccacgggcaagcgcttcatccgcaccggcgacgtcgggcgcttcgacgccgacggctttctgaccctgatcgaccgccgcaaggacatgatcatcagcggcggcttcaacatctaccccagcgacctggaagcgctgctgcgccagcaccccgccgtgcacgacgtggcggtggtcggcgtgcccagcgcgcagtggggcgaaacgccggtggcctatgtcgtcgccaatgccggcgccgacgcgacggccgccgagctgaaggactgggccaaccagcgcgtgggcaagacccagcgcctggccgacctgcgcctggtggccgagctgccgcgcagcgccatcggcaaggtgctcaagcgcgagctgcgcgaggcctacggcgccgcgcgctgaccgtcaggcacgcctcaaagcttgatgcccgcgatgcggaccagccgcgtccagcggtcggtttctttcgagacgtagatcgaatacacgctggagccctgagccggaatcgtgaagccgttgggctccatgtacttcttgaccggcgcgctggccatcaccttggccagctcggtctccagccgcgccacgacggccggcggcgtgcccttggccaccgagatgccggaccaggacacggcctcgaagccgaggtagccggcctcggacatggtcggcacgtcgggcagcaggttgctgcggcccttgctgctgacggccagcgccttgagcttgccgtccttgatcagccgatgcgccgcatcgacgttgatgaagatggcgtcgacgccgcccttgagggccgcgtccagcaagggcttgccgccgctgaacgacacgcccttgaacttgccgccagtgcacaggttctcgcccttgccaatcgcaaagcaggtgcgctgcatctggatcatcagctccatcgccatatggcccgaggccgccggcgtgtagccgtaggtgacgccggggccggtcttggcggccgccaccagttccttcacgctctggtaggggctgtcgggcttgacgaccagcacgttcgccccttcgtgcacctgcgtgaggtggatgaagtcgcgcgacgagtcgtagcccacgttggcatccagcgcgtgcgccaccgcgttctggccgatgcccgactggatcagcgtgtagccgtcggccggccgcttgagcgcctccagcgtgcccttcaccccgccgccgccgccgatgttctcgaccttgatgggctggcccagcgccttttccagctcggtcgccaccaggcggcccatgacgtcgctggtgccgcccgccggaaagggcacgaccagggtcagcggcttgctgggccaggccgccgactgggccacggccgccgtcacggccatcagcagcgaggcgccgcaggccagcatccgcagtgcatgtctcatcttcgacctctcgtctcgcgaagccaccgaaccggaaatcgtcggccaagattcgctccgcaatcttattaccaatgtattgttttgtagcattctcaatcgctgcacgagacgttttgttggctgcaaccgacaatggggtttggcgcggcagcggcaggagcgtgtcgcacgggaagcttgcaacgcaagccgttgacttggtgaccggcggacccgcccagacgagaagctgccgcgaaaagacgaaaggccgcatgtagcggcctttccatttggtgcatctttcagcttgttagcgtccagagcgcatttcccaatcgtgtagtgcgagtcatcatagcacaacgtgttacaaaccagtcagacttcgattttgcctggagggattcatgggaacgatgcgttatcggctggcactggatttgggcagcacttcgctgggttggtcgatggtgagactgaaggaggaggagcccgtcgccgtcatcaaggcgggcgtgcgcattttcagcgacggacgcaaccccaaggatggctcgtcgctggccgtcacccgacgcatggcccgcgccatgcgaaggcgccgcgaccgcctgctcaaacgcaagaaccggatgatggccacactgctccatcacggcttctttcccgcagaacccgccgaacgcagggcactggaacggctcaatccctacgaactgcgcgccaaggggttggacgcccaactcaccccagccgaattcgctcgcgcgctgtttcacatcaaccagcgccgtggcttcaaaagcaaccgcaagaccgacaagaaagacaacgacagcggtgcactgaagaccgccatcggcgcgctgcgccagcaactcgaagccagcggcgccgatggaaaggcacgcacggtgggcgagttgctctggcggcgcatgaaagacgggagcggcgtgcgcgcccgctaccgcgagcgccgcgtcgagaaggaagacggcaagacccgcatcgacaagagttacgacctgtacatcgatcgcgcgatgatcgaggccgagttcgacgccttgtgggcgagccagacgcgattcaacaccgctcaattcaacgaggccgcgcgcagcgctctcaaggattgcctgctgcaccagcgcccgctcaaacccgtcaagccggggcgctgcaccctgctccccgatcaggagcgcgcgccgctggccctacctagccaacagcgttttcgcatctaccaggaagtaaaccacctacgcatccttggcgcgaacttggccgacacaccgctgacgcgggtgcaacgcgacgccgtggtcgacgcgctggaacgcaacggcaagcgcagcttcaagcaaatcgtcgccttgctcaaactcccgggcgacacgcaattcaacctggacgacgccaaacgccaggagctcaagggcaacgccaccagtgctttgctcggcaagaaggattttttcggccctgcatggttcgacttccgcgccgaacggcaggacgccatcgtcatgcgtctcctcactgaggaaagcgaagcggcgctcgtggattggctgcaaaccgaattcaagctggacgaagcgcacgcgcaaaccatagccaacgccagcctgcccgagggttatggcagtctcagcgcacaggcactcgtgcgcatcctgcccgcgctccagagcgacgtgatcacctacgacaaggctgttctactggcaggtttcgatcaccacagccacatcagccatgcggcaaccaccggagaaatcctgccgcaactgccctactacggggaatacctggagcgccacgtcggtttcggcagtggtgacctgaacgacccaccagaaaagcgattcggcaagatctccaatcccacggtccacatcggcctcaaccaaactcgtaccgtagtcaacgggctgatcaaacgctacggccacccgagcgaagtcattgtcgaagtggcacgagacctcaagcaaagccaggagcagcggaaggaagagcatcagcggcaggccgacaatcaaaagcgcaacgaccgcctgcgcgccgatgccgccgccatcttgcacatcgcgcccgaacgggtgcgccacaccgacatccagaagctcatcctctgggaagaattgagtcgtgacattgccgaccgccgctgcccctactccggcgtgcagatcagcgccgccatggtgctgtccgacgaggtggaaatcgagcacatcctgccgttttccgtcacgctggacgacagcctgaacaacaagaccgtggccatgcgccgcgccaatcgggtcaagggcaatcgcacgccgtttgaggcacgcgcggacttcgagcagcagggttggaactacgacgccatcctggcgcgcgcggagcacatgccgcgcaacaagcgctaccgctttgctgaagacggccaccagaaatggctacgcgaagatcaggattttctggctcgcgccctcaacgacacgcgccacctgagtcgcgtggcgcgcgagtacctcagcctgatttgcccgcaagccacgcgcgtgattcccggccagatgaccgccatgctgcgcgccaagttcggcctgaatgacatcctgggtttgagcggagaaaagaaccgcaacgaccaccgtcaccacgccgtggatgcttgcgtgatcgcggtcaccgaccaaggcttgctgcagcgcttcgcgcaagccagcgccagcgcgcgcgaacgacaactcgatcggttggtcgaaaacatgccgctaccgtgggaaagctaccgggaacacgtcgcgcgtgcgatcggcaatatttgggtgagccacaagccggaccatggacatgaagctggatttgccgatgaaactacttaccggccaccacacctggacccacagggtaggtggcgaacacgcggcataggcggaaacaatcccaatgagcgtgctgcagacgctcccatgatcgccatctcgggaccgccacgagcagacagtcgccacctggctaacgaaaacgggcaacccctgccatacaagggttatgtcggtggcagcaattactgcatcgagatcacacggaccgacaaagggaaatgggaaggcaacgtcataccaaccttcgacgcgtaccggatttgcagtaccaagggtccgactcagttgcgtcatccgatgcgcgggcaaaacggagcgcccctaatcatgcgactggtcgctggcgacagtgttgctgtcgagaaaaatggttgccgtattgttttccgagtagtcaagatgcgcgcaggtagaaatcagatcactcttgtcggagtaacagaggccaaccatgcagaccggatgagtgcgaaagacgccggcctaatacaacttcaagaccaatccgcaactgccttgtcgaaactgcgagcccgccgcgttacgatctccccgatcggcgaactgcgtgacccggggttcgaggagtaaggatcatgctcggccgcatcgtggaagtggccgacgatcggcgccacctgtttatgcaccgcggcttcatggtggtgcaagacaccgaaggcgagcgcaaggaactggggcaggtgccgctggacgacatcgcggcggtgatcgccagcgcgcacggcctttcctacaccaacaacctcctggtagcgctggccgaacgcggcgcgcccttcgtactgtgcgcggccaaccacaacgccgtgggcatgctgctgccgattgaaggcaatttcgagcagtcaaggcgcatcgaagcacagatcgcggccagtcagccgatccacaaacgcctgtgggccgccgtggtgaggtccaagctggagcagcaggcggcggcgctggaggccacgggcgcggtcactgcgccgttgctggccctggcgcgcaaggtcaaaagtggcgacccggacaacatggaggctcagggcgcacgtcgctactggagcttgctgttcggcgatgacttccggcgcgaccagaacggcggtggacgcaacgcgctgctgaactacggctacacggtgctgcgtgcggccaccgcccgcgccgtgattgccgccggcctgcatcctggcatcggcctgcaccacagccacgacaacaacgccatgcggctggtggacgatctgatggagccctttcgccccatcattgatctgaaggtctggcaactgtggcgcaacgaagaacgcgaagtcacgcccgaagccaagcgcgccctggtgcgcaccctgtacgacgacatgcaaagcgacatcggagccacgccggttacggtctgcgtccagaaactcgctacctccattgctcagatctatctgggtgatcgcgacaaacccgacctgccgctaccgggcctaccgctggccctggcgaactcactgcaggatgaatgatgacgcgtgaggtgtctccatgctcacgggctaccgcctgatgtggatggtggtcatgttcgacctgcccgtggtgctcaaggccgagcgcaaggccgccacggaatttcgcaatgccctgctcgacctcggcttcgagatgagccagttcagcgtgtatatgcgcatgtgtaccagccccgttcaggtggacacgtactgcaagcgcgtggaagaagccttgccccaaggcggcaaagtcaatatcctgcagttcaccgacaagcagtacgagcgcatcatcagcttccacgggcaggcacggcaaccggccaacaaaacgcccgatcagttcgaccttttctgactccgatacatgctttcgcaagcatcaaaagcgaaaaaccctctgaaaaatcagagggttgtcgctgtccgagtctagacgattgggaaatgcgctctggccggaacccgggcgggattacgaagccgctggtgatcagtctagacgattgggaaatgcgctctggccggaacgacttcacgagatttatggcgacgttgatgagtctagacgattgggaaatgcgctctggccggaactagcgcgccacaccgatcgtgaagcgcactagtctagacgattgggaaatgcgctctggccggaactcgcggcatgtccctgcgcgagctggcccgagtctagacgattgggaaatgcgctctggccggaactggcgggcgatcggtatcgtcgtggcggcgagtctagacgattgggaaatgcgctctggccggaaccacttcgccacagcccagtcaagctgggcgagtctagacgattgggaaatgcgctctggccggaacgacgtgatcagcaagatgttcatggccgccagtctagacgattgggaaatgcgctctggccggaacatggacaggccgtccatggtgccgtgcttcagtctagacgattgggaaatgcgctctggccggaacgcgaaggccaagagacaggcaccgagggttagtctagacgattgggaaatgcgctctggccggaaccggcggtgcgaatctggtgcgccagcgcctcagtctagacgattgggaaatgcgctctggccggaaccacacgccgaagctgccgacgatggcatcgagtctagacgattgggaaatgcgctctggccggaacctcttgcagctcaagctgaaattccacggcagtctagacgattgggaaatgcgctctggccggaaccacgcggtgatgcaagtaatcagggcgtcgagtctagacgattgggaaatgcgctctggccggaactaaagtgggtagctgttgtcgctggtattgagtctagacgattgggaaatgcgctctggccggaacagcggcaaccggccgattgccacctgcgagagtctagacgattgggaaatgcgctctggccggaacagaccggcatcgccagcccgcaaatggtcgagtctagacgattgggaaatgcgctctggccggaacccgcatgcccatcgcccacgccagccagatagtctagacgattgggaaatgcgctctggccggaacgcatggcggtaggcccgaaggcctcccaccatgcgtggcgcctaaaggcgctttggttgaccaagagaatgccccttgtgccatgaccatggttttcgcgaaacgcgcaaaactcgaaatacatcctgctctcacaatggccccattcacaatccatgaaagggccacatgtcatgaatgcagcattcaaggtgggcgagcacgtgagctggaattcggaggccgggcgggtcagcggccacatcgtcgccgtacaccaccaggacttcgactggaagggctacacccaccacgcgagcgcggccgacccgcagtacgagatcaagagcgacaagaccgagcacctggcggtgcacaagggccgggcgctgcggcgcatcgaggagtgaaaggctgaggccatggcccagcgcctgccctacttcaccatcggccattccaccctgagcgtggacgaactggccgcgcgcctgcacgccgccggcgtgacgcgcctgatcgacgtgcgcaccatccgccgctcgcgcagcaacccgcagttcaacgaaggcacgctgccgcaggcgctggccacgcagggcatcgcctacgaggccatggcggatctgggcgggcggcgcggccgccagcgcgcggtggcgcccgaggtcaacggcttttgggacaacgccagctttcacaactatgccgactgggcgctgcagccgccgtttcgcgccgcgctgcaggagttgcgcgacaagggccagcgcgagcgctgcgccgtgatgtgcgccgaggccgtgtggtggcgctgccaccgccgcatcattgccgaccacctgctggccgcgggcgagacggtgcgccacatcatggacggccatgtggtcgacgccacgctcaaccccggcgcgcgggtgcaggccgacggcacggtgagctacccggcgtccaccaccggcgggggctgatcgccacccggtttgccgccatgcacgaagggcggccgcgccagccataccacgccgatcagcagaaagcacatcagccccagcccgttcatgacctggttgaacgagatctgcagcgcctgctgggtgatgatctcgttgaccgtgcccaggtagcgcccggcgccgccggccgccgccatgccggcgcgcacctgggcgtcgaaggggttgatgtgctcggccaacaccgcgtgctggatcgccgcgccgcgcacccacaggtaggtgacgatggagacggtgaagctggcgcccacggtgcgcatgaaggtggccgagcccgagccctcggcgatcgccggcccttccagcggggacagcaggatggtcagcaccggcagaaagaagatggcgatgccggcgcccatcatcagctcggtcagcgccaccacggcaaagctgacctgggtgtcgaagctgccgaagcgcaggcacaccgtgcccatgacggcaaaggcgatggcggccagccagcgcaggtcgacgcggtgggcgtaccggccgacggtgtaggccgtcaggatcggcaccacgcccaccggcgccgccgccaggcccgaccacagcggcgtgtagcccagcacgtgctgcagccactgcggcagcatcagcgcgaccgagaacacgaccgaaaaacccagcaccagcgccagcgtgccggcggcgaaattgcggtgccgaaacaggcgcaggtcgaccaggggctggtcgtcggtcagctcccagatgacccacaccgccagcgccaccgaggcgacgatggccagtaccacgatggtgctggactcgaaccagtccaggtcgttgcccttgtccagcagaatctgcagcgcgcccacgccgagcaccagggtggccacgcccacccagtcgatgcgctcgcgcaccggcgcctcggcgcgcgcgtgcagctgcgcccacaccagggcgctggccagcaggcccagcggcacgttgatgaagaagatccagcgccacgaatagctgtcggtgatccagccgcccagcaccggcccgatgatgggcgccaccaccgtgatcatcgagatgatggacagcgccacgccgcgcttgtcgcgcgggtagatctccaccatcaggctttgcgtgatcgggtacatcggcccgcacaccgcgccctgcagcgcgcgaaacaccaccagcatgcccaggctggtggcaaagccgcacagcagcgaaaacagcgagaacagcagcacggcgctgatgaacagccgcacctcgccgaagcggcgcgccagaaagccggtcatcggcagcgtgatggcctggcacaccgtgaacgaggtgatgacccaggtcgactggtcgacgctggccgacaggttgcccgcgatggtcggcagggacacgttggcgatcgtcatgtccagcacctgcatgaaggtgcccagcgacagacccagcgtggccagcggcaggctgggcgggcgaaagcgctcgggcggcgcgccggcgatcgcgaggctggccatggcgcgtcccttcagtgccgtgccgaagccgccgggtgcgccggcgccgcgccgtcgttgcgcgcgatgatggcggcgatcaggcggtcggcctcggccgggtcgctgccgtacacgtcggtgctcagtgccggctggctgggcggctcggtggccagggtgggcagcgactgctggtgcaggtccacgctggcttccatcgacaggccgatgcgcagcgggtgcgcggccagctcgtcggcctgcagggtgatgcgcaccggcaggcgctgcacgatcttgatccagttgccggtggcgttttgcgccggcaacagcgaaaacgcgctgcccgagccgatgcccaggcccgccacgcggccgtggtaggtgacggcgtcgccatacaggtcggacgtcagcgtcaccggctggccgatgcgcatgtgggtgagctgggtttccttgaagttggcgtccacccagacgctggccagcggcaccaccgccatcagcggcgtgccgggctgcacgtgctggccgagctgcaccgtgcgcttggccacgtagccggtgacgggcgccggcaggcgggtgtgctggtcgtccagccaggcctggcgcagccgggccgcggcggcgcgcacgtcggggtggctggcgacgtcggtgcccctgacctgcgcatgggcgatggcggcctgcgcctgcgccgccgtcagcgcgctctgcgcacgcgccagggcgtcgcgcgcgtgcgccagctcctcgcgcgacaccgcgccgctgccggccagctgctggcgccgctgcaggtcggcgcgcgtctgctgcagcgtggcctggcgcgtgcccacgtcggcctcggccgcgcgcaggctgccgtacaggccgctgaccttgcgcaccgcctggcccaggctggcctcggcctgctccagcgccacgtcggcgttggcgcggtccaactcgaccagggtctggccctggcgcaccaggtcgttgtcgtcggcgccgatgcggatcaccgtgccggcgatgcgcggggtgatctgcaccacgttgccggccacgtaggcgtcgtcggtgctctcgctccagcggccgtccagctggtaccaaagcccccaggccagcgcccccaccaccaccagcagcagcacgccccacagcagcacgcggcgcttgcgccggcgcggcggaacgggcacggcgggcggcggcggtgcatcggcagcggctgcggtggcttcggtcatgtccctgtccttttcttcacggctgccgccgtccttcaaggcgcctggcgcagcgccgccagcatgcgctccaggctgtccagcaggccctggcgctcgcgcgccgacagcgggctcagcgcctgcgccagcaccgcctcgccgatggcggccaggcgctcgcccagcgccagaccagcggcggtgggctggatgcgcaggctgcggcggtcatcagggtcgggctggcgccgcagcaggccctggctttccaggcggtcgagcaggcgcgtcatgccgccactgtcgtagtcgaaggcgcgcgccagctcgccggcgctcatcgagccatgggcgcgcagccgcttgagcgcctgcacctggctgtggttgagcgcgatgccctgctcgtccagccgcttgcgcgtcaggcgcatcaactcggcgtgcacctgcgccacgcgcgcggccacgccgcccacgtccagcggcgccgcacccgccccgcgcggcgtgctcataattgacttgtcagcatctgcagtcacagcggctcatgctatgccgatcgcccctggcctgaataaccccactgccaatgaaaatcgccacctggaacgtcaactccctcaccgcccgcctgcagcacgtgctggactggctggccgtcaacccggtggacgtgctggcgctgcaggagctcaagctcagcgacgacaagtttccgcacgaggcgctgcgcgcggccggctacgaggccgccgtgttcggccagaaaacctacaacggcgtggccctgctgacgcgcgcgcctttgctggcggcggacgtggcgcgcaacatcgccggctttgccgacgacaacgcgcgcctgatcgccgccacgctggaagcgccgggcgggccgctgcgcctggtcaacggctacttcgtcaacggccaggcgccgggcagcgacaagttcgactacaagatgagctggctgcgcgcactgcgcgaccatctgcgcgaggaactggccgcgcacccgcgcctgctgctggtgggcgacttcaacatcgtgcccgaggaccgcgacagctacgacccggtgggcctggccggcaccatcttgcacaccgacgaggagcgcggccacttccaggcgctgctggggctgggcctggtcgattcgtttcgcctgttcgagcagcccgacaagagcttttcgtggtgggactaccgcatgctgggctaccagaagaaccgcggcctgcgcatcgaccacgtgctggtcagccagccgctggtgggcgaggtgcgcgcctgcagcatcgaccgcacgccacgcaaatggcccaagcccagcgaccacgcaccggtgaccgtgaccctgggttgatcctgatttgatagctcccggcgcttggcagccgtgcgccgcagcccgatttgccttgaaaactcgggcagccgtccgcgcgcccgacccggccgttgatcccgtgccgccagcagggtcaccccgccggcgggaacgccgcggccccggcgtggcatccaatcgtctgtcaaccgatcgcgagggacacgccatggaacaccgcttcgaccacctcatcatcggcgccggcatggccggcgcggccgccgccgtcgcgctgcgccaggccgacgcgaaggccagcatcgccctgctgggcgccgaggcgcatccgccctacgaccgtccgccgctgtccaaggcgctgtggaaggacggcaaggaggacgacatctggcgcccgatccaggatgcccgcgccaccgtgcagctgcagcggcgcgccgtcgccatcgaccgcgcggcgcacaccgtgcgcgacgacgcgggcgacagctggcactaccgcaagctgctgctggccaccggcggcgcgccgcgcaccctgcccttcggccccgacttcatctatctgcgcacgctggacgactaccaccgcttgcgcgcgctagtcaaacccggtgcccgcgccgtggtgatcggcggcggcttcatcggcagcgagatcgccgccgcgctgacgctgaacggcgccaaagtcaccatgctgtttcccgaggacgccatcggcgcgcgcgcctaccccaaggcactggccgactcggtcaccgcctactaccgcgacaagggcgtggatgtgcgcgccggcgtgtcggtgcagggcgcgcgcggcaacacgctggagctgaccgacggcagcacgctggccgcggacgtggtggtggccggcctgggcatcacgcccaacgtgcagctggcgcaggacgcgggcctggcggtggacaacggcatcgtggtcgacgcccacctgcgcacgtcggatgtggacatctacgccgccggcgacgtggccaactttccggccgccgcgctgggccggcacctgcgcgtggagcacgagaacgccgcgctcaccatgggcgaacgcgccggccgcggcatggcggggcaggacgcgccctacgacgagctgccctatttctattccgacctgttcgacctcggctacgaggccgtgggcacgctggacgcgcgcctgcagacggtggagcagtgggtgacgccgtaccgcgagggcgtggtgtactacctcgatggcagccgcgtgcgcggcgtgctgctgtggaacacctgggaccaggtcgacgcggcacgccagctgattgccgagccggggcccctcgacgccgccagcgtacgcgggcgcctgcccgcttgaggtggaaccgtcgcgccaaggtgccaaaagacgaggtgcaactcacgagcgccacgcatcgtcggcggcgtcgcaatccaacgactcgaatggccgcggagcgggccatgccagtgatcgccgtggccggacctgcgccggccactggcgatgccccctgaagggaggaagcgtagcggaacgcagtccgcgcagcttgggggtgagctttatttcacgcgggtcagcgtgttcttgtccgtgtggtgcatctcgccaccggtggcggccagcttgagcaccaggtcggacgtgtagctcagcgtgtcggcgtcgacgatggtgaaggtgctcttgaagtccatcagctgcgcgcgctccaacaggtacttgttctgcaggatgccgaagctgggcgagcccggcgtggcgttgaagtgcagcacggtgtcgcgcggcttggcctcgccgcccgccaggatggcgatgccgcgcccgaacaccacggcgcgcatgatctggccggtggccttttcccacagcaggtagcccacctcgtcgtggaagggatccatcgcctcttcgccatggcgccaggcggtcatcttgtagttcaggccttcgagcgactgcttgccgttttcctgcaccggaatggggtggaaccaggccttctcgaagtagccggtgcggccggtctcgtcgtccttgttgtgatacgacagatcgatcccgacgttgccctcccagtcgccgaccagcggcgtgagcggacccaggcgttgcggtccatgaatgtcagccacgatgcatctccttgttgtcgttgcgggagacgccagaatagtccgatgcgaccggggctgcagatcgcatggaaacaagagcgcgatggcgtgcgggccatcgcggcgacagcggaaaacctcagggctcgtagcgcttgagctcgcgctggatgccttcgatgtcgctctggttgcgcgcgatcgaggccttgagctcggccacgcggtccaggtacttctggtagttgcgcgcctcgccgccgatcttgtcgg

SEQ ID NO: 1832 - DNA, 23078 bp, synthetic construct
  source 1..23078: mol_type = other DNA
  misc_feature 1..23078: note = Synthetic
agcgtggatgaaatcgtgcgtttaacggaaggcaagatggtaatccctgacgtggttccggaaatggaattttaagcgttcaccgagctcccgctttgcccctgcgccgcaaaaccatcccgttttgcggcgttttcgcttgtgcggtgcgtaaaacggcaatttagggcaaactttgaatctttctacaagagctctttctacaagagctcttgtttggtctaaaaggtgttctacacttcccacaagactgaccaagcggtcacgtctaagcaatcttgtatgcggaacaggcgattgcgaacactgtataccactgcagcccgcgtggtttctatctcacgcaatgtattcaccctgcaaataccgaatataggaactatcaatttcaattatgatgaaggcacccctattataagcgccatctgaggccgaggagcagcaccccttgcccgagacgcctacggatgccgagcgatcctcgttacaagcactcgttacaagcactcgcaagacaaacagaggaattttcatgtcaaatttttcccaaattgcagatcaagcagccactgaaatttcggctttcggcccaagctgggcttcaatcaatcccgaaaacgtggcacgcatgcgcctgcaaaaccgtttcagaaccggactggatatcgcaaaatacactgcgaaaatcatgcgggctgacatggctgcctacgacaaagactcctcccaatacacccaatctctgggttgctggcacggctttgttggtcagcagaaaatgattgctgtcaaaaaacaccatggcaccaccaagcgccgttacctctacctctccggctggatggtggctgcacttcgttccgagttcgggccgctgcctgaccaatccatgcacgagaaaaccgtcgttgccaacctgatcgaagaactctacaccttccttcgccaggcagatgcacgtgaactcggcggcctgttccgtgagctggacgctgcccgcagcgctggcgacaaagccaaagaagccgaaatcctcaacaaagttgagaacttcgaaacccacgttgtgcccatcattgcagacatcgacgctggtttcggcaacgcagaagcgacgtacctgctggccaagcgcatgatcgaagccggtgcatgtgccatccagatcgaaaaccaagtttccgacgagaagcaatgcggccaccaagacggcaaagtaaccgttccccatgaagacttcctcgcgaagatccgcgcagttcgctacgcgttcatggaaatgggcgttgaagacggcatcatcgttgcccgtaccgactctttgggcgctggcctgaccaagcaaatcgcctttacgcgtaagcctggcgacttgggcgaccagtacaacagcttcctcgactgcgaagaagtcactcctgagagcatgaagaatggcgacgtgatcatcaaccgcaacggcaagctgctgcgtccgaagcgtctgccttccaacctgttccagttccgtaagggttcaggcgaagaccgctgcgtgctcgactgcatcacctcactgcagaacggtgcagacctgctgtggatcgaaaccgagaagccgcacgtttcccagatcaaaggcatggtggatcgtatccgtgaagtaattccgaatgccaagctggtttacaacaacagcccatccttcaactggacgctgaacttccgtcagcaggtgtacgatgcatggcaacaagctggcaaagacgtgtctgccttcgaccgcgctaagctgatgagcgttgactacgacagcacggaactggccgctgaagctgaccgccgcatccagtccttccagaaggacgctgctgcacaagccggcatcttccaccacctgatcacgctgccgacgtaccacaccactgcactctccaccgacaaccttgcaaaaggctacttcggcgaagaaggcatgctggcctacgtttacaacgtacagcgcaaagagatccgccaaggcatcgcttgcgtgaagcaccaaaacatggccggctccgacatcggtgacgaccacaaagaatactttgccggcgaatctgcactgttggcaggcggcaaagacaacacgatgaaccagttctcttaagcctctgccacaagcagaaccgctttcgtaaaccgcagcacgtattgcgcgctgcggttgagagaccggaacaacaaaaagcggagcttaggctccgctttttgttttgatcggaagcgcttcagaaaggcgggtcatcgtcttcaaatggcggcggtgtttccggtttacgggcttgctcttccgcgatctctccgtaccacacatcgtcggcgtcttcaaatggtggggatgctgcaggtttaagtggcttgcttttgctatgctttttggcggcgctttctgctgtgctgcgagcgccgccctgcactacttcctcctctacgctgcttagcgccgcttgtaacgccgcctctactgcttcgatgcgttgtttgcatactttgtaggcactcacggattccgttacgatatccaaaagctcgtcgatatttggttctctctggtcgcgtagggtttctgcatgcgtctgcaaaacgcgataagcctctctgaatgaggtgctttcgccaatctggtttttatgggctttcgtcatttcgactcctttactacgggcaacaccccgtctttgaattggacattaaagcgatcaagtgattgggcgtgggaaagcgaagttaccggcttttgatcgcctgcgcgcacgatgacaaaaccacgtgccaaggttttttcaggcccctgcccggtaatctcccgcatcagcgcaatcgcctgctgctgtgcacttttcaattgaacatcggcacgttcggcaacgcggctgcgcgattcttcacacgcttggcgggctgcgcgtacgttggctaagctactttgcttgaccgcttgccaaccaagctctgtttttgattgggcaagcatcaagttttcacgcgcactggcggttatttcttgctgaagtcgtggcacactgagctttgcttctgacaactgggcctgcgcgttatgccggagttccataatggctcgctgggtttccaagtttgccgtctgcacttgtgccgcaaccgcggaaaatacaaacccgccggcgtctctcgccgcttgcgcgcgctgcacgatcaaggtttgaatatgagcaaccaccttactcggcgtgtcaaaacgctggttcgcaacttcatccggcagggtattgtcgcgctcatggccaatgccggtaagcacgggcacaggaagatcgcagatgcagcgcgctaaatcataatcattgagccacgccaaatcatttaccgcaccaccaccacgaatcagcgcaatggcgtcgggtggtgcattcttggggtaagtggcgaaggcctttgtcagcgcggcaacaatttcctgcgcggcgccttctccctgaaaacggctgtatgcatacgaaaactcacagaggccaaagcgcgctagtcgatcggcttctttgcggaaatcacctaaacctgccgcctcgttgggtgcgatcactaaaatccgataatagtcccacggtgcagcaagctggcggttacgttcaaacacaccttcgcgctgtagacgctcacgaatctcacgcttgcgggcttcaagatcacccagcgtgaagctggcgtcgatctcgtcaatctcaacgctaaatccatattgcgcgtgaaaaaccggtctcgctcgtaccagcaatttaatacctgcgccgagcaccatgcccgtttcacgttcgaataccggtaggattttcttggcggttgcgctccagatcatgcctttcgcttttgcgatcggctgcccttgcgcatcacgttctgagagctctaggtagacgtggccgcgcgcctgaacttggacgacctcaaccagcgtccacacgccttcaccaaattgacgagcgatcacggtggaaacgccgcccaaaagctgcgataaactaacgcccttggctttcgctgcgctaagtgcctgctctctggtggctaaaccagtgggttgcgcggaagccactaacgccgagccttcaggatcagatcgagtgccaaaaaactgcaattcaggatcggcagggcgagaagtactagcaggagcagaaacaccgtctggcaaccagcgcgaaaatggcgcgatgtctcttccttcgtccacataccacgctttacgggcaccgtcaaaacgagcacctaaggatttcgcttggtccttctctgcgtaaggaactttgagatattgccgagacatttttcctctctataccgtacacaaccacccgccaaaatccagcgggttgggtctttgcggcaacgggatttctgatttgccatttccgtttcgcactcaagcactcgcattgcgctgatacgaagtgtaacctatcacgcaccagactactcgtgcagatgacctcaatgtataacaaaaaacgcgcgatttacacggcggtacgccgacaaccccttaagatactcgccacagtaagcactgcactaccttggctattcgctttcgcgcctgctcatgcagaaactctaaccctcaataataaaatccggcttgacggcacgtttagccaaggtggaatggtaatcgggacttgtccaagctcgcgctgcgctgcatatttggatggcaaagagctgatcattacagagaaagggcagtttgtttttgggtttggccgagacgcagccgccacaagtaaactcatcacccgcagtgattcacaagcgtccgaaaataccgtgctaaaagttaaacagcggacttataacgtccagcgaattaccggcgttccccaaaaaacagtaacgccccctcctgaggtcgcagaacgcatacgccgcgagcaagcgcttgtcgatgctgcacgcgcgatcaacagtaagcgcacggattttgtgagcggatttacttggcccattcagggccgaattagcggtgtttacggcagccagcgcgtttataacggcgtgcctggcaacccgcatatgggcttggatatcgctgcacccgaaggcgcaaaaattcgtgcgccgatgagtggaaaagtccggctttcacagcccgatctgtatttttcgggcggcacgctcatattggatcacggccacgggctattttccagttacattcatatgtcgaaggtcatcgttcgcgtgggagatgaagtcaaacggggcgatgtaatcgggcttgtcggttcgactgggcgcgcaacgggaccgcatcttgactggcgaattaattggtttaatgagcggctcgatccggcttttgtggttccaccacaggtcgcaaaaaaatagctgatactgcgcttgcctgccccaccgacgcctgattaacctagcgttattgcagggacgcttgacgcggggatggtatattatcttaagcggtacttactcggaaaaaggaacgcaacatgctcgcgccactgatcatgaaccttgcagatcactttgatgtactgaccgaatcctgccgcgcttttgcgcgggctgtagagcaggatgctgacctgccccatatcctccctggatgggaaactctgaccgatcgccccgctgccattgcagccatgacacaactctggcggctcgatgagggcgacaccctcccaagcgcaggaatcttgtgcggctcccctaccacgttggaacgggcaatcgaattcaatgccgcgaaaaatgacttccagcaagcggtgcaaaaaatccgtgaatatatgaaggatggaaaaaaaacgcgcctggatagacaggttgagcgcgtacttgccattgaaggcatccgcacggatgaattaacgctggccctgaagcgcacccatttgagcaggctggacttgctgcgctgctacgcgcaaatacgcattcttcctaaaaatctcgaatccatcagctggacgtgggcaaaaacccactcggtcattgatcccgtctcgcgcgaagatgccttggtactagcaactaagcttggggtgcgagcgcgagcgatggcggagcaccttctcgcacagcttccggaaggcaccatgctcgcgtataaaaagcccctgcctaatcagctgcgagcaaacttaacttggcgcgacgaagaaggcgcgctgatgcgcaaagcagtcacaatttctggcatcgttttatgccaagactcaagcctgccggagtgcattatttggcgggaagatcccaaaggtgaaaagccggttccaaggaagcagcgcacagacgtggcgcttgccccagaaccgtatgtgaaggctttgcgcctccacctatataccgacccggaaaacgatgccgagcccgcgcaaaacaccgatctagcgtacgatgtcgagtagttcgatgtcgaaaatcaacgcttggaaggggccgatgtcggaacctgcaccgcgctcgccatacgccaaatgttgcggaatatacagccgccacttagagccggttggcatgatttgcagcgcctccgtccagcctgcgattacgccaccgaccggaaactcggcgggcgtgccgcgcgcgtaagagctgtcgaactctttaccatcaatcagtgtgccgcgataatgggtgcgaacagtgctgctgcgcgtcggcttggggccagtacccgctgaaatgacttcatattgcaggccgctcgccgtcacggtaacttcagcgcgcttggcgttttctgctagaaaagcctcgccctctcccgctaggtgctttgatttttcagccgtttcacgctgaatctgttgttgaataacgccgaaggcttcttcaatctgcggatggctaagctgtgggacggcatcgttgaaagcatcctgaatgcctgcaagcgctgcagcaagtgatacggtgctgaaaacttcgcgcagttgttcgcccatttgcaggccaataccgtaagaggcacgttccgctggagttgagaggctggtattcgacatggagattccactggtttagaaattgaggcgcaattgtgcttgattcccaagcaaatgaccagtatggctagccaaataaccagcgtctcaacttagcctcatcctctacctgcaaataacaggtatcctttggtgcgcgctggagttcaagctctacacaaaaaagctcatctcgtcgaaaagcatgtacgctcacacgctcccccgctgcaaaacgcgctaactggctctcaatccgccctacatcggttttaatgccattgatcgcaaccaccacatctccagccgagagccccgcttgatgcccagcagaaccgttgagcaaagtttggatctttgcaccggcagagtccgcggcgaaattcgctcctagggtgacacgttcgataccgttcgcgctgccgggcacgcctcctttatcgttgggagaatccgcagcgcgacgtacaacactaacgcccaccctctgcagcaatccgtccaaatcaaagtcctgcgtatcgcgcagtgcctgttgaaaaaaccgcatcactcttgcctctgcaagatccccaagcttagcttttacgattgccaaagttgcgcgttcaacatcggcttcttgaaggccgcgctgcgttttcccaaactcctcccacaattgcagcatgacggtatccaaactaatttcatgctgggaaagttcgcgcagcagcaaatccaggccaagcgcaactagcgaacccttaaggtaatagctcacaattgcattgggtgagttctcatcctgcttgtaaaattttgtccaggcatcaaaacttgattcgactaacgtctgccgtaagcggcctggagttcgcgataatcgcgttaagctgcggcctaatagttcaagatagctctgtgggctgatcaggccagaccggacgagagtcagatcgtcataataagaagttatgccctcaaaggcccaaagcaattcagtatggccttcctggtgaagttggtaggggaaaaataccgcaggtttaatacgctttacattccagctatgaaaatactcgtggctgcacaaacccagaaaattgcggtacccttcagatatcgtattgcgctcgtgaatgcttggtaattcatcccgcgcgctaatcaaactggtagaagcgcggtgttccaagccgccatagccctctcctaccgcccaaagaataaaaacgtaacgatcgaacggcgcaggttcgccaaacattcggatctggtactcgcaaattttctttaagtcttcactcaaacgcggcatatcagcggagtgtttgcctgtaatcacaaaatcatgggggacgccgcaagcgtcaaagcttgccagcgtaaaatcggcaatttctacgggatgatcaatcagcgcatcgtaattttcggcctgataaacgccgaaaccatagcgggtagcggtaaattccggcaaactcgttgcaatccgccagtgcgtgctatcaattccttttggcgcttgaatatctaacgtacaccttacgtgttcttgtccaaccactgcgagaaacacgctgctaccgttaaaataggcgtgattctggtcgagatgcgccgctcgcacggataagtcccacgcatagacttcatattcgacaatcacagggccgttgacttcgccgagctcccacgtgcttttgtctagctttcgcaccgaaacccactgattcccctgccgtgcccgcaaggaaataatatttcgcgcaaaatcccgaatcatatagctgcccggaatccacgcgggcaagttcaaacgctgcccctcacgcgcgggtgatgcaatttgcaggctgatctggtagatgtgtgcaaagggatcggcgggaacaatttgataatggatattggcgtgctgaacgtgagagagcgtattcattagtttccaaacatcgagtatccgaacctcaaaaagaggctggcgagttgcttaaagtagctaaagtgtggcacaaatcagaataattctcaatttgaggcaatatgcggcgaaaaaagtgtaagcacccttaaaccgacctcttgagctacagccactagcggtggtcgtgttgggagtgggaagatgctgatttaagttagccatcggtgatggcacgctgggattctggaaagcattcagcaaagcgcgccatatcccttttccttcccgccccatccccccagagaatttttttccggtctgtggcggctcttttctgcaacagtatcctagccgcttcgtcaggattgaaatagtgggcgcctttgctttcatagccaacacacagaatcgagatcttcccagcgccgttcacacccgccagcacggtgcccattcagaaatttccgtcttgccgggcggtaggtagaattgaggtcttctgccgtggcattaaaaaatgcctcagtcgcgattttgtgcttgggccgctgcatcatctggtagagatggtcaaactcatcccccagcgcctccagctggagacggcgctgttccttgactaggtttacacaggcatctttcatggtcagcagctcttcataatgttcgatgctcatgacgaccgccgcatgtttgttgcggatgtagattgcaaccttccggcaagcaagtctgacaaatagggaatagtagcgtccaattcgctcttcactaccttccaataggagagacttatggcagacgttgcgcaccaagcgatccacgatttgcttaccccggttgttgaagtcttcaaccaatgccgaggccacggtcggcgtggcagaattcccaacgatttatgggatcaagcggtgtcgctgtcttgagggggagtagttttggtatgccgaaataaaagaggctgcatatagcagcctctcattttgtgcatctttcagcttgttagcggacagagcacatatcccgataacgtatacaattatagaatagcccataaataataagaccgtcaacgatgggaggctacatgccccaactaatgcgttatcgacttgccttggatataggctccacttctatcgggtgggcaatgatccgcctttcaatgcaaaatgaaccaattgcgattattcgtatgggggtcaggattttttctgatggccgaaatccaaaggatgggtcttcgttggccgtaacacggagggttgcgcgccagatgaggcgacgccgagataggttgctgaaacgaaagacaaggttgcttaatgcgctggtacaaaaaaaattttttccagaggatgcagacgcaaggaaggcgcttgtcgttcttaatccctacgagctccgcaaagaaggcttataccgccaactgagtggcccagaatttgggcgtgcgctgttccatataagccagcggcgtggttttttgagcaaccgcaagaccgacaaaaaggataatgatagtagcgtactaaagaaggcgattgtagatcttcggcaacaactagaggtagaaaattgccagaccataggcgaatggctttttaagcagcaacaaagcggcaaaagcgtcagagcgcgtttacgtggaaaaactcaaaaggacaaagcgtacgatttttacattgatcgagcgatgatcgcgcatgaatttgatacgctgtgggtgtctcaggcgaaatatgacccacttctttttaatgaagacgcaagagcgatactacgcgacattctcttatatcaacgcccattaaagccggtaaagcctggtcgttgcacgctaattccagatgaaagtcgagcaccgcttgcactacccctgacacaacaggcgagaatttaccaggaactcaaccatcttcgtatcacaacacctgctcttggtgcacaagcgctgactgtagcgcagcgcaacacgattgctgcattactagaaaagagtgacgtaactttcgtgaagatcgctaaggctcttggcctgacaagtacaactgaatttaatcttcaggatataaagcgtgacaggcttaagggcaacgctacagccataatattggctcgcaatcagtattttgggcgtcgttggcatgattttaacgccgatttacaaaatctcattgttgataagctggtcaatgaaggcagcgagactgcgctgattgaatggttgaaggcaaatacagatgtagatgaatcagccgcagagcgtgtttctggtgtgacattaccagaaggctatggaagcttgagcgttgcagcattgcgccgcttgttgcctgcactcaaggaggatgtagttgtttactccgaggcagtaaaaagagctggctttgatagccatagcgcattgtctttaattgagcagacgggtgaactgtatcaagaattaccttattacggtgaggtacttcagaggcatgtgggctttggttcaggcgatcctaacgatagcccggagcgccgttttggaaaaattgctaatccaaccgtgcatattgggttaaatgaactgagaaaaattattaatgcacttataaagcggtatggaaaccccgccgaagttgtagtggagctggcccgtgatcttaaattaagccgagagaagcgtaaggaaatacaggaagaacaaaagcagcgccaggatcggaacgaaaaacgcattaaggatgcctgcgaaattcttggcattgatcccctagtcattgatcgtgggaaaaggcgcgaaatcagccaaaaaatgcagctttgggatgaattaaatccaaaagatgccgcgaatcgccgctgcccttatacaggggatcagatcagcatagaaaagctgttatccgctgaagttgaaatagagcatattctgccattttccaaaacattggatgacagccttaacaataaaacggtcgctatgcgccgtgcaaatcgtgacaagggaaaccgcacgccatatgaagcatttggagagagcctgaacccagattatgactatgacgcgatcttacagagagcatccctaatgccacgagaaaaacgcaagcgcttcgcatccgatggttatcagcaatggttgagagatgataaagattttctgtcgcgagcacttaatgatacggcttatctctcgcgcattgctaaagaatatttaacgctaatctgtccgcctaacagtgtgagagcaataccaggccgaatgacagcacaattgcgagcaatgtttggattgaatcgcctgctttcagagggcggaataaaaaatcgcgaagaccatcgacaccatgccattgatgcggcagttattggtgtaacggatcaagggctactacaaaaattttcgcgtgccagtgctcgcacacgagaattgcagctatctcgccttgtagatgatatgccgcttccatgggatacctaccgggagcatgtgaccagggcactggagcatctggttgttagtcataagcctgaccacggttatcaaggcaagatgcatgaggatacggcttggggactacgtgataacggccaggtaacccggagagtgcgctcggaagatggtggtccacgtcagcggttattagaaaataagaatgtagtaaaaattaatagtacccgtgatttttctcgacatggtattgatgagcagggtcaggtaaatgcctacaagggctatgtaggtggtagtaattactgtattgaaatctggatagatgaaaagggtaagtggaacagtgatgttgtctcaacttttcaggcgtatcagattgttcgtgaattgggtgaaaaagctgcctggcaaaaattgaggaacccattgttgagtctgtctgcaaagccattagtaatgcgattaataattgatgatgttgtgaagatgcagattgcaggacaaaataaaattatgcgggttgtcaaaattgcacagaatggacagattttttttgctgaacataacgaagcaaacgtagatgcccgtgacaaggacaaaaataacccttttaaatatatctcaaaaactgctggttcactgcagaaggctggcggaattcacatggctatttcgcccataggtgatgccaggccagtacgttatgggagataagacatgatcgagagaattgtcgaaattgctgaagataatcgccatctttcgctttatcgtggttttctcatggtgcatgaaaccgggccacagcgacgtgaagttgggcgggtaccattggaagatattggtgcggtgattgcacattctcatggtttgagctattccaataatgtattggtagcccttgccgagaaaggagcccccttcgtcctgtgtggtagtcatcataatgtggtgggaatgctttggccagtggatggcaattttcagcaggctaagcgtatggatgcgcaattggcggctacaaagcctttacaaaagcagttatgggctagcattgtgcgcatcaaattattgcagcaggcggcagtgctggatgcgtcgggcaaaccgagcaagcctctaacagcattggccaacaaagttcggtctggagatattggcaaccttgaggcacaaggggcgaggcggtattggaagttgcttatgggagagagttttcgcagagataccgctggcggcgggattaactcgctgctgaactatggttatacggtatacagggcagccactgcgcgagctgtggtcgcagcgggattacaccctacgctgggaattcaccacagcaatgagggtaacccgatgcggcttgttgatgatttgattgagccttttaggccattagtggattggcaagtctttaggctagtacacgctgaccccgaagtagctttgacggcggaatgtaagcggacattagccatgtcgctttatcaagatctccagacggtggcaggcgcgactcctgtgatggtctgtatgcagcgtttagctgtttctttggcgcagagctatctgacgaagctatgtgatctcgcatttcctatgccgggagtgtcacttgatgcttagcgggtatcgcattatgtggatagttgtaatgttcgatctgccggtaataagcaaagaggagcgtaaggcggcgagcaattttaggctttctctgttggacatggggttccagatggcgcagctttcagtttatatgcgattttgtacgagccatgcgcaggttaatacattttgtggccgtattgagtcggctgtgccagcgggtggtaaggtcaatatcctaacttttactgacaaacagtatgagcagattatctcgtatcacggtggaatccggcaggacgccaataaaacgcccgaacagtttagtcttttctgaagcagctatgatattttcttgcggagaaacagcggcaacctgttttaaatcagcaggttgccgcagtactagtctacattatcgggatatgtgctgcatccggaactgcctgctggcgagtacatcgcaagcattaagtctacattatcgggatatgtgctgcatccggaactaccagctagctcatctgcggtagggataaagtctacattatcgggatatgtgctgcatccggaactaaatgtcagcgcccccgtcacaacccactagtctacattatcgggatatgtgctgcatccggaacttgcttgcgcatccacgcaagcacttttttagtctacattatcgggatatgtgctgcatccggaactcgcgttcggtgcgtgaaaaaggccaatacagtctacattatcgggatatgtgctgcatccggaacagtcaccgctagcgcttgacggataccggcagtctacattatcgggatatgtgctgcatccggaaccaagcggtgcgttgtcggcgggcgatttcgagtctacattatcgggatatgtgctgcatccggaactttatttgtaccttagggcttgccgatcgcttgtgtggcctctggcaatgaatttccactaggcacaaacaattcaggattctccctttttaattcatcgcgcattttttctagctcgacgagcgcatcctccgcctcggcaatttcttcgtcactcttatcaccagcagccttcgcagcgtcaatccgcgcccgcaattcgggaattttctgaaacgcttgcatccatgcgcttgcggtggtgtgtgcttgcgtggcttcgtagtcggcataggctgcagggtcttcaagcgctgctgcacttggtttttcgcgttcaaggtcaggagcaagttctggtgtgcgggcatctccttcagagagagactggcgcatattgttgagcgcgctctctagctttggtgtctgagcgggtggctcttgctgcaagggcgcgaacgcatcgctttccgatacagccgctttgtcagatctatgttgcgtctgcgatccggtcaaagcaggcgcgggcactgctatgctttgcggggcatggtcactggagtctaacaaaacctccgaaggtggcagaaaaattatccacaaccacagagcaactcctacaacgaccgcaagcgttataaaaataccggccaaaaaccacgttgatttacgatcggatactcggctcattggcaaatcaccgcttttgcgctccaggcaaggagcgcaaccatggttccggaaacaaggattgatttagctgaacctctgcgcgctgccacaaatccgcgacctgatcggcaaattgcgtttgcgccttttcttgcgcaagcgttctgcggatctcggaccttacgctttcatcggatttcggaagcgaaaccgctgtgcgagaatccacccagagaatttcccaggattttccgtccggcatacggaaggaattggacacctctcccgctggcaaaatgagagtgagcttttgcagaaagcttagattcttttcggtgcgactgattcggcccattgatcccgggggattttcagtcttatctgacgcaagcgaatatttgcgtaccgcttcttcaaaagagagtcctttgcggatttcatccaccacacgatcagcgtctttctggctggaaacggtgatgtggcgggcactgacttcgccaatttgttgaaaatctcgttggtgcttttcgtagtaggcgtcgatctccgtatcggtgatggtttttatcaggcggcgtatctgctccggtgaatggtgcatttcaatgcgaactcccgcagcctcctccatttcaacgcgccgctcacggtcgataacgatctgattcagcgtcgataaatccacatcgtctagacgttgctgttttaggagcaagccttcgtgcagtcgtgtacgtgcatagatgaccgtcaggcgaccgaaggtttccgtgtcgccacgccgcagtttgagcacagcggcctcatctgcactccgaagcacctgatctagtcgaatagattgcggcgcgctttcttggcagcgaatcgcagcaatctccaccttttcagccgctttcaaagcttcttcggaaatcacgcctgaaacaaggcgttttttttcggtaggctctgcgccaacccagcgaatcagttcctcaccctttactggaagcaattgaatgcaacgatgcgcaatggcctcgtcaatttttactggaaacaactgatccagcaacatcgtatactcttgccaaacggtgctttcagcagttgcctcatggctgctttcggtagaacctgttctcgctatcagatgattttcaatcacaccttttagaatcgcaacgtcactcatatcgggcgtttttgcccgcaccgccgcactaaacgcttgaaatactttactggaaaacactttgccatctacgataaatgcctcatcgctgggcaaatcttttcgtaatacctcggcctgtgccgagcttacggaaaacaccgcgctcaccaacaagctcattgcaaagaaaacgcttgccaaagcagagcggttcgccgaatcagagcggttagcactgttgcgttcttggttttgttgcgaatcaccacttcgattcaaatccccacttcgattcaaatcacccctacgcgccatagacaagcgctttctcaaccatacgggccaaaaatgcgagcgaacctgaaccagcacaatgctgatgttgtccttggcgacaccgccgagcacctttttcaataaggcatctgcacaactggaaagctctgccgcgcggttttgcagatgggaatctgccaagacctgtgcgatttctacatcggttaactcatcgttcaagccgtcactacaaagcaacaccgtctgccctcgcgctaaagtgcctttctgaatcccgacatccaaaacttggtcatccgacattccgaggcactgagtgatcaggtttttttgggggtggcgatgcgcctcctccacactgatcgccccacttgcaagcaaatcttctacataggagtgatctttagtcaaccgcgacaatcgccccgcaggggcatcccacaaataggcgcggctatcccccacccacgcaatctcgtacgcctgcccgtgcaattgtagcgcaaccacggtcgttcccatgcccactgcccccacgccacgcgcagccgcaccgcagattactctgtgtgcaccggcaacggcgtttgcaagcgaggcgccatgagcggtttggcggatgatctcgtctcgcgcaagcgcgctggcaacttctcccgcatccatcccccccataccatccgcgaccaaatagaggcccgagcgatcatctccaaagaggctatcctcgttgtgggagcgaacatggcctgggtgtgtcactgcggtatgttgagaagtgcttctatctaacactgctgacgattccttttggtgcatccggtgataggcatattgtcgccgcttggctatgttttatctagcgggaatgggatccctcgtgaatgccggaacacatcaaggtgccaactgccgtgaaaaattaaatccctgcacacccggtttgatacgatacgtcatcgctgggcgcccaggcccttcactcaccatttcacccgtttcgatcagcactccagcattttcgaggcgcctgcgaaaagcctttttctccacgggccgacccatgatgatttcatatgctctctgcagcacagaaagcgtaaacggcgaatcaatcataaacgcgggcatcatagtgtagaggactttgctgcggattcgctctaacgcctgtacaagcaactcatcatgatcaaaggccagcggagttttcaaagcctcctcaattacaacccacgaaaccgcttccacagggctcagcccctcccctgcctgtagggaagacgcaggggcggctgcatcgagcgccacatacggcagcagcgcaaaatacatcaccgtaagcgaccaaccgcgcggatcacggtgggcgttacctactgtacccacctgttccaaccaaggcgcttgaacgccggttttggcccgcagcttacgcttggcggtagattcaaggctggcgtcgcatgcggtatccacaataccgcctgggagtgcccacttgcctttttctggcgccattgcacgcttcaccagcaacacctttaaaaagccttcatgcagggtaaagatacctacatccacggtcacaagcggagccgctcgcatgggggcgccatcctctttaactatactgcgatggctacctgcatcgaaatccattttcttctcctcatttcttcgcggttccattctctattttgcccccattgatttagtggcattatgccactaacatacgctactgaacagacacatccgcaaggagcaaccaatgtcacgtgattttgattttctggtatttatcggccgcttccaacccttccacgaagggcaccttagtgtagtgcgcgagggtcttcgcaaggccgataagctgatcgtgctgttcggctcggcctttcagcccccgtctctccgtaacccatggagcgtagaagagcgcgagcagatgctccgagcctgcctgaacgaagacgaaaatcgccgcgtaatcaccgcgcccctcatggacgcgccttataacgatgatgcttgggtgcgtaacgtgcaggctacagtccaagggctggcggtagcgcattttcagcagccgcaccgcaagcctgtcattggcttgattggccacgaaaaggaccacacctcctattatttaaatctgtttccacagtggtcagccacgcacgcgcccaacctccaagacatcagctccaccccgcttcgggaggcgtatctccgcgaagatgccggtagcgcttggctttcacaaccgtcggcacacgcattgcctgcgccggtgcgcgaacagctggatcactacgcgagtacgtcggcatttcaggaaatcgccgccgaatccgcctttatccgcgaatatcgcaaagcttgggatgctgcgccctacgcgcctatgttcatcaccgtagatgcagtggtcgtgcaaagcgggcatatcctgctgatcgaacggaaagcacgtccaggcaaaggcttgtgggctttgcccggtgggtttctcgatgccaatgagcgggtggaagaggcttgcctgcgcgaactacgcgaggaaacccggctaaaaatcccagcacccgttttgaagggctcgattcgcagccaagaggtatttgatgcaccccaccgatctgctcgtgggcgcaccgtcacccacgcctttctgattgagctaacccccgccgccgaactgccaaaagtgcgcggtggcgatgatgcgcgccatgccttctggcttccacttgcagagcttgaacccatgcgtttgtttgaggatcactactacatcatccagaaaatgcttggcttgtagtctggagaaaccctgagcaaccacgccactcgcttttcgcacaagcgtctattacagcggcctatctattacaaacgtcggcgactcattttttatttgacatattagtggctctacgccacaattacttcaagccgcgatgctgctgatggggagcccatcggcagagcggcgatggtcaggctggatagaccggctgaaccccattcttgcttacggatcaaggagcaaccccatgtcgatgcgcattaacccaattctgaacgccgattcctacaaggcatctcactttctgcaatatccgcctagcacacaggtgatttcttcctatatcgaatcccgcggcgggcgtttctccgaaaccgtattttttggcctgcagatgctcatcaaggagtacctgctccagcccattacccgtgaggatatcgacgaagccgaagcgctgctcaccgcgcacggcctgccctttaaccgcgagggctgggaatacatcttgcgggaatacgatggctttctgccgctcgaaatcgacgccgctcctgaaggaagcctaatcagtacccataacgcattggttcaggtgcgaaacaccgatcccgcctgcgcttggctgaccagctacatcgaaacgtcgctgttacgggcgatttggtaccccgttacggtagccagcacctcttggtactgccgtgaattgatccgcaacgcactggaagccacggcagatgactgctccggcctgcccttcaaactgcatgattttggcgcgcgcggcacgagttccaccgaatcggcggccattggcgggctggctcacttgacctgctttcaagggacggacaccgtggccgcgttgctagctgcgcggcgctattacggtgagccaatggcgggctattcaatccctgctaccgaacacagcaccattaccagctgggggcgcgacggtgaacaggctgcctacgccaatttgcttgcacagttcgcaaaacccggcgcgattgtcgcttgtgtaagcgattcatgggatctctggcatgcgattgattccatttggggggatgcgctcaaaaccacgctcgaacagagtggcggaacgctagtcgtgcgtcctgacagtggcgatcctgtcatcatcgctccagaaaccattgagcggctgatggcacgcttcggatttacggaaaacagcaaaggctatcgcgttttgccaccttgtgtgcgcgtgatacagggagatggcattgatcccgacagcctcgcggcaatccttgccgaattgcaacgccggaaactttcggtggacaaccttgcctttggcatgggcggcgctttgctgcaacactgcaaccgcgacacccagaagtttgcaatgaaagcctccgccgcttgcatccacggtgaatggcgggatgtattcaaagaccccgccactgatccaggcaaacgcagcaagcccggccgcttggccttaatccgcactgaagacggccgttatgaaaccatccggctggagcagctgcaggggcgccggaattatctggagccggtgtaccggaacggtgatttactgcgcgacgagcctctatcggtgattcgtgaacggcttgttgcgcagagtggcaatgcatagttcgtcagagtgtggcgagttcgtcggggtgcgttggatcgcgccccgacgcgatttgtagcggcgcatttatatctcccctaagcgcgctgaatctcgcccctacaacccacactcatcgttcaaacaattcaccgcctttgtcagcacggccaccgtcgccgcgatggcttcaggaatcagcgcttgcgctgcggctttgcgggtttcgtaatcttttgcgaagagcggctcagggtgcgtgtaagcgacacctgccacttgggtaatcaagccgttaagagaatcgcggggattgtattttccaacggccgcacgaacagcggtgaaatcagcaaactgatcgcgcttgtagtggtcttccacccagttctcccaaccaacgtgattattggccgaggtagaatatgcgtggtgcggctgcgcagaatccgtcaggaagtgcagtgcgtagccgatggcttgaaaactgggctgcttgtaaaactcactcagccaatactcgcctgcgttcgcagaaggctgccacgaaatattttgaaaatcgcgatagtgcgcgttccaatctgaatacgatccttggcgatagtgagcttcggtggtattgaagtctcgttttgagagctcttggttccaaagatagatggcggcaagtttgtcgatatccaccacgtcacctttaccgaacgagccgtttggcgtgcgattctgatagctatagccgccgtgggcgttaccatgaacatcctcaccgcgcgtcatattgataaagtgatggtaggcgttgtagcccacaagcgaatgagcaagaccaaacacgggcgccgaccaatggccgccagcccaccaagaaccaatgtgaacgtcacgaaagttatcgacatcgtagcaggcttggcccagcgcatcggcggcaacttcggcttgcccattggcggcttcaacgtaaaaatcataggcgcgcttttcttctggcgttgcacggtctgagcccatataagcaagcgcatccatcacaatccatttgtgagtaggctgcgaccaagccatcgtttgacttgcacctaacgccatcaacgaacccactgcgccgaccagaagatttcttatcatgattctacctgttgtctttctcgttctaattcgatctttcgttttttttcgatttcaggcttgaaacgttcgtttctttgcgcgatacgcgcctttaagaacctaatttgcgagcctgctggcgcaaagttaaccaaatctgaacgttattaccgtttgatttgtgtaacgccttgctaagtgcaggttcgccatcggctcttgggcgcaaaagagcgggtacaaaaagagctgaccaaaaaaagcaggcacaaaaaaacccggctagttgccgggtttttctaatcgaccgcaaaggcccagattagaccagtttggtcaactctggaactgcggtgaaaagatccgcaaccaagccgtaatcagccacttggaagattggagcttcttcgtctttgttgatggcaacaatgactttactgtctttcataccggcaagatgctggatcgcgccggaaataccgacagcgacatacagctctggcgcaacgatcttaccggtctggcca

SEQ ID NO: 1833 - DNA, 23075 bp, synthetic construct
  source 1..23075: mol_type = other DNA
  misc_feature 1..23075: note = Synthetic
gaagcgtacccggatgcgatcaacgcttatcgcaacgcgatgcagcgctacgaatttgaattgcagcaactggatgaagccgagcgggcaattgagcagggcgaattgttgctgctgctgccatcgctggaagagcaagagatcccggatgtgctgcagcagcatgcccgcgccaatgcggcgttgctgaaacgggtactggcgcagcatgtgttcaacgaatccttgaaacgctatcgcgatttgctcgagttgcgcgaaatccttgccggttggcaattccaactgccgatttatcaggacatgctggccaatcatcgtgctcgctatgccgagcgcgaaccgcaagtggaaacgaagctgagcaccgtcgatatgaccgcctatcagcagcgcctgcagcgggcccgcgaaacctttgaacaatcgcaacaaccggaaaactggttgttgctggccaacgacaaagagcgtcgcttggcccagcgcattgagcgcgccaaggcgcgtatcgaccgcatcgaaaaagcccgcggcccgatgccacgcgaaatggacaagctgcgcttgatgcaaggcgtattgcagttcgatgtctggcatgacagtgccggccgtcagtggcgtcaggaagtgttgatgactcaggccgagcagcatgtgcgtgaactcgatactcagcgcgcgaaactgattgtcgccaaagatgtcgccggctcccgtttcgccaatttcgatcagcgcatcgagcggcaactgaatggcgcccagaatttgattgtgcgcgccgaccgtttgctggatgaagaaggccagcgtctgaatcaaattgcccttgatgaagtgcgccgttggcgtgctcagctcagtgactaccggcagcaagcagagttggctcttgcccgtctgcaggatcgcgccagtattggagcacagccatgaagcgcgtacttgtgcatcctgttctgcgcgtcagtgtgctgtcgctggtactttctggttgcatcacgatgtccgatgaaggcgatcgtgagccgaccttggccaacatggccgaccgcaccgatattccgccgaaagcaccgttgccagaagtaacggtagagcaggcgatggaaggctaccagcgcgtactgcaacgaaacgccacgggtaaaacccgcgccgaagccatgcgccgtatggccgatttgatgatgcgtctggccgaaaccaagatgctcgctgaagccgatggcgacttgagcaagttgacgccggttcaggccaatgccagctatcagcaagcgattgatttatacaaacaactgctgcaggaatttccggattacggcgacaaagccggtgtgttttatcagttggcgaaagcttacgatttgaccgccgaacgcgatgcctcattgcaggcattggcatcgttggcgctggaatatccagctgatttgcattcagctgaagcgcaattccgtcgtggtgaagcggcattcgtggcccgtcagtggcaggaagccgaaaatgcctatacggccgtgttgcaagccggcgaatcagcattcaacgatcaggcccgttacaagcgcggctgggctcgttacaagcgcggcgattacgaatatgccttggatgatttccagcctttgctggagcgtttgcgtcgtcgtgacgaacgcgatattcaggtgcgtgatttacgcgacgatacgctgcgtgtcatggccttgtcgtttgccaatctcgaaggcgcggtatcgattcgcgcgtttttcgccagcaaaggcgagcggccgtatgaagccgatgtctatcgggcattggcgaatttgtatctcgaccaggaacgttttgccgacgccgccgacacctacaacaccttcatcaccgtgcacccgctcgacagcgaagcgccgtcgttctccacggcgattatcgaaacctatcaacgcggcggtttcccgaccaaagtgttgccggcgaaagaagattttgccgagcgttatggtcgtcgcagcgagttctgggcacgcgctcgcggcaatacccgtgagcaattattgccgcagttgaaaggccatattcgcgacgtcgccacgcactaccacgccaaggcgcagaaatcgaaagtgccggaagaatatcgggtggcggcgaaatggtatcgcgaatacctcgataccttcccgagcgaaccggaagcgccagagctgcattatctgctggccgacaccttgcttgatgccaaggcgattgatgaagcagccatcgaatacgagaaagtggcttacgactatccgccgcacgccaaatcggaacaagccggttacgcggcgcttggcagctatggccgtttgatgaatctggcttccggtaaagacgaagccggcaaagccgtcaaaggcggcgaaaccaacgccgaagccttgaaccgttggcagcgcgaaagtattcgtgccggtgtccgttatgtcgatgcgttcaccgccgatccgaaagccgcgaacgtgttgcaacaagtgcagcaatggcagctcgcgcagcaggatatcgccggcgcggttgctacctcacgccgtttggtgcaaatgccacaagcgaccaacgcgcagcaacgcgaggcgaaagtggtcatcgccaacggcgaattcgatttgcaaaactggcaagccgccgaaaccgcttacggtgagttgctggcgctaaccggttgggacaacaaaaccgagcagcaatatcacgagcgtcgcgcttcatcgatttacaagcaagcggaaatggcggttgttgccggtgacaagcaaggcgcgattgaccaattcttgcgcttaggtcaggtcgagccgaatgcctcggtgcgcgccaacgccgaatacgatgccggtgcgctgttgctggaagtggccgattttcccgcggcgatcacggtgttcgaacgcttccgccagatgtatccaaagcatgagctggtcaaaggcatcagcgagaagctggcgttcgcctacgagcagtcacagcagtggggccaggccgcgcaggaatatgcagccatttcccaaaccagcaccgatccggagtttgcccgcgccacgttgcagcgtgctgctgagtatcaggaaaagagtggccagaaagccgtcgcgatcaatacctggaaagattacgtcaagcgcttcccgcagccgttcgaagaggctcaggaagtgcgcgccaaaattgcccggtactacgccgatcaaaaagatacgcgtgagctcagcgactggcgcaaagcgattcttgatagctacaacaagcaaggtggtgacaagtcgccgcggatgaaatacctggctgcgcagtccgagtttttcttcagcgagccgttgatggataacttccgtcaggtgcaactgaaactgccgttgaacaaaaccttgaaaaccaaacgcgccgcgatgcagaaagccttggatgcttacgagaaaatcaacggctatcaggtggcggaatacaccacggcggccactcatcgcattggcgagatctatcgcattctggccaaggatttgatgaactccgaacgcccgaaaggtctcgatcaggacgcgctcgatgagtacaacgtgctgctggaggaacaagcgttcccgtttgaagacaaggcgattgagtttttctcggtgaacttgagttatatccgcgacggtgtctacaccgagtggattgaaaagagtgtaacctcgctgcgtgaactgcaacctgcccgttacggcaagaccgaatatgttgaaaccgtctacgaataaagcgctgctgctggctctgctgttggctggttgtcagaccatgccgaccccggaacccgttcagtccgagccgcaaaagtcggcgcctgtgccaagcgctgaaacgcctgcaccggattcgaccggcgcggtgaccggcccgtcggcgacacccgctgcaccgttgccttatcaagccaatgatccggccttgtcagtggaaacccaggccagttttgacgaggccgtcgcggcgatgaaaaaaggccagcacgacacggcattggccaaattcgctgcggtgcgggcacagtcatctcgctatctgccggcgtacctgaacaccgcgttgattctgcgtcagcaaaacaaaccgaaagccgcgctggaaatggttgagtccgggctagctgtgcgcgctggcgatgcccgtgcgctgtcactgaaaggcttgctgctgcgcgaacaaggcgagttgcaacaggcaaaagccagctatcttttagcgattagctcggcaccgaactatgcgccggcccatcgcaatctgtcggtgctggccgatgtctatcttgatgaaccggcactggcactgcgccacatggagcagtacgcccagctgacgccggaagacaaggacgtggaaaactggctgattgaattacgtcgccgtgtccaggcttcgcaaccggcggaggcaagtccatgaaatttctgagcacactgttactgatggtttctgtcggcgcgttcgcggccgaaccgaaaaccgctgaagtggaaaaagatatcgccgataacgcagcgaaagtcgcctcggcaaaacggccatcgcaagagccgttgagcatgagcgttactggcacccaggacgcaccgaacgtgctgtacatcgtgccgtggaaaaccgttgatgccgtaccgcaagaggcttatgtcagtagtctgctcgatgaagtatttgcaccggtcgatccggtcgagttcgagcgcagtatccgcatcaacgatcagcttcaaacctcactgcagaaaactgacagtgaaagtaaaaaataacccgtttcttttttaagttgcacgaagacctgcaggagtaaaacacatgttcacgacagccattgagttcttccagaacggcggcttttatatgtacccgatcgcgttcgtcttggcgcttgggattgccattgccatcgaacgcttcatcgtgctgacccgcgagcgtgtgcgcaaccgccagatttggcaggatctgcagcccgccttgaacgccggtgatttccgcaaagcccacgaaattgccacccgttcgcaagcggcgctcggccgcatggttgcttacggcctgactcgcgttggcgccggtcgtcgtgctgaagacatcgagctggcgctggaagaaggcctgatggaaattctgccgcgtttggaaaagcgcaccggctaccttggcatgttcgccaacatcgccacgttgctcggtctgctcggtaccattatcggtctgatcagcgcgttcgccgccgtcgccaacgccaacccggcggaaaaagccaacctgttgtcgcagtccattgcggttgcgatgaacaccaccgcgttcggtctgattgccgcgattccattgcttattctgttctcgtatctgcaatcacgcaccaccgagatcgtcgacagtctggaaatggccgccgttaaattcaccaacatgatccgcaaagtgcagatggagcgcgaagtcgcgcaaacggctcaggccgcccgtcaacccgcaggtaccgcgccgcgcgcttaatggggtagcgtcatgtttcgcaaacgcatacgccggaaagcggtcagtgatggtgaactgaacatcaccgccttcatgaatttgatggtggtgttggtaccgttcctgctcatcacagccgttttctcgcaagtgacgatgctggagttgaatctgccgggtggtggtgaatctccagaagacgtcacgccgccgccaatcgagctggaagtgaccattcgcaaagaccagcttgaagtgggcgatcgcaataccggtttgttgacggtgctgccgcaggtcgacggcaaacacgattacgacaaactgaatgaatacctgcaggacgtcaaagccaaattcccggagattttgagcgcgacgatcctggctgaagaaaccaccgagtacgacgacattgtgcaggcgatggacgccgtgcgtctggtggagcagaagcaggatgatgagtgggtgcaggcggaattgtttccgcaggtcagcctcggtaatgcggtgccggatccgcgcaacgcagcggaggccacgccatgaaccaatctcgtcgtgctgcccgcatggggcggcatcacaagcgccgtggcgtcgttgcgctgtcgctgacatcgatgatggatatcttcacgattctggtgttcttcctgctggttaactccggcaccgaacaacagctgccatcgaaccagagcgtcgaattgccgcaatcgctggcgcagcaattgccgaaagacgcgctgattgtcatggtcagcaaagatgacatcatcgtgcaggggcgtcgcatcatgtcggccgatgcagcagaaaagctcgaggacgacgtgttgcccgcgctgttgcaggaactgaagctgcaatcgagcaaccggttgacggtcgccgccgaggaacgtaatcccgccattgtcatgggtgacaaaacgattccgtatcgtttgctgcgcaagattatgtacaccctgagcgaagcgaattacaccgatatctcgttagcggtcatgaagaaggaaaagccagtctcatgaacgccacctatcgcatcatgccgcagctgccctgggacattatcccggaagaggccaatcgttttcgcaatttggttctcggtattctcggtctgtttttattgctgagctttctggtttccattatcgacttacctgagcagccgcgtgaacgcccggtcgtgcccgagcgtttggtcaagttggtgatcgagcagaaagaaaaaccggtgccaccaccggtcaagcaaccagaaccggaaaagccgaaggaagaagagaaaaaaccagagccgaaaccggaagagaaaaagccggaagtcaaagagccgccaaaagaagtcaaggtagacaagaaagagaaagccaaggaagaagcgcagaaacacattgccgtgtttgatgcgttagcggatctgcgtactgccgttgagccagcggctaaacccggtcaaccgttgaaggtcgatgaaaaagccggcgccggtccaaagccttccgagcgcgcgctcattgctgacaaagcgaaggcgggcagcggcggtatcgtcaccgccaaagccagctcggctggtggcaccggttcaggcatttcggctcccacgacgtcagaagtcacctcggccatcggtggtttggatccaaaccaactgcgcgccagccgtgacccgaatgatccgaatgccaaaggcaatgtcggtcgtcgtccagacgaaaatattcagcaaggcttcgacaatgccaaaggttccatctttgcgttgtatcaccgggcactgcgcagcaaccccggcttacgcggcaaagtgattttccgtttggaaattcaaccagatggtagcgtcaccaaagccgaagtcgtttccagtgaactgaacgacccggatctggagcgcaaactgctcgcgaaagtgcggcaaatccagtttggccagatgaacgtcagcacctggaacgacagttaccgcatggacttcttcccgtcgtgatcagtaaagcaaaaatacacagcgccatcctcgtgatggcgctgctgttttccgaatacgcaagcgccgaatggcaattgcgcgaattcaacgtcatgggtacgcgtgcccgtgttgaattctggagcaccgataaagcgctgtcggcaaccctgcatgagcaagtcgaagccgacatgcgtcgtattgatgcctccatgagtccctacaaacccgatagcgagctgtcggccatcaaccaaaaagccgctgagcaagcggttgtcgtgtcacgcgaactgtttgcgctgatcaaacgctccatcgattattcgcagctcaccagcggcgcctttgacatcacgttctccagcgtcggctttttctacgactaccgccaacaccagcggccaagctccgagcaaatcgaaaaacatctagccggcatcaactatcgccatctggtgttgaacgacgagcagggcagtgtcgcgttcaagagccaaggcgtgcgcattgatttgggcggcatcgccaaaggccacgctgtggatcgcgccattgatatcctgaaacgtggcggcatcaaacacgcctacgtcagcgccggtggcgacagctatgcactaggcaatcgcggcgaccgcccttggatgatcgccatcaaacatccgcgtgacaaaacccgctcgttgctgaccattccgctcgaaaacctcgccatttccacctccggcgattacgagcgctattttgatgaaaacggcgtgcgctaccaccacatcatcaacccgaaaaccggcgactcggcccgcaacagccaaagcgtcacgatactcgccgacaactccaccgatgccgatgcgctatctaccagcgtgtttgtgttgggcccagaaaagggcctgcaactcatcgataaaacccccaacgtctcggccgtcatcgtcgacaaagacggcaaagttcactacagcagcgatttagtcagcatcgatcaatagcaacaagattgcatgcaaaaagcgtggattcaaaaaacgatcttcccccttcagaggggggaggtggcgcgaagcgccggatgagggatggttttacataccttcgctaatcctgcgttcctgaatcaaaacaacgaatactgcggcgaactattcggcacccgaaacaaatccgtacgcaaatgattcccacgcggcacacgattcaatccattcttctggcaggccaaacgaaaccgctgcgcaatcatctccgcgtactgcccttcacccttcatccgctgcttaaattccgtttgattcaacttacccccacgcgactgactcaccaggctcagcacatgcgctttcttctgcgggtaatgcgcctccagccaatcactgaatagcgctttcaattcccacggcaaccgcaaaaacacatagcctgcttgccgcgcgccggcttcacttgccgccgctaaaatcgtttccatttccgcgtcgttgacaaacggaatcaccggcgcaaagagcacgccagtcggaatacctgcctgggtcaaacacctcaaagtttccaagcgcgccgcaccggtcgaagcacgcggctccagcttggttttcagttcattgctgagcgtcgtcacgctaataatcgcctcggccaaacctttctcagccatcgccgccagaatgtcgatatcgcgctgaatcaaactgcctttggtgacaatgcccaccggctgattgaactccttcatcacctccagaatctgccgggtaatgcgccgctccttttccaccggttggtacgggtcggtgttggcgcccatggcaatccactgacattggtaagagggcttgctcagctccttgcgcagcagctcagcggcgttctccttcacaaaaatcttgcgctcaaaatccagccccggcgaaaggtccaggtaggcatggctaggccgggcaaagcagtaaatgcagccatgctcacagccccggtaggggttaatgctcaaggcaaaagggatatccggcgattcattccgggcaatgatgctacgcgtggcatccacgtagtactcggtatcagcagggcgagcttcatcaggtgccagctcgtcatccagctcccgcaccgcaatggtcttggcaaaacggccgggggtattgctggtggcaccgcggcctttgatggggggagtagccatgaggtggccttgggagatgattggcggttatcaaaaggttaacatttgatgtggcttcaagcaattgaatgaagatgtttgccgcaatactcgcaacgctgcgatgcatcaaaaaaatttcaaatccacaaaaagcaagaggccgcttgtagcggcctcttcatctggtgcatctttcagcttgttagcgtcagagcacaaatcccgatctgatatcgggtctgatgctaatcgtcaggaggctaactcgtcaacccattcgaaaaggaaaccaaatgctggattcgaaaatgccgtaccgccttgcactggatttgggtagtagctcgttgggctgggcgttgattcgcctaaacgcggaaaacaaaccttctgcgattattaaggcaggtgttcgaattttcccggacggtcggaacccgaaagatggaagttctctagccgtcacgcgccgcgaagcgcgcgctatgaggcggcggcgtgatcgtcttttaaaacgcaaagctcgtatgattactgtgcttacggagctaggtttttttccctcggactcattagaacgtaaggcattggaatcactgaatccctaccgcttgagagcagaagggctggatagagagcttcaaccagatgaattcgctcgggctctttttcacttgaaccaacgacgtggcttcaagagcaaccggaaaaccgataaaaaagacaacgacagtggagcgatgaagcaggcgctgtcgaagctcagacaaaacctggacgagtccagttgccgcacggtaggggaatggctcttccagcgtcagtgcgccggtcagtcgctgagagcccgttatcgagaaactcgacaaattcatgaagatgggcggacgcgagtcgaaaaatcatacgatctgtacatcgaccgcacaatgatcgaagcagagtttgacacgctctggcgtagccaagctgcccgaaatccgagccggtataccgatgaagcacgacggcgactgaaagatgttttgctttttcaacggccgttgaaaccggttcgtccaggtcgctgcacgctgcttccggatgaagagcgggcgccattggcattgccgagtacacagcgcgttcgcatctatcaagagctgaataatttgcgagtgttgggcgattcactgcaggaatatgcgttgactcttcagcagcgcgatcagctggccgctgcgctcgatcatcgaccgaagatgagcttcgatcaaattcgccgcttgttgcgcctggatggccagaccaaatttaatctggaagatatcaagcgtcaggaaattagaggtaacgctacagctgccttgctgagcaaaagcgatttttttggagagcagtggcacagcttcaactcgtctctgcaagacgagattgttcaacatctgattgccgatgaagaggagcaagcgctgattgattggttgattgccaataccggcatcgatgaggcgtgcgcgcagcgtcttgccgatgtttcattgccacaaggttatggttctcttggccgaactgcattggcgcgaatattgccggcgctgcggcaaagcgttttgccattcagtgctgccgttcaagcagcagggtttgaacaccacagcgcgcttgatcatgttcagaaaacgggtgaaatccttttagagctgccttattacggtgaatatctgacacgtcacgtcggttttggaacaggcaaccctgatgatgtactggagaagcggtatgggcgcatcgccaacccgaccgtacatattggcctcaatcagactcgagttgtcgttaacgccttgctgaaacgttatggccctcctcaagaaatcatcgtcgaagtggctcgcgagcttaagcaaagtagagaagatcgcctggcagaacaaaaacgacaagccgaaaaccagcggcggaatcagcgacttcgcgaggaggtcgccgctatattggagattgaagagcatgccgtcaaaacggccgacatacaaaagatgatcctgtgggaggaactgagtccggacccggctgaccgtcgctgcccctattcaggcgaacagatcagcaaacacagactattgtcagaggaagttgaaattgagcatatcctgccattctcggaaacactggatgacagtttgaacaacaaaacggtagcaatgcgaatggccaatcgtgtgaagggcaatcgctcgccgtggcaggcgtttggtgaacatccaatcgcaggattcgattatcaggagatactggctcgggcagaacgcatgcctaaagggaaacgctaccgattcgcacctgatggctatcagcgctggttgaaggacgatgcgggctttcttgctcgtgccttgaatgacacccgttacttgagtcgaatagcgcgtgagtacttgaggttgatctgtccacaaggtacacgagtcattcccggacaaatgacggcgttgctgcgcgccaagtttggtttgaacgatgtgctcggactacatggcgagaagaatcgaaacgaccatcgccatcatgccgttgatgcctgtgtcattggcgtcaccgatcagggaatgttaaagaaattttcagaagcggcccgttcggctcgtgaaaagcaacttgatcgattggtcgagcatatgccgttgccatggccaacttatcgcgagcatgtcaaacgagcgataaatgcaatttgggtcagtcaccggccagaccacaattaccaaggtccaatgcacaacgataccgcttacggcttactgggtgatggacgggtcgtgcatcacaaatggctggatggaaagcgcgagcgagtcgaaaaaagcctgaaagttatcgagttcaaaaatccggatgtgcgtaatcgttcaggccagcctcgtcatggcgtgaccgagaacggctctcctcgaccgtacaaaggctacgatggcaacagcaattattgcattgagattgttcgagtggagaatggtcgttggcaaggagaagtgatatctacgtacactgcctatcagaccgtgaaggcccaaggagaaaaacgccttcgcgatccaaagttatcgctctcaggtcagccgctgatcatgcgcttgatgattgatgatgcggtgcgactggagattgatgatcatattcggacgatgcgggttgccaaaatcagcgcaaacggtcagatatttatgtgcgatttacacgaagccaatgtggacaagcgcaatcgcgacaaaaatgagctctttgcttacgtttcaaaaactgccgggtcactacatgctgcgcgaggtcgtagggtgacaatctcgccgtccggtgagctgcacgatcccggcttcgcggactgaatcccttgcctggccgcattgtagaaatcgccgacgatcatcgacacctgtcgttgttgcgaggctttctggtggttgaatcgacaggagctgatcggcaggaaatggggcgagtgccgctggacgatatcgctgccgtcatcgccaatgctcatggcctcagctacaccaataatattttggttgcctgtgctgagcggggtataccgtttgtgctctgtgcggccaaccataatgcaatcggtttgctattgaccattgaagggaacagtttgcaggccggtcgtatgcaagctcaattgtcctcgtcaaagccattgcagaagcagctctgggcttgcttggtacgcgccaaacttgctcaacaggcttgggtactcgcggaaacaggcaagcctacggctccagttaccgcattaatttcaaaagtacgtagcggcgatagcggcaatattgaagcccaaggcgcgcaacgttactggccattattgttcggtaccagttttcgccgcgatcgtacagttgaaggcataaatagcctgttgaattacggctacaccgtactgcgtgctgctatggctcgagccgtggttgcagcggggttacacccgacacttggtttgcatcatcacaatgccggcaatgccatgtgtcttgtagatgatttgatggagccttttcgccccttgatcgattattgtgtatggaagttatgccaaaagagtcaggagttcattacgcccgaaaccaagcaagaattggtttatgtgctataccaagatgtagcgagccctcaggggcgcacaccattaatgcacgcaatacagcaactcgccacatccttggcgcaggtttatgtgggagagcgtttcgagctggaactacctgagccgggtgtgctagacgagttgttagatgacataaattgatgtgagatatgttgtcgggatttcgcatgacgtggttggttgtaatgtttgacttgccggtgctgaccaaaccggagcgcaaagccgcaacccaatttcggcttatgctgctggactatggttttgaaatgagtcagttcagcgtatacatgcgttattgttacagctccgcacaggtcgagaccctttgcaaacgtgtggaagaggctttacctgacggtggtcgggtcaatatccttcagttcacggacaagcaatatgagcggatcatttccttccatggcgcggttcggcaaccgaaaaaccgcaatccatcacagttcaatctgttctgaatcatgatttttctcttgagattaatgaaaaagcccttgcataacaataagttaagcaaggggtagtttatcagatcgggatttgtactctggccggaacggcaatattcgacgtgttgcaggtgttcaaagtttatcagatcgggatttgtactctggccggaacaatgtcgaggtggaagtcaacagccgccgcagtttatcagatcgggatttgtactctggccggaacaaccgccaggttttccctcgatttattgcaagtttatcagatcgggatttgtactctggccggaacgccacgtcgccagtgctttgggcgtcatgcagtttatcagatcgggatttgtactctggccggaacacggcgtaactggcgcgctatcgacagttaagtttatcagatcgggatttgtactctggccggaacagcgaaggctttacataggcgctttttttagtttatcagatcgggatttgtactctggccggaacgcatcgatgttttcgacggtgtcattcaggagtttatcagatcgggatttgtactctggccggaacaattgcgccgcgtatttcagcgcgccagtgagtttatcagatcgggatttgtactctggccggaacgttcggcagcgcggtattaatcctgtctcgagtttatcagatcgggatttgtactctggccggaactcgggatcaccgaagaggaactggttcgggagtttatcagatcgggatttgtactctggccggaacttagggaatctagtgatttttggcgaatcgagtttatcagatcgggatttgtactctggccggaaccatgcactattgacaacgacgggctgacgcagtttatcagatcgggatttgtactctggccggaacgcttttgaagcgtacagcccacaattaattagtttatcagatcgggatttgtactctggccggaacaagtcgtgcgacgtgcaaccggtcctaaagagtttatcagatcgggatttgtactctggccggaacacaggcggtaacatttggtcaaaacttcgaagtttatcagatcgggatttgtactctggccggaacaggtagcggtttgaccgacagcgacgttcgagtttatcagatcgggatttgtactctggccggaactaacagcatcgcgccagcaacaacggcggcagtttatcagatcgggatttgtactctggccggaacagtagccggcgccaaacagcgcgtacagttagtttatcagatcgggatttgtactctggccggaacactatcgttgatggaatgccctccccggctagtttatcagatcgggatttgtactctggccggaactccaacagcgggtttctttttgttcgcagagtttatcagatcgggatttgtactctggccggaacgacaaggggattgtgatgataaagcgacacagtttatcagatcgggatttgtactctggccggaactttgggctcttcaacaagcgcaatgcttcgagtttatcagatcaggatttgtactctggccggaacatcaccagcgatgaggcgcttcgtcgccaaagtttatcagatcgggatttgtactctagccggaacttgaaacgttgaggccagcctcggccaaaaagtttatcagatcgggatttgtactctggccggaactacgtgtcggtgataccggcatcggtaaatagtttatcagatcgggatttgtactctggccggaacattgcaatcgacgtatcaccgcttggtgtgagtttatcagatcgggatttgtactctggccggaacatttcggcatcgcgcacaacaaaacgacgcagtttatcagatcgggatttgtactctggccggaaccgaggaaaaccgcatgtcttgatcggcgttagtttatcagatcgggatttgtactctggcctgaacatcaagcactacaccaatgttcagaaaggagtttatcagatcgggatttgtactctggccggaacttctaccgcgcgcagggttgtgttcgcgctagtttatcagatcgggatttgtactctggccggaaccttcgcgctgatggtgttgcgcaaatcgttagtttatcagatcgggatttgtactctggccggaactacctccgcaagttgccggaaatccgcagagtttatcagatcgggatttgtactctggccggaaccaaacaattaacgcgattaatgttgcaataagtttatcagatcgggatttgtactctggccggaacatttaacagatcaccggttatacgctgccagtccatcaggctgagattgttgagcggtcagttgagttccgtctcagtaacggcaacggcaactccccctcacacaacaactgctcatgaaacctttgcaaatcaaaaccaagctgttggctgcattctctacgcaaagcgtgcatctcccgctccccaagcaggtagcccaacgcttgtcccggccaggtgatatagcggtctacttcggtttcgctttcgtgtttggataatgacgaatgctgatacagatattgcacagcttgttcacgagtccagcctttggcgtgcaggccggtgtcgatgacgaggcgtgcggcacgccataaccgatagcttagccagccgagtttggcgtgtgggtcatcgtatagaccgatttcattgccgagtgattcggcgtatagcgcccaaccttcctcataagccgtgttcaataagcagcgacgaaatgccggcaggttttctcgttcttgggttagtgcaatttgcaggtggtggccgggcatggcttcgtgcagcgtgagggcgggcagcacatagagcgggcgcgaattcagttcgtgggtgttgacccagtattcgccgggtcgtgaaccgtcggcgggtggctccaggtagaagccgctggggtaggcaggtgcaagctgtgccggtgtggcttttacgtggaagggcaggtgcggcaaacgagagaataaacgcggcaaggctgcattgatggtctcgcagagttgtgtggcgtattgcagcaactgctcgggtgtttgcgcgtattggcgtgggtcgttacgcagggcgtcgatgcctttatcgaatggggtgggtaaacccaattccttcaaaatcgcttcggctttttcgcgtgtggcggcgacttcttcgaggcctatctggtgaatttcggcggcggtaagtgacagcgaggtatgttggcgaatcagtgcttggtaccaggcttcgccatccggtattgcacagaggccgggtaggggcctgctgtgtttcaggtaaacggtttcgataaattccgcgaaggtttgcagtgcgggtgcgaccagcatttgcagtacgttttgcaagcgttgttgaaacgctgtgtcgttaaccgcttgatcgcttgttggctcaaaggtttgtgccaagccttgctccgatgccataaaacgaatggcgatgggcacggcgcgtaaggcttcggcgtatgggtattgctgacgttccagggctttgtgcaggagttgttgttgctgcgccagccaaaccggtaagccgcgtaaacgcgagaggtaattttctcttccttcggcggtgctcaagtccgctagatgtaatagccgggtgagttgcacgtggaggccatgactgctaccgagcggggcgaggtgatcgggcgtttcggctaagcgcaatgtggtttgtagttgataaagcgcgacttgacgcgagagttcgtcgaggccgttttccagtttgatcgcggattcaatatttcgcaggtgttcacgacggcttaaggtttgtttcttgatggcttgttcggagctgtcggggagttggtcgtcgtattgccgaacaccgcagtagctggcatagagcggtgcgaaacgcatttcgtcttgccaccagttgttgatcgcggcgtcgagggtgaggatggtggttgttggttttggtttttgtgtttgcatggtgtcggtaagtcgcaagttaagttatgtccgtaacagttgtgcgcctaatcgcttgatggttctggattcccgccttcgcgggaatgacgggtttttcctttgaatctagcgtcattgcgtaattctccccctctccccaacccctcccccgcgagggggggaggggctaaaccctccgcgtcgacgggtgcttatttgtcgcgcagtatttccggcaataaatgtgtcggtgtgttctggaagcacaccggacgcaggaagcgatcaatcgccatcgcaccaactgaagtaaagcgtgcatcgctggtggcaggagaagggccgccgtgcaccatcgcgtggctgacttcgacgccggtgggcacgccgttgaatacgatgcggccggcattgttttgtatgcgcggcaacaagtttgccacggcttcggcgtcgtgttcggtttgccagacggtggcggtgagttggccattcaatacgttgctgatgtcgccgaactgggtttcgtgatcggcaacaataacgagtgcggcgggtccgaacatttcggtttgcagttctgggcgtttcataaaggcttgtgcatcgacggtcagtaagaatggtgatgcgtaggccgcttcgactttgccttcatgcgttacggtgttcgcgtgcgctttcacggcggtgatggcagtagcgaaatgtttggctccttgttgtgaaagcatcggggcaggttgttgggctgtgagtaacgcgtttaatttttccaggcagcggtccagtgcgacaccgcgcggggcgataagcaaaccgggtttggtgcagaactgtccgacgccgttgcaaatggaggcggcgagggcgccggcaatttcatcggagagttcgtcgagtgcatgtgggaataaaaacaccggattcaaactgctcatttccgcgaacaccgggatagggtgttggcgttcgctggcgtagcgctgcagggcgcggccaccactttcagaaccagtaaagccaacggctttaatgcgcgcatcttgcaccagggctttgccggtttcggtgccggcgccatacagcatcgagaatacgccttctggccagccttgttgtttcaaggtagcgctaattacgccagcgacaatctcggcggtgaatggatgcaacgaatgtgctttgacgataacggggcaaccagccgccagtgcggaggcggtgtcgccaccggcgaccgaaaacgccaacggaaaattgctggcgccgaacacggtgacgggaccaacggccagtttaacggcgcgcagttctggcttgggtggtgtgcgagcgttatcggcggcatcgatgcgcttatcaaagcatttgccttcgcggatcagcgtggcgaaatggcgtagctgaaagcaggtgcgcgccagttcgtttttgatgcgtacgcttggtagccctgtttcttgcgtggcgatatcaatgatcagcgattcttgtgcagcaagattgttagcgatggcttccagtaattctgcgcgttgttcggggcgactgttttggaacggaatgaacgccgcgtcggcgagtgccagagctttttcccgctcggtgtcgctgcaatgaaagtactgccaaggcagcgcttgaccagtagccgggttgaacgcctgttggcttttgccgtgctgggcaccgcgttgatagccgataaaggatgtgccgtgaaagtttgtcgcgttcattgcgttctccgaaaaaataggcgcacgtgctgtgcgcgaaatgttgcaagggtgaactagaaactatctaaaaaatacccggagcttcaggggacttgttagataacttctaaaaaacgtcgtagttaagtcggttagagcggatttcttccccctctccccaactcctcccccgcgaggggggaggggctaatttgccattgcttcagctaacggtattagagcaagtttcggggttgtgataaggcctttccctagcaaattcagttttactttgtcattcccgcgtaggcgggaatccagtggttatcaacagttctggatccccgcctacgcggggatgacgggccgaatttgttaatcgctcgtatttaaagtgcaggccgatttgccattgccgtgcgcaaaatattcaagcacgactcacgctcagcgccggtcagctccaagcgtggtgcgcgtacgcgttcatgacccatgccgacttcttgctgcacgagtttgatcagttgtacgaacttcactacggtgtcgagacgcagcagcggcaggaaccagcggtaaatggcaaacgcttcttcttttttgccttgcatggcgtagttatagagcgcgacggattctttcgggaaggcattgaccaagccggcaatccagaattgtgcgccggcgtcgacgccttcgaccaagcaatcgtcaacgccaacaccgagcgctaaacggttgccaatcagttcgcgaataccggtgacgcggcgcgcgtcggttgaggattctttcacggcttgaatttgtggcagctcacgcgcgagctcggcgatttgcgcagggctgaaatcggttttgtaggccaccgggttgttgtagagcaagccgggcagggcggtggcttgcgcgacgctgacgatatgctggcgcatttcgcgccagtcggagctgtagacatacggcggcagaatcatcagtgcgtgacagccgagatcttccgctgcttgtgcaagatgcacggcttcgcgggtggaaagcgccgcaataccggggatgaccgggactttatcgccaacggcatcgacgacggttttcatcacggcgattttttcttcgctggttaaggtggcgccttcgccgaggctaccgcagggaacaatgccggtgctgccgttttcaaccagccattgcacatgctggcgaataaagccgtggtcgactgaataatcggcattgaacggcgtggtgattgccggcatgacgccggtccattttatgctcatggcataactccttgatggtcggatggtgtggaacaagtggaatcggaaagcagcgcgcgcatcggcgcaggggtgagcggcaatttgggcgacaaggtttgccaaccaaagatggtggttgcagcgaccgtgcaaatcgcgccctggcaacggcccatgccgagccggtgatacagcttggcttcacgcatgctgtggcagtgacgcacttcgccaaacgtcacgctttcgcagcgacacagcagcgtgtcgttatcggcgagtttcaatagttctgcgcgaagcggaaaatgcttttgcaataacttggcgtaacgtggcgtttcattggctggcgtagtgttgttaagaaggtgttttgctaaacgttcggcgctggcaatcgcttgattcacgccagcaacttgggtgcaatcaccaaggctaaaactcttgacgttgacgttgcggttttgcgctgcaaacacgctcgttagtgtttgattcggtagcaggccatagccgcaggcgagccagtcacaatcgaaactggtttgccgtgattgattgttgctgaccgtacaccgcttaacttcggtttctccactggcgtcactgacccaggcgtttctcatcagtggcactgtgcgaagccgccagagcatgcctgcggcttgcacaagtagccgtggccagcgccatagcgaagcagcaaagcgaatcaactgccagcgactgcgctgttcgacaatggcctgcacgtttgctcctgcctgaagcaaggtatcggcaacggcaaaaagcaacggcccggtgccggcgacgacgacgcttttatcgcgcacttccaaaccgtctttaaccatgacttgcagcgcaccagcaccggtgacacccggtaaagtccaaccggggaatggcagaaaacgttcgcgggcaccagtggcgaaaatgagcgtgttggcgcgcaggtgaagtgcttcgtcgttgtcgtgcacggcatgcaatgcgccttgttgatcgcaagcgacaatgcgggtgttattcagaaagcgaatacgcggatgctggaatcgtttcagccagcgcaaggcgattttgggcgcttgtcgctgcgcggcgttgcgccaaatttggccgccggcaacactcatttgctcaacgaccgcaacgtacttaccttgctctgccagcaagctggcggcgacgatgccggccggcccagcgccgacaacaatgacatcgaatgacatggccgcgattacgcgttcaaccgcagcgttcatcaaccggcccctgcatttcggtaacgatttccatgccgtcgcggcaaaagcttaaacaagctagggctagcttgccgttgatgcgtacccggcattcctggcaaacacccatgccgcaacagggaccgcgtcggccgcgtatgccgatacgcgtagcgaattgcgaggttttggatagcgcgttcagcacggtgcaggtttctgtcagcaacactttttcgttgttgactcgcacggcgatggctggcgttggtttgcattcagacatgagccggctccgtcaggcgatggcgggtggggtagaacggtgtcgggtctatagccggtgtttgcccgccaatttgcgcggccagtagtgcggcagtggcaaggctggtggtaatccccaagccttcatgaccggcggcaacccaaagcgaatgttcggtttgaccgatgtacggcagattgtcgggtgtgcaagggcgaaagccggtccagg

SEQ ID NO: 1834 - DNA, 23075 bp, synthetic construct
  source 1..23075: mol_type = other DNA
  misc_feature 1..23075: note = Synthetic
cagttgcgctagtaatttacttaggttaagcggttcaacaatctgtaatgacttatcagcagcattgccagccaatcggatgacttgatgggcggtatcactgatggcaatgcctttattgtatagaaagtctcggagtagctcttcattaaaagacttgccatccgcttcaagaaaatagttcttatcctcaaaaaatatcagcccaaaaattcgccacatatcattttgcaaattcggataataaaaatccattttccagcgatgacgtggtggtggaaaggaacccaacatcaataaggcggcatgtggtggtgcaaaaggtggtaggggatgagtttctatgggttgcatagggggccccctatgtcacactagttgtccgatcatttaatttttacttttaacccatttagggtggcggataggatcttataatggcagttcataatcttgagtttaaagaacaactcatccgcaaatcattgcctcctcataatcaacgtatggcagacttgagccatgaaagtggtcttcatgtgaataccttgtacaagtggaaaaggcagttaattgcacaaggagtcatcgtgtccgcgaagaaaacgcacaccggtaagtggtccagtaaagccaagttgactgcactcatgcagacagccgccatgaatgaaattgaacgcgctgcttattgtcgcgagcacggtttgtatccggagcagctagctgcttggcaagccgcctttgaggaaatagacttagacgaggtgccggtcagtaaagagaccttggcggcagagcgccgtaaaacacagcaattggaacgcgaactacgacgtaaggagaaggccttggctgaaacagccgccttattgaccttatcaaaaaaagcccgggctatctggggggacaacgaggaaaattaattcctgctgagaccaaacagatagccgttacactagtcaatgaagcggtacagtccggtgcccgacgtcaacctgcctgcgacatccttgggattagttgccgtaatttacgacgttgggagcaggctgaggacttgcatgataaacgtcagcaaccggcgaaacgcagctattcgcacgccctgacaaaagcggagaaagcattgatgattacgacgtgtaatcagccggagtacaggcatttgccgccttctcagatcgtgccgaagttagctgataagggtatttatattgcctctgagtcaagcttttaccgagtacttaaagagtacaatcaactggcacaccgtggtaaggcgcaagcgcctcgcaaggtcgtaaaaccgacggcgtgggtagctcaggcaccgaatcaggtatggacctgggatattacttacttaaaatcgacggtcaaaggtcagttctatcgcctttacatgattgttgatatctatagtcgtctgattgttggttgggaggtgcatctggaagagagtgcaaagcatgcagctcagttgattcgtcgcgcctgcgtgaaacacaacgtgcagcgagaaacgctcgtactgcattccgacaacggcagtccgatgaagggtgccacgatgctagctaccttgcagcagctaggcgtgatgccgtcctttagtcgtccggcgacgagcaatgacaacccgtattctgagtctttatttaagacccttaagtacatgcctcactaccctaataagccctttgccgacatcacagaagcccgtcaatgggcgcaagactttaccacctggtacaacacacagcattgccatagcggcattcgctatgtgacgccacaggcgcgtcaccaagggcaagaccgagagatcttggcaaagcgtgcgcaggtctatgaggcagcaaaacaggcaaagtctgaacgctggaaaggacgcacaacacgcaattgggaaccggtggcagaggtgtaccttaacccatcagagaatcagctaactcaacgtcaaaccgtgaacttagcggcatgaaatatcggacaactcgcttgacaaataccgcgagataacaaaacatatgtttaagctgttgttatctaatacagattgattttcttttataacatccttaacgcctcaaaaagcactctataagcatccgcttttttctccaaagccagtggataagcacgagaggaggagggtaagcggtataagtttagctctctgttctcaaataatgttctgctcggttcaccaattttcggtttgtccgtgtttggtggcagtaatgacattagcgtcgtcgtcgctaactcaccggtcgtcatgatggtgtggcattgaggtagttgcgctagtaatttacttaggttaagcggttcaacaatctgtaatgacttatcagcagcattgccagccaatcggatgacttgatgggcggtatcactgatggcaatgcctttattgtatagaaagtctcggagtagctcttcactaaaagacttgccatccgcttcaagaaaatagttcttatcctcaaaaaatatcagcccaaaaattcgccacatatcgttttgtagatttggataataaaaatccattttccaacgatggcgtggtggtggaaaggagcctaacatcaataaggtggcatgtggtggtgcaaaaggtgggaggggatgagtttctatgggttgcatagcggacaaatcactaaatttgattgaagcaaatgtcattgtaaagaaacgtggggtttttgtaggtgtttggcgtgatgtttagttatatcgtgactacatatactaagagcttaaccttaagttgttgtgtggtgagttagggaaaaagccggatgtaccatttaaaggtacttttattgttcgaattagtccagggcttcatcggcaggccaccatagcctctaatttttccttaaatgcatttgttggcgaagcaatcaaagcaaagttagagcgtgagcaagataaagatatcgcttcaacttcgggcaaatgggcttggctaagaggtgtttattgatgcctttttgttatcgttagataacattttaagctttaaattattagtcgagtattacaattttaggatggcttttaactatgctttagactagactttattttctttgatggtccacgtaatttgttaaatgccgtgcgtattgcgaccgatgaaatcgcccaaaacaaaggcgctatgttagcgatgaacaatcagattaacgcagcacgctatgtgactaaaacacatactgcaaacgttgagtcatttaagtcgggtgattatggtgttttaggtgaggctatggttttgaagggggcggccagacaaccgatgcagttggagctattatggggggtgatcttagtccacaaaaagcccgtattttattgatgcttttattgcagcagggtaaaaagtccaaggacgaattgcagccagcttttgacctctagttttaagtagctgagtttatatatttaaaaggaagggcacagtattctctaggtatagagtgatgctgtgcccttaattatgtgggtgatgataacagtcattcgactgttggtaggatagtaggaggaacaacaacttcagttttgcgagttgtgcataattgtcagattttaactctgtgagagtctcagtcaaactgacgcgaataacttcggcgtctgggtcatccgcaataactgctgaaacgattttatctatatttcagtttttcatttgtgcttcctttagttttgttctgactgaattagttggctgacactaattcaatatttatttttttacctaaagctgtagcggcttttgctagtgtacttagggttagactagtgtcttctccatcgagcaagcgatttaaagaggctcaattagtacgcatttttcttgcaagttcggttttcgtaagctgttgttcttccattgccttagcgatttgcctggcaagtagcgttgtgtatgtcttgagtccatctagtacggaataaacctgatagacctaaccacattaaaaaatcgcgtagtggcgctggatatagcacgcaagcatcaaaaatagcagtaaaaggggagttcttcattcatagcccatcttcagttcttgggcctgattagctagtttagccatcgcatcatcgcttacttgttggcgcgattctttatactgcatcagatccccaaatttgactcgacgatgtttaccagtacgatgatatggaatctcgttgttttcgagtagcttaattaaatgaggacgtgaaacattgagcatgtcagcggcttcttgcgtggtgagttctgcatgaataggtaccacttgtaccgtgttgccatcagctagttcggctagaatatcaacgagtagacttaaagcggatgtgggtagttcaacttcatgtgcttgatttttctcatcaaatatttgaatttgttgtgtttcagcagttgttgtaagatatgcggctaaagtacgttggctttgtacggctgcccgtaattctcgctccgtaggcagcgtgaatttgcgctgaagtgtgtcagtgttcatttaagactcagcaactaaagtgattataattatagtgtatttttagttgttctattcgaaataaacgaaaatcgcaataagcgaaacaagatataacaacaccaagcacttcacccctcaacatcattttttagaacgactcacaaaaacctcacccaatgcaatcactaaacaacatatagccattaggatgagtgaaatagcggctgctgcgggcatatcggtgccaccttcagagactttgctatagagtagtagggataagatattcatctgcgtgccgactagggcaagtgccgtaccataggcacccatggtgaccgcagaggtcaggcaaaatgaggcaatgagtccgggcattacttggggtaccatgatttcccatagtgtgcgcattttaccggcgcctagactgcgagcaacggatagctgcacggggtcaaagttttgtaccgctggcatcatgatcatgacaacacgcggaatcagataataagaataagccacgcccagaccgatgggagagaaaataaaccctcccacgacggctggatccgcaccaaaataggctgcaatttgggtgataaatccagctcggccaaaggctaaaataaatccataagccacaatcaaaccggagaaggtcagcggtagagaaatcacaaagagattaatcgtacgccatttagccttcatacggctaagtgaaattgccacgcaaaacccgaccaccactgagatgagtggagcggtaattcccagtatcaacgtaccgagcagaccccgatggaatagagggtcattaagcacgcgcttaaaagcaccactgtctgatacggcttcaatcaggatcaccgtaaccggcaaaatgaagaacagcacaaacaagataatggcaggaaatgtcagtatgccaaaatggcgtcgcgagatttgcatggcttatagattgttatttaattagcgtttagttagcaagaacggctttagcccattcagcgtcaatcgtcgctttgtgagcagtagccttggcaatatcaattggtttgacctgaggtgcatcttccatcttgtcagcaacagcttcgctgagctctacaccttgtacagacgggcgaacaaagccttcagcaaagcgtgcttggccttcgtcagtcatgatgaagttgagccacagtttagcggcatttgggttaggaccattttttaccaaactaatggcatacggtgcggcggcagagccttctttcggtgtgattacctcaatatcatcacccatgccatcaaggtattttgcttttaaaccatcgttttcataaccgatccagataggaatctcgccctttaggaattgtgcatacggtgtggtaccgacggtgcgtagtacattgtcagtttcttgtagcttgccgaggtactcaatgccaggcatgacattatccatatcaccaccatgtgcaaagttagccgcaaatacgatcacttggccttgaccagttgagcgagggtcctgataaacgatggagtttttatattcgggttttagtaggtcttcccagctttggggcacattatcaactaatgcagtattaaccaaaaaagcgatatttaactgatgtacggcaaaccatttagcatctttgtcttttaagtcttcaggtaaacggtcgtagttaactggttcaaagctagtcacaacatctttttcaacggcatctagagctgaggcggcaaagtaataggcggtgtcagcttgtgggcgattgcgcgctttctctagagcaatcacagtggcggctgagccgaggtcgttgtaaactagctcaacgccagggtaacgctttttaaaggcgttaaactgtgcttgccagttggcccaggttggacccgtatcaaaagatacgaccataccttctttttcagcggctttatataaggttttttcaccctcataaagctcagcgccttcaaaagcttgtacagaaaaagccgccaatgctatgccggcagcggataatagatgtgctaaacgtaatggtttcattatcgctccaagagattgtttgtgttaagggattaaataaatggcctgagctgggatagtcattttttgaaatgcttcgcgtgacagtgtatcaacacgcagcacttgctcgccgacttgcaaatccagacgacgtgctgaacccagaaagcgatccagtacaaggtggccttcaagcaggttgtggttttctccggggtgatgacctggcataatgctttcaggacgaattaaggcggtcagttgtgtgccaggctgatgcttagtggtatcacagcgcagtaaaccaaaagaggtctgaacatgatttggttgattgcttaccgtgcagtctatgagattagcttgaccgataaaggaggcgacccagcgattgaccggtcggtcgtaaagatttttaggtgtatctaattgctcaatgcgaccatctttcatcacggcaatgcgatcggcaatagataaggcttcttcctgatcgtgggtcacatgtagagtggcaatatttgcacttcgctgaactcgtaaaatctcgtcacgcattccgactcgcaaggcagcatctagcgcagacaggggttcgtccagcaataaggctttggggtcaaagactaaggcacgagccaacgcaacgcgttgttgctggccaccggacattgagcgcggcatatgatttatccacttatccagactcacacgttccagtgccgttttagctcgggatagcctttcttctttactgacaccacggattttgagcgggtaggccacattttgtaaggcactcatatgcggaaaaaggccgtaggattgaaatacaatgcccagttcgcgcttttccggtggatcgttgctaatgtctttgccgtttaggatgactcgaccgctttgtgggcgattaaagcccgagagcatggtgaggagcgttgatttgccagagcctgaaggaccaatgacggcgagaaactcaccatcttcgattgtcaggttgatatcaaataatccatttggactgttgccatatctgaagtttacttgttcaaattgaatcggcatgattaggaacccttgcgtgtaaatagttgagcggcggtactgccgactgaagctagaattgccagcattaatagaatgacggttgcagcgcaggcaaagcctgttgctccgtaaaaggcttgtaataacacgaccggataggtgcgtgtgaggaaaccggcaatcaaattagataattggaattcaccgattgataaagcagtgaccatgagtaaggaagacagcacactggcgccaatcaacggtaggacgatatcacgcaagcgaacccagaaagatgcactgagactagcggctacttgctcgtatatggcaatattgcgttgctgcatatcggataaaacggtactgatggtataaggtaaagtcaatacgacatgtgccgcaatgagaagctcaatacttcctagccaaggtagggtattacttgaaaataccagaataaatccgaaaccaagcactaggtctggcaccgcaatgggcagtaatgccatgattttggcagctagtttgaccccttttctggcacttgaataaattgcataagctagtggtataccgatcagtagattgagaatactagtcgcaataacgacttttaagctagtagtaaaggcccgccgaaaactagggtcagcagcgacttgtttaaaccagtcgagggtaaagccttgaggtaagagggtattactccaagtttcgccaaaggatccaacaatcaataaaatgattggaataaataaaaagataagataggcagcagcaacaaaatgcaagataacctcacttggtaacgcgaaaaaacaatgctagcaaggctaacaaaaatgtataacaaaaattttaaacaggtagagaaagtagtcgttcggcacagtatattaatgcttgaagtatatcaccacaataaatgactccttccacttgtggtgcgtcacctagtgctaataccatttgattaaactgtaggccaaaagccatctccgataaggtaccatagccaccaccaacagcaatcaaaactggacatgcctgcgctaaaatggcattacgtgctcgaccaataccgctagcaatggggatagcaatatagtcattagccagacgccaatcctcgtcaggtagcacaccgatcgctagtccaccggcttcgtgatagcccctagcagccgcttccatcactccatttttaccaccacaaattagctgtaagccgatatcagcgagagcgtagcctagttcatgtgctagttttaattcgtcatcacttgcttctcgcggtccaattacgccaatgggcaaacgacgtaattgaggctgtagctttttgatggcttctagcggagttatttcagataaattgtctggggtggtgtcagtgccttgccaactgagtagccaagggtcaaagcgctgtgtcagcagcttgtttgactcttcggcgctttggaactcattacgatatagcacctgctctttttcagaccaaaggtattgtttcatgggtactccttaggacactaatctttaataattgaatatttcgaaatataagcgactagctcaggtaggttgtagtctgcctggctctgcgcagagtaagctatataaaaagcaagggacacaaaagcgaccgtcaatcatgacgagatcgacgttgaggttttctcttgggctacgctccaaggactactcatataggtagagtagttttgtagtttaccctctttagtcggtttgccccatcgaccaactaagccgatatcgcaataaagtaaatcagcgttaggagagtgatttaaattattttgaatggccagagtccagtctttggaagagtccactgaaatgatatgttttgctcctaggctatgtgcacttggggtactaccacctgaaccatattcgagataacaggttgaactagatacgtatttttcaaaaatagcgagtccgtttttaccgaaatgcggcccgagctttttagactcaaattttgctgacttaaacaagttttttcctttcaaaactttaataactctatgccaatagaagccattcggcataaaggaactatgtatttatatcacagttttttgacaagattattattttaaattgcgagtttttaactgatagataggttgtctgtaattgagggtttcttgggaggggaggtggagagaaaactgagggctgaaaaagaacgagcccgctaatagcgggctctgcattttatgctactttaattagcttgttagcgattaaagctcaattcttaatctgtaatgcataatcagtatactcatcactatcctttttgtaaagtattggttagacttaaagtattagcaacatgatgggagatgagatgtattatcgcttggcattggatgttggtagcaactcgctcgggtgggcggttatacggttaaagtttgatgaagaaactcaaaagtattttccgatggctattgtaagagctggtagtcgagtttttccagatggtagacatcccaagaccggggtatctaacgcagtagaaagaagaatggcacgtggtcaacgtcgtcgtagggatcgttatttacggcgacgtagcagtatgttgagacagctagtccgatatggtttttttcctgactcaattgaggagtgtaaggcattagttaagcttgatccttatgaaattagagcccggggcttagatgaggagctaaagccagaagagttcggacgggctctttttcatattaatcaacgacgtggctttaagagtaatagaaaaactgatgctaaagataatgagcacggtattatgaagcaagctattactgattttaaggagcaattgcaggatgagggtgtacgtactgtcggtgaaatgctatataagcggcttcagaatggtttgccagctagggctcgtttaagaactcaagttattcctcaagctaatggtcgcaatcgtaatgtaaaaagttatgacctttatattgatagaggaatgatggaggaggagtttgagcagttgtgggagtctcagaaacgctttaatcctgaattttataatgatgaaaagaaagaaaaactctggtttaccgtgtttcatcaacgtcctcttagacctatcagtcctggtcgttgcacattttttccagatgaggagcgagcggcagtagctcttcccatagctcaaaagtttaagcttctacaagaagtgaatcatttgcgttatgttggggaaaaagggcaagccatccctttgaccttagagcagcgtaatcttgtactcaatgaattagtcagaagtagaaagtgtacgtttactcaattacggaagaaattaaactttcctggatatgttcgctttacgatagaagacagcagacgaactgaacttccaggcgatctagtatctgctgagctatctaaaaaaacacttttcggttccaggtggtttggttttgatccttcttttcagactcaaatagttaagcagttgcttgaggaggaaaatgaaaaagaactgatttcttggttagttaagaacacaagagttgatgaagtagtcgcttctaaaattatccatgctactttaccttctggttatattaatttgtctgaaaaagctctaagtaaaattgtcccagtattagaggatgaagttatcacttatgataaggcagttaaattaacctcaattggtagtcattctgaaattagcaagtatcatgacggtgaaattatggaatatttgccgtattatggtgaagttttgcatcgccatgtgggttttggtacaaataatgtcgatgattcggacgaggttcgatacggtaaaattaataacccgactgttcacatcggtttaaatcagatcagagtcgtaattaatgcattaatccgtgagtatggtcatcctaagcaggtgatcgtagaattggcacgtgacttaaagctcagtgctaaggcaaaagagcgcattaaaaaagaacagactgtaaatcagcaaaaaaataaagaacgaagagaaaagatatcccatcttctaccgaagactgcagaagaagtgacacgtgatgaccttcagaaatatattttgtgggaggagttatcaccgaatccgctggagcgttgctgtccctatacgggtgagcccataccatgtcacaaaatatttagttcagatgttgaagttgagcatatcttgcctttttcaatgacacttgatgactccataaataacaagacattgtcttatgttcatgcgaatagagctaaaggcaataggacgccatatcaagcttttggaaaaaacgatattgaaggctacgattatcaagctattttggcacgaactgaagtaatgagtaagcaaaagtcttatcgttttgcgattgatggatatgagcgttggttacgtgagcatgacggtttcctagcgagagcgcttaatgacactgcttatatgagtcgactggctaaagagtatgttagcgttatttgtcctcgtaatactaccgtggttccagggcagttaacaggggtgcttagaagacatttaggtcttaacaatattcttggtgtggatggtgagaaaaaccgtaatgatcatcgtcatcatgctgtggatgcgtgtgttatagggattaccgatagagctttattaaaacgttttgcagatgccaataagtttgaagagcacggtgctcgtagtcgcttattacaaagagtggaagacccttggcctacatatagggagcaggtgaagcgtgctgttcacaatatatgggtgagccataaacctgatcatggtcatcaagggcagatgcataatgagactgcttttgggcaggtttccaaagggcgtttcagatatcataaaagtgaagacggtaagcgtactccgatgtttagagagaatcctgatgcaatgatttctattacaagtacaaaagcaaaaaagcgtcatggcacattacctgatgggacaccaaaaccttacaaatattacttgaaagacagtaattactgtatagaaatttatagagaagataacggcaagtggtcaggtaatatcgtttctacttttgaagcttatcagattgttaaaaaacaaggtttagaaacactccgtaatcctaaatgggcccaaaatggtaagcctttagtgatgcgtctgatgcgtgatgatatggtaaggcttgaacataatgatcggcttttggttgttaggctatgcaagattaatagttccggtcagatgttttttgcagagcattttgagtctaatgtagccgctcgaagcgtaggcgttgacaaggattttgattatatttcaaagactccaaattctttaaaaagctctgaaggtagaatagttactatttcaccaaccggtagattacacgatcccggatttagggagtagtgtcatggtgggacggattgttgaaattgctagtgattaccggaatttgtctctctatcgaggatttttattgattaaagactctaaaggggaaagggtagagttagggcgagttccaatcgatgatatcgatgccttaattgccaacgctcatggtctttcttatagcaataatcttttagtggcactggcagagcagggggctccattcgttttatgtggtgcaaatcataatcccgttggcgttctttggccatttggaggtaattatgagacttctagacggattaatgcacaaactgatgccaagcgtccagttaaaaaacgcctttgggctagtattgttcgtagtaagttagaacaacaaggatgcgtgttagaggcaataggagagtctgacaggtttattcataatcttattcgaaaaatacgaagtggtgatcctgagaatatagaggctcaagcagcaaggagatattggacattgttatttggcagtgagttccgccgtaatcgacaagctgaagattttaacggacttttaaactacggatatacggttttgagggcatcagttgctcgtgcagttattgctgcaggcttgcatccagcaattgggttgcatcatagtaacgcatcaaacccaatgctattagttgatgatttgattgaaccttttaggccattaatcgatttgggtgtttatcaattagtaagggagggggaggcacaagttaatgcagatacaaagcgatttttagtacgtttgttataccaagatatgttgacagaatcaggagtgacacctctttctgtttgtgctcaaaaattagccgtttctctagcacaagtttttcttggtgaacgagaaaaattggagttacctttacctagcgagccttttgctatgtaaggcatattcataaggagaagttataatgctatcggggtacagacttatgtggatactcgttatgtttgacttaccggttactactaaatcagagcaaaaagaagcaactgaatttagaagttttttactagatcagggttttgaaatggcgcagtttagtgtgtatatgcgtttcttttccagttcaaaacaaatagaaacctgcagtcagcgagtgtgctctgcagtacctaaaggtggtaaagttagtattatgcagatgacggataagcagtatgaaagaataatatcatatcaaggtcaaagcaaactacctgcaaaaaaatcaccagatcagtttgaattattttaaaaatgaagattatattactacaaaaccccataaatctctatttaaaacagagggttatgaggtttatagtttaacagattaagaattgagctctaaccggaacttaaactaaaggacagtggattgtgtcggcagtttaacagattgagacttttgcataaaagcagttaaataccggatttctgttctacttggaaattttttgattttttttggaaattttcgacaaatttcaccccgcttttatcgataaatgcctgttttttagacatttatctgcctaattctgccttttaggcaaaattaggcgcaactatcctaagcttattggcagcttttaaacaattgatgcaaatcgctttcaaaagcgactgcgcatgcaccttgacgagactaaaatagcttgcccgcttatgtttgaatttacggtgcagcgtgccgaaactttgctcaatcacatagcgagtcttagataaacgcttgttgcgttctatctgctcacgtgtcaacactgaaccgcgatgcgccttttgcataatgccatcttctaagccgagcgcttgtaatcgctttcgattctttgcgctgctatagcccttatccgcttctactctcgtgccctgtttcaaatcattaacgagcggttcaagttgattaacctcatgcacattagcgggcgtggtattaagcttttcaatatagccctcaccatccgaacgagcatgtagcttaaagcctaaatggaagtcagcccccttttttgtccaacgtgcatccttatcagtgcttggtgcagactcatgatactcaccgtcctcaagctgctcaattgccttcattttcttacgacctgccgtttgaataatcgtcgcatcaaccactgccgtttgcgccttggctacttttagacccttctcgcttaactgctgattgataagcactaacagcttatccaataaaccctcctcagccaaccaattacggtaacggcatagggtactgtgatcgggaacgtccatatcatcaaaaccgcaaaaaatcgtaaaatcaatgcgagtcaccaaactatgctcaagctccggatcggagaggctatgccattgacccaataggactgccttaaacatggcgagcacgggataactcggacgaccttgttgagtcgtcaatcgacgctgcttttgtgaattgaggtagcgttcaatcggtcgccaatcaatcacttgatctaacttaagtaacggaaaacggtcgaggtgtttggcaatacgggctttggcggtttgttgaaaaaaactactcatgggactgaagtaagaaagcaaggaaataagccatattttaggaagtttgaggggttattgcaaaggtctcagattaagaattgagctctaaccggaacctagcgaagttggtgaccacttgacaccctagtttaacagattaagaattgagctctaaccggaactacgtgagtaacattgcgaaggtgcttaaaagtttaacagattaagaattgagctctaaccggaacaatttgaggaatcaagatgtaatttaagtaagtttaacagattaagaattgagctctaaccggaaccattgcaagatgttcgaccagcatcaattaagtttaacagattaagaattgagctctaaccggaacctcgttacctacctcaatgcagccatgctgagtttaacagattaagaattgagctctaaccggaactggtcgaacatcgagacgctgttccctgcgagtttaacagattaagaattgagctctaaccggaacatttgtgatgcactcagcaagcttaagctgagtttaacagattaagaattgagctctaaccggaactggagcatgcttgccgagttaaacctaaacagtttaacagattaagaattgagctctaaccggaaccacagctcgctgttcttccgaacttagatcagtttaacagattaagaattgagctctaaccggaacctctattcataattaactccaaagagccaaagtttaacagattaagaattgagctctaaccggaacagaagagctagagacttagccggattgtcaagtttaacagattaagaattgagctctaaccggaacgactggcccaacgacgcaagcgtgtgtttcagtttaacagattaagaattgagctctaaccggaacgtgtaccgtaaaatgtggtttgttgtacgcagtttaacagattaagaattgagctctaaccggaacctgacagtctttaaccgcaccggtatttggagtttaacagattaagaattgagctctaaccggaacattgtcaatcaccgcagtaaccgaaccacgagtttaacagattaagaattgagctctaaccggaactaagcatagttgtattccggatattccaatagtttaacagattaagaattgagctctaaccggaaccaagatggcggtttgactagaacgctcacgagtttaacagattaagaattgagctctaaccggaacaataatgcaagcgtatatgacgacgctaggagtttaacagattaagaattgagctctaaccggaaccaagtcatttactttgatgtaatcaggattagtttaacagattaagaattgagctctaaccggaacttagttaataactctcaaaaaactatgccaagtttaacagattaagaattgagctctaaccggaacagtggcttaattttatccatcaagcgattaagtttaacagattaagaattgagctctaaccggaacttaaaagctttgttaacggcaatgtaataatgacccccatcggcagttgaattttgaccccctagtttttaaactagcggtttttcaggccgcttatgttaactcaggagatggtagtgaccatacaggtgttaaaaaaacgggggcaatctatcaaagcgattagccgagaaacaggtatttcacgtaacacggttaagaagtaccttaacgagaaatctactgcgccacagtatcaccgacgcgcaaacagggtaagtaaactcgacccttataagccatatattcaccagcgtatccaaagcgcatcgcccgattggataccagcagccgtgctgtatcgagaaattgttgagcttggctatcctggcaagatacgcctgttgagcgactatgttgctcaatttaaaccgactgctccaactgacccattggtgcgctttgagactgagcccggtgaacaattgcaggtggactttacaattatccgtcgtcagggtcagccactaaaggcctttgtagcgaccttaggctattccagagccagttacgtgcacttctttgataatgagcgtagtgagtcttggttaaccggcttacggcagtcttttgacttttttggtggtgtaccgaaagaggtgttatttgataatgccaaagccatcgttttagaacgcgatgcctatggtgttggtgaacaccgctggcacccagagttgctcctgctggctaaggagtatggtttccagcctcgtgtctgtcgtccttatcgtgctaagacgaagggtaaagtggagcgatttaatcgttatttaaagagtagctttgtcgtgcctttgcaggcgagcttacgcgccgaaggactcaagctggatgtgcaaacagctaacggatgcatcgggcactggttgacgagcgttgctaatattcgcatacacggcacaacacaagagacacctaatcaccgactcattaaggagaaagaggcgttactgccgttgccgataagaagcggcaatgtcgtcgttgctccttcgttgaatgacgtgccaatgccgattgagagcttacagcaccccttatccacctatgatgcattattcttaggagaaggccatgagtttacaatctgaacgcattgccgacatgtgtcggcaattaggtctttatgcgattgacgaagtctggtctaacgtggctgaacatcacctaaactcggaaggtacttatgctgactttgttgaacagctactgactgaggagctaaaggctaaagcgctcaggtcgcagaccgccttacttaaattggcagcgctaccgagcattaaaaccctcgcagagttcgactttagctttagtagtggggtgccgaaagccaagattcaggagttaagctcgcttgccttcatcccacgccatgagaacgtcgttatgctaggtcctagcggtgtcggtaaaacacacttggccattggtctagcttataaggcggtgatgaaccatttaaaggtacgtttcattacggctgctgacctaatgcttcacttggtgactgcgtatcgccaagataagttaaaagcctatatgaaccgggtcgtcatggcgcctaaattactcgtgattgatgagataggctatttacccttcggccgtgaggaagcgaatttattctttaatgtggtggcaaaacgctacgagaaaggtagtaccttattgactagtaatttaccgtttagtcaatgggctaacacctttgcggacgataccacattaaccgctgcgatgttggatagacttttacatcactgtcatgttgtgcaaatgagtggtgaaagctatcgattaaaagataaacgaaaagtcggtatgctgccgattaatacacagatttaatatcgtctagggggtcaaatttagattgccgattatccccaaaaggggtcaattttaaattgccattgacatgcccaacctttgaaggcggtaccaattatagagcgacaattaattaattcatttggtgggttttatttggcttgtttgtttagtggcgtagtggcagagtcaatagtaaaggcaccgattacgtcatgaatgctggtatggtcttctagtttttcaaactgtgatgatagtttttttacgaaattaccaatggccaccgcattagcctccgttagcaactttaccgttgggtttggatttgtgctagttttaataatgtccctagcaaaaataagtgcaagggtatctgcttgagattttttcatcactgttccttatgttggttgctgatgattggtaagtggggaaagttatgagaatttcaaacgttgaacacaaaattttctctgtttaattgttttttggatggcaagagaaatgtgattaaagggataactgtatgtggagtttgctgtctatgcggcagagaatgttttgaactgtcaaggaatccttgacaactgtttctaagaatctgagtctgtagataaagaaatgcagacttttaaccgactctgtcctttcttacacggcaaccactgacataggtgatgttgttgaagtttttgttactcgagtgcctgttgagggattacgtcaattaatgcatgaaataatagattgtgaattaaagtacgttgactgcgtagataagaaatttcacaaactctttgagcctgatctgtgttgtgttgatgtgcagggctagggctttctcgacatgctcaagaaggtccatagttcatttttaagctttaggagtatttaactattccaacgcatcagcaccactctaaagcaggcaaaaaaaagccgctagaccagtaagggcgcggcttttatgggtaatcacggcagactattgtgtatagtcttggtaggcggtaccggagtcgaaccagcgacctctacgatgtcaacgtagcgctctaaccaactgagctaaccgcctatatttgataagaaaatgattatagggcgtacttttaattttgtcaaactcaccagccgttttattcaatatttaaggcctgttcacgtaattgttctacatagagtttcatctcaatgacggcgttagtattgtccaaggatgctgatttggatcctatggtgttgatttccctattcatttcctgaaacaggaaatctaaacgtttacccaggctttgcttgtttttagtgttgttttttggaagcggtttagtcacttcttcttggtgaagttcagctgcgcttgggccatcgtgtttattacttaataaagagcttaattcactggtatgtgattttaagcgtgtgatttcctcggcaatatccacacgcataccaaagagggcgctttcttgggcgatgcgcatagatagctcttcacccgatatttgctcaaagccattaggggcaacggcttgtagggcttctgtcagacgttgttggattttttctttttgtgcctggattaaatcgtcttggcgcagttcaagttgagtaactagggctagaatcgcttcggcgtagcctaacatagtatcagctaatctagcgccttctcttaaacgcatagccttgaactccttaatcgctaaatgcaccgtgtctaaacaacgctcataaattaactgccagcgttgtgcttcttcattttgctcagcttccgagctttgtgctagggcttgtgctgttttggctaattgcacaatctccgtaaagcctggcgtcggcatatctggaaagtactgccgtacttttttaatttctgttaagaccggcgtcatggcctccgcactaaattcagtttgctcctcaaaaagcgcaggtttgaagctgatctttaattcggctttgccacgctgtaaatgttgtgcaagtacttctcggagctgctcttcaagtactttaaaatcttcaggcatgcgtaagctcaagtccaaataacggttattcacgcaacgcaactccactgaaagtgtgccgtattcaaactctgttttgacattactaaaagcagtcatgctggaaatcattttaagtcccttaaaagtgcggtgctaatggtataaaactcacgataaagccttataatatggcatatctgaatatttgtaaaaattatcgaggaaattatgcctaacacaccctttagtattgatattcaacggccttccggacgtgaaatttctgccatgcgtcaggttaaaattactcgcaattttacgccttatgctgagggttcggtactgattgaagtagggcagacaatcgtactatgtaatgccagtgtgctggataaggtaccaccttttttaaaaggcaaaaatcaaggctgggtgactgccgagtatggtatgttgccgcgttcaacccatagccgttctgagcgagaggcggcacgtggtaagcagagcggccgtactcaagaaattcaacgtttaatcggtcgcagtttgcgtgcggtgacaaatctctctaaactcggtgaacgtacgattcatttggactgtgatgtgattcaagccgatggtggcacccgttgcgcttcaattactggtgcttggattgctttggcagatgctgtatcgaagctgctgagggaaaagcaaattgatgataatcccttaaatgaccgtgttgctgcggtttcagtaggtatgtggcaaggacaccccattctggatctcaattatgaagaggacgcatcatgtgatgctgatatgaatgtggtgatgacaggcagtggtcactacgtggagattcagggcacggctgagggacaggttttttctaaaactgaattagatgccttattgagcctagcaggtaagggcattgcccaactattgcgcgtgcagcaagacgcttggccccaactataaccgattaatcagcagcttatgtctttacttactacccttgatgagattgttttagcttcaaataatcagggcaaactcaaggagtttgtcgctttatttaatcagtatgggattagcatcagagcgcagggcgagtttcatgtcgccgagtgtgacgagccttttcatacatttttggaaaatgccctagccaaggcacgtcacgccagtaaagagacgggtttagcagcgattgccgatgattcaggtatcgttgtgccagcgcttaaaggctttcccggtgtgatgtcagcacgctatgcgaccttattcggcgagccaaagtcagatgccaataataacgcctgtttaatccgtcaattacaagcacatagcgacaaatcagcggcctatatagcggtgcttgtctttgttcgacacgctgacgatccagcgcctatagtggcgcagtcctggtggcatggggtgattgtggaggaaccgcgtggagccaatggctttggttatgacccgcatttttatttgcctgactatggcctgacggctgccgagatggagcctacacttaaaaatagtttaagccatcgagccgctgctttaaaaaaattaattgcagaaatggatgaagcgcagcagtgaagaccattccaattcaccgctccaccaccgtagctaaggtagcctctcagccaggggattcattaggtggcgtacgaccacagtttgtagagacattgccacctttgtcgctctatgtgcatgtgccatggtgtgtgcaaaagtgtccttattgtgattttaattcacatgccttacagggtggtattccagaagcgcattatttacaggccttggaagcggatttaatacatcatttgccgcatatttggggacgcaccatacacaccgtctttattggtggtggtaccccaagcctcctttctgcaaaagccatggaccatttgctaagtatgttaagaaatctcttaggcattgttcccgcgattgaaattacgatggaggctaatcccggtacggtcgaagcgactaaatttaaggagtttgccgca

SEQ ID NO: 1835 - DNA, 23069 bp, synthetic construct
  misc_feature 1..23069: note = Synthetic
  source 1..23069: mol_type = other DNA
ttgatggctatgctcaggcgactatcgtcccctcgacgcaatgaatccgcagtcagccccagtgctctgacaagctcgacggtaaacaaccaggcgacaattccgtcttgttcggtatccgcttggcgttgtagcagtagcgcagtggcattgaccgtggtcaagtctggatgctcattccagaattcagttgatttcaggatgacatgatcaaaatcagctcgaaggaatgcagcatacagttcgactcccatgtgctccaactgtgcctgcgcaattaatcctgcagccatggcaggcaatcctccaagctggtaggcgcctgcagcgagcaactcaataggaataatcgtccggatatcgtcgtatgctcgtgagagccattccagaacctcgccagttcgccgaaagcattcgagtgcgcgaatcgatgtcggaccttctattgaacggaagatatgaccagcttgaagcagacggcgggcatcgttcaattgccgggccgagtccttgtcgccccactgaatgaccggaacctgccatgtggtttgaagacagcggacataagctttcgcttgtggccggctgagctggttttctagtgccagctctctacggatctgctcggctgcggccaatcgatcctgattaccttttgccattagttgttctgccaaagcgaagtgtagagtgcgtcgataagaaattcgccgtctttaagaacaacctctgcaacctgcagatcatgcggcgcagtatattcggggggaggcgcttcgtaaggaaccaggcaagttagctcttctcgcttgctagaaccattaccgatgattaagaccatatttgtccgagcgggctggggccctttcccgaggacggcccgatcaattgagataatagtggaggaatagccaccggggtcggtcgcctcaaggattctctggagttgccttaggccatgcggtatgggcgtatctcggttcagctcgaaccagatgccgcggccgttatggacgctttcccctgtctcgggatttttttgtttgggcccattcagcagcgcatccacgacagattggctcagttttgcacgccactttgcttctccaacaatgacgcgaacaacctccttctttgaattaagtgcaattccaatgaaatcactgccgtgcctgccgtagacctcacgtgtacggtcctggtcgaagcggagtgtccatagatatttttcaacgtcctcgtgcgcacggaaaagaaaaactggtactttccagtcatgagcaccgacaaactcgtgtttgtacccttcagtgatcaggcccgccatgacctcgccgaataaacctcgacgagtgatcataggtagacacgcaggatattgaatctctgtgcctcgcccatcatcgtcgggatggagagatattcctatttgctcatgaaagtggcttcgcgcgtccaggtgggcagattcaaaataagaccgtagtgcatctaccaaaggtttcccaacagcagttttctgctctagaagaagatgcccatagttaccttcaacagtaccgtttggatctaaccatcgatttagtgcatcggttggtggtgggcaggtatgcatatgaaggctggctgtttttacattcgtgttatgaaaatccaagcctagtgaacttgtaatcaagctagcgctttgcgtctctaatctcaccaggcatgaagcaaggaatccttaccagatatcgacaagtaccttcaccaacacatcgacggctcagtgcacaagatctatagctatattttgtaacacatcacgagctatctagcactccccgagatatgccgatcagcttggttggctgatattccttggccatcgtcggggaagtgaacgcggcaccgcgcccagcaagcctaagcgcaaagcccccaagagctgagaatagccgtcaggctgcaagcatgtgcgagcccgtgccttgacggaggacatgggtcataaccttcttgttttttatccttatttaaggtataaaaaccggaagttcactaaggacaccacccatgcctctagcccattccgaacccaacgatgttgcaagctgtttggcccagctcggccttgaggagagcaagctctctgaagtggtcaagcgtggatatcttgccttcgcgtcgtgtacagcgaatgatccgccgctctatcctggattcaatgcatgggcggtcacggtacgtgccttgcgcgaatacctgttgcccgccggatgggaacggtccaacgagaacaactattcgctagtcatcaatccgactgggacggtagcgattgccgtggccactggcgacgaaggaaccggccgctccactgccgctccaatgacaagatcgtcgaaaggtccgagcaccgccgaagcggtcacatcgaaccaattgcagctcgacctcatcttcccgcccgtcacggtgccgcccctcccggcagttgacgacgcacaacggatgacatggattttgctggtccaccgcggccagggtgaagtacgttgcgaactgtccctgccgacgtcgatgggaccagacgggcgcgtagatggatggcaggaacggatcattctgggtgctatcccgactgaccctgatattgtggagatcgttcctccgtcgccgccggaccagccggacatcaacgtcgacgtcaagcgtcgagcatgatccaaggcgcactattcaacccgtctcgtctgagccttgctcgcaaacggcgcgggctgactatgaccaagctggccgcagccatcggtgtcgaaccgcgctcgatctcggcctacgaaaagggcgaattcggtcccgatgagaatcggcttattcaattgtcttccgtcctcggttttcctgtggcgttcttcttcggagacgacttagacgagccgacgccggacattgccagtttccgcgcgttatcgaagatgaccgccggccagcgggataccgccctcggggcgggcgccatcgcgcttatgctgaatggatggatcgagaagcgctttgaactacccgagccggatctacccgaccttagccgtgaagatggaccagaagccgcagcactcgccttacgccagcaatggggactcggcgagttgccagtcaagaacatggtacatctcttagaggcaaagggcgtccgcgtattctcgctgtcgatcgacgctgccgaagtcgatgccttctcgatgtggcgacagagaacacccttcgtgttcctgaacacgcagaagtccgcagaacacagtcgcttcgatgctgcccacgaattggggcaccttgtccttcaccggcatggttctccgcaaggacgcgaagcggaacgcgaagcgaatatctttgcttcagcgtttctcatgccgcgagcaagcattctgacctacgccccacgcatggctacgctcgaccacctcatcaaactcaagaagtactggaacgtttcggtcgctgcgctgacctatcgcctgcatgcggtgggcgtgctcagcgattggcactatcagacgctctacattgagctgtcctcgcggggctatcggaagaaggagcctaacgaagggctgcgagaatcctcgcaaatcctgcaaaaggtctttacggcgttgcgtgacgagcggatttcaaagggggatatcgcgggggaactgtgcatccccgcagaagagctagatcaacttgtatttggtctcgcactcaccgggttggttggcggaggcaaaagtaaagcccccacgggccaacggccccaacttcgtctcgtaagctcatagaaggacattcgaaaatggccaagaaagacatccatgtcgtgccgcacaaagagggctgggcgacaaagaaagaaggtgcgcagcgcgccggcgcggtggtcgatacgcagaaggcggcgatcgaacgagcgcaggagcaggccaaacacgagcgcgtcgaagttgtcattcaccgcaaggatgggacgatccgcgacagcgacagctatggcaacgatccccgtcctcccatagacaagaagcactagctatccccacccataacgagaaatagccgaccaggccactttatgaccaatcttctactgcgccaatcatcactgcctgacctttgccctgtaacagcggcggttgaggagcttgcgcatgccggcggcattgaagaacgcggcgcgatcttcactcggcgagaggtagtggaattcattttggacctagtgggatatactgacgaccggccgttgcataagctcacgcttctcgaaccatcgttcggcgatggcgacttcttgctacccgccattgaccggctgctaaacgcctggacgtccagcaacttgaccggagatcctctcggaacactccaccattgcattcgcgcggtggagcttcatcgtgacacattcaactgcacccacgcggccgtcgtcgcccgcttaatcgagcgtggcgtagccacacgcactgcccaggctatcgctgacacctggctagtccatggcgacttcctgctcacgaagcttccctcagcctttgacgtagtggttggcaatcccccctatgtccggcaagagatgattcccgcagccctcttagcagagtaccgcagccggtatgccacgatgtacgaccgggccgatctttacattccgttcatcgagcgctccctggaacttctcatgcctggaggggcgctcggcttcatctgcgcggaccgttggatgaagaatcgatatggcggcccgttgcgcgctttagtcgccaacggatatcacctaaaggtatatgtggatatgacggacacgccagctttccatgcggaggtggctgcttacccggcagtgacagtcatcacccgcgagaaagctggtgtcactcggcttgcctatcgccctgccatcgaccgcacgaccttagcaaatttggccaacgctctgaatgcgaagaagctgcctacagaggaatccggcgacgttcgcgagcttgctggcgtgacggctggcgctgagccctggattctcgaatcatcagaccaactcgcaatcgtgcgccgactggaacgcgattttcccgcgatggaagaagccgactgcaaggtggggatcggggttgcgacgggagcggaccaagccttcatcggcccattcgacgctttggacgttgaagacgatcgcaaggaaccgctggtgatgacgcgtgacattctgcgcggtgtcgtcgaatggcgaggctatggcgtcatcaatcccttcgccgacaagggaggactggtcgacctcgctgactatccacgcctaaaacactacctggaaacgcacaaagataagattgccagacggcactgcgccaagaaggcaccaggtaactggtatcgtacgatcgatcgcattgcgccctcgttgaccagaaaaccgaagctgctgattccagacattaagggagaagcgcacatcgtgtatgaagaaggtaggctttacccccaccacaatctctactacgtcacctcggataaatgggatctgcgggcactacaagcggtgttgttgtcagcggttgctcgcttattcgttgcgacctattcgacacgcatgcgcggcggcttcctccgcttccaggcgcagtatctacgccgcatccgagtgccaagatgggaggatgtgcccgaagcgctacgtggggaactaaaacgggctgccgagacccaggatatctcggcctgcaaccgcgccgcgttcaagctctacggattgtccgaggaggagagcgcggctcttggaggaaacggtgactaagcatggcacttgatttggtcgactacgaacacaaagcacaagaagccgtcatggccttctggggcaatagagaaaaggcaaagcaaaaacagatcgaatcgggcaaagccgatcagggcgagcgagctggtgtgacggccggcaagaatatggacgggttcatttcgttgatcatcgacttgatcaaggccaacggcctcgcgcacgccaagattcatcagaaacgcgctgtactgactttgcctggctattttcggccaacaaagctatgggacctactggtgatggacaaaggggaactgatcgccgccatcgagctgaaaagccaagtcggaccttccttcggcaacaacttcaacaaccgtaccgaggaagcgatcggcaccgcgcatgacttctggacggcttatcgggaagatgcgttcggtgatcagcccaaacctttcgtcggctggatcatgctcgtggaagatgaaccggcgtccagacgcccggttcgcgatgcctcaccccactttcctgtctgcaaggaatttcagggcgcgtcataccagcaacgctacgatatcctctgccaacgtttgatcaaggaacagctctataccacggcagcgctcatcacctcaccacgggctgccagcaccactggtgaatacggttcactgtcagacatgacgggcctcaagagtttcgtcacttcgctcgccggtcacgcggcagctcaggcagcgagattggaataaaaattgagcagctctcgaacagacgaaagcatgcgcctagcgcttgaatgacacatgcacaagacagtcgaattccagcgtgaggacctcttcgccaaagtctgggccgtgccactgcttaagcttgcgcaaagcatcggcgtctccgatgtcgccctggccaaagcgtgtcgccgggccggaatccctctacctggccgcggccactgggcgaagtctgaaggcgctcggcgcgcgaagcctaacttgccagcactcaagaacccgtattatcagactgtccgcttcatggtggctgatgcgacgcttctgcctttgcccgttcagcgcaaaccagaaaaaggcgctcccattgccgtccctgcccatctcgatgcccctcacgccttggtagcacgtacgctcaaggaagcggctaaagccaaagtagaacagggatacatccagctagacaggcagcgtgcgttggatatgcgagtcagccccgacaccttggatcgcacattacgcttgatcgatgcgctgatcaaggcctccgaggcccaaggccaccgctggcaagtcacccaggatgccaaaacgacggtcaccgtcgacgggcagacgtttcatttctgtgtacgagaaaaactcgaccggcacgagcttcctccaccgccaccacctccacggttgccaaagcaccgctgggagccggatctcgatgcgttgctacgaccaagacacatatacgaatggacgtcgactggaaagttaagcatcagcatcgacggactgtggttcgtccgaacagtccaaaaaaactggaatgataccgaccgcacgccgcttgaagccaaactacatgaagtactggcagggttcgctcctgccgctgcagcgattcagatccaacgtgacgaacaggaacgcagaagaaaggcggaggcagagcgcgccatccaacgggaggaagaagcacgacgccgcgctcatcagcagcaattgcgcattcgcttggtacgcgctacaaagcgttgggagcaggctcagcgcctgcgtgatttctgctcggcagttcaagcccaactggaggcattgccgtctgaagcccaggcttctggacaagcatggctgcaatgggccttagaacagatagacctgcttgaccctctacagagcaacctgccaagtcttttcgatctggctccaccgaaagacacttggctctcttccagttcttcaacgctccctgaagacgattggtggacgacaagaagacgctaaacgattgagcttggctcgttcatgcgaatgtttgccagcaggccacaacgtgtgccacctgaccgaatggcggctgcttgttcgcaatatatctacaaatttcggacaaaacaccgcggccagcagatacgctacacttgcacgcactgttaaacagtggctctccggcgatttttcgattcagtcccagcgctgcatttatcggtcatggtggcccacccgtcttttctatgcaacagttacactctaagtcccctagggtgtccccctataaatcagaaaactccacaagccttataaacattggcgttgccgccaacgtgtgattccggccccggcaccactctaaaaataccaataaattcaagcttttagagcggtttatattcccaccccaagactgggggattttccaagtttgccagccaggtacagtttcggtacagtggtgaagcgccgagtgtacttttcggagctttgactcacatggggctcttccccattaatgaactgcaccccaaaagttggacaccaatccaaccttcggggtattttttatggcgcaatatgacgaggaatttaagcaggcaatagttgaggagtacttgaaaggagcctcaggctacaaggttctatcagccaagttcggggtgaatcgtatgacgatcaagggctgggttaacctttatcgccaccatggcgatgcggggttgcgtaagaggcccagccattacagtgcccgatttaaactttcggtgttaaatcagatgtggcagcaggggttgtcattcaatcaggtggctgcgctgtttgatttgcgtgggggagccagaatggtttcgggctgggcgcaccggtattatgagggcggtttagatgcattagagccaaagccccgaggacgcccgaagaagatgaaaaaccccgaaaacccgttgcctgctcctgtgcggccacaggatgcccgtacgctggaagatttgcgcaaagagaatgaatatctgcgtgcggaggtagcgtacctaaaaaagttggatgccttggttcgagccaaaaagcaggttgcgcccaaaaaacgcaagctgtaatcgaactgaggcagcagcattcactggcgacattgctcaagatcgccaagctctcgcgcagcacgttttactatcaagccaagagccaacaagggagcgacaagtatgccgctctgaaggcccagattcgtgaggtctacgagcgtcacaaggggtgctacggctatcggcgtatcacagcagagctgcacaatgcgggctcaggggtcaatcacaaaacggttcagcgcctgatgcaactgctgaagttgaggtcgctggttcgccccaagaaatatcgttcttatcgtggggaaatcaattctaatgtgcccaatgtgttggatcgacagttccgggcggatcagcccaaccagaagtgggtgaccgatgtgaccgagttcaatgtccgaggcgataagctctatctgtcgcccgtcatggacctatacaacggggaaattgtggcctacgaaacacaaagaacgccgcaactgccattggtcagcaacatgctcaaaagggcgttaagcaaactcggtgatcgccaaaccccattacttcattcggaccagggctggcagtatcaaatgcccgcgtatcggcggcagttggcagaatatgggttgaaccaaagcatgtcacgcaagggcaactgcctagataacgcctgcatggaaagcttctttggcatactcaagtcggagttcttctacctaaacaaattcgatagcgttgaactgcttgacgctggcctgaggaagtatattcactactacaatcacgagcggatcaagaccaaattaaaaggactgagtccagttcaatacagaactcagtactcagtgggttaaccacccgcttcaaatgtccaactaattggggtcagttcattaatggggaagagcccgtaggtccagccagtacgcatatcctggccagaaaaagcgaaaagccgcgtatagcggcttttccatttggtgcgatctctcagcttgttagcatccagtacgcatatcctagtcagatgcaagcagatgatagctcacgcccttgaataaatgcaataaatttagaacaaaatattacaaggaggggatatgcctttccgttatcggctagcactggacctcggtccgacttcactcggttgggcggtattcaggataaacgctgaaaacaagcctatagccttggtgttaagcggtgtccggattttttccgatggccgcaatcccaaagatggaacgtcgttggcagtgacgcggcgattggcgcgtgccatgcggcgacggcgtgatcgcctgcttaaacgtaaaagcaaattgattgccgcattgatcaagcatggattctttcccgcggacgagaaagaacgaaaggctctggaagtgcttgatccatacaggctgcgtgcggaaggcctgaatcgggcgctggctgcgcacgaatttggcagggcattgttccatctcaatcagcgacgcggattcaaaagcaatcgcaagactgacaagcgggaaaccgatagtagcgtgatgaagagcaccatatcgagcgtacgtaatgcactggaggaagggggcttttgcaccgtgggcgagtggttgtatcagcgtagccggcaaggccagaaggtacgcgcccggttcaatgcacagcgaatcacaacagatgcgggcaagacaaagattgagaagagctatgacctgtatatcgatcgcgctatggtcgagcacgagttcgatgttttatgggccaggcaggctaagctgaaccccgagctgttccatgaacaagccagggccgaattgcgcgacatcctgctatttcagcgacggcttcgacccgtcgaccccgggcgttgcaccttttacacaaaggaagcccgtgcgcccctcgcattgcccagtgtgcagcgctttcgtttttatcaggaactgaataatttgcgctggctggatgatagcctggtggaaaggcctctgacgctggctcagcgggacgccatggcagcagccctggaaacgagcgtcaaaaagacatttcagcaattgcgggcgattgcaggccttggcagtggcgcgaccttcagtattgaggatcttaaacggcaagagttcaaaggcaatacaaccagttgcatcctgtcgaagaagcagcacttcggatcacgctggggccggtttgatgaagccttgcaagacgagatcgtcatgcgtctgctgatggaagaaaatgaatccgccttgattgcgtggctacaggagcatactggcgtagacgaggcgcaagccgaagccattgcgaatgttgcgctgcccgagggctatggccgtttgagcctgaaggcgatacggaaaattctatctgcgttgcaggaagacgtccgtacttatgacaaggcggtcctggcggccggcatcgatcaccatagcgacttgggagcgcgcgcgacgggagagattctgccggaattgccatactacggcaaggctctggaacgccatgtcggcttcggtaccggcaatcctgaagatccggaagaacggcgtttcggccggatcagcaatccgacggtacacgttggcttgaatcaagtacgtgccgtagtcaatgaactgatccggcgttatgggcatccggctcaagtagtgattgagctggcgcgcgacctgaaacagacttgggaacaaaagcgcgagactgagcgggagcaggctgcaaatcaacaacgcaatacgctttatcggcgagaaattgcggatgtgttgggaattggcgaagagcaggtcaaacgcgagctgatcgaaaagcggattctttgggaggaattgagctttgatcccgtgaagcggtgctgcccatacagcggggagcaaatcggtctaaagatgttgttcagcgatgaggtcgagatcgagcatattctgccttttgcaaaaacgctggacgatagcctcaataacaagacggtcgccctgcggcgagccaatcgcctcaagggcgattgcgcgccatgggaagcgtttggccggcaggaagtggccggattcaaatatgacgacatcctgcagcgagcgcaagccatgccgcagcgcaagcgttatcgattcgcgcaggacagcatggagcaatggctgaagaatgataaaagctttcttgatcgggccttgaatgatacgcgctatctcagccgcctcgccaaggagtatctggaatggatatgcccgcgggcaacatgggtggtgccggggcaattgacgtccatgctacggcgtatcttcggcttgaataatcccgacatcttggggtggcggggacaaaagaaccgggaggatcatcggcatcatgccattgatgcctgcgtcattggcgtgacggatcgctggttattgcagatcatgtcggatacgagcgcaagagctcgtgaccaattgcatgggcgcttgctgaagaatatgcctatgccatggccgacttatcgggatcacgtcaagcgtgctgtcagccatatttgggtcagccataagccggatcacagttatgaaaaagccatgcacaacgataccgcctatgggctgttaccgggaggctatgtgcgggtgcgcaaagaagtggatggcgttcgtgtgcgaactaccgaaaagttggccgtaattccgatttccagcgccaaggcgggcccgaggcatggattcttgcccgacggcagccccaaaccttacaagggatataagggcgacagtaattactgtattgaaatcgtacgtgacgaggcttctggaaaatgggtgggcgaggtgatttcgacttatcaggcctatcaggtgattcgtgagcatggccgtgtgaacggttggaaccggctgcgccatccaggttgcggtctgagcggccgttcgctggtgatgaggctgatgatcaacgacatcgtccggctggaagataatggcgaactgaaaacctggcgtgtggccaagattagcggtaatggccaaatatattttgcggacattcatgaggccaatgtcgatgcacgcaaccgtgataaaaacgattcattctcctatgtctccaaaatggcggggtctttgaataaggcaaaggccaggcgggtgactatttctccagcgggacgacttgccgatccgggatatatcccatgagcaagtgatagaggagtcccgtaatgatagggcgcatcgttgaaatcgcggatgacaggcggcatttatttgcgcatcgcggttttatggtggtgcgcgatactgaaggcgagcgaaaggagctggggcaggtccccctggatgacatcggagctgtgatcgccaatgctcacggcttgagctacacaaataatctcttggttgaattggctcagcgtggcgccccattcgttttgtgtgccgccaatcacagtcccgttggcatgctattgccaaccgatgggaattatgaacaatctcgccggatcgatgcgcaaatcgccgccaaacgtcctttgcataaacagatatgggcggccatagtgcgcagcaagctggagcagcaagccgcggtgcttgaagccgttggagcaccgttcatgcccttgctggcgctggcgaagaaggtcaagagcggcgatgcgggcaatttggaggctcaaggggcaaggcggtattgggggctgttatttggcggagagtttcgacgcgatcagagtttgggcggcgtcaacaaccttcttaattatggctataccattttgcggtcggcgacggccagagctgtgataggagcgggcctgcatcccagtattggcctgttccatagcaatgccggcaatcccatgaggctggtggacgatttgatcgaaccgtttcggccattgattgatatcaaggtctggctgctacagaagcaaggcgagaaagaagttgggcccgaaacgaaaagggcgctagtacagacgctatatgacgacatgctgacggacgttggtgcaacgcccgtgagcgtgtgcatacaacgtgtagccgtttcgctggcgcaagtatatttgggagagcggaccaggctggatctccccttgccgggattgcctttgtccatggcggcgtccttgtcggacgaatagcaatgttatcggggtatcggcttatgtggatgttggtgatgtttgatttgcctgttctggagaaggctgaacgcaaggcggcaacagagtttcgcaacaccctgctggacctcggtttcgagatgagccagttcagcgtttacgtgcgcttttgtacggggcccgcgcagatcgacacctattgcaagcgggtagaggcggctttaccacccggaggcaaggtaaacatcatacaatttacggacaagcagtatgagcgcatcatttcatactattgcagggcacaacaagagccacaaaaagcgcccgatcaattcaatctattctaggaataagagtgcaaaaaagatcgaaaatcccgacaaacctctttttcatcaagaggttgccgggttccgattttatctgactaggaaatgcgcactggctggaacttcgagggattcgagccactgccggaccggattttatctgactaggaaatgcgcactggctggaacagcctggctggcgtggctgctggtcccgggattttatctgactaggaaatgcgcactggacggaacttactgcgcatggcgggcctcctcacggtcattttaatctgaccagcaaatgcgcactggttaaagctcaatggcgtcagaggtattgaatagcttggccgagggagttggcagtctgctcctgatcgtggaagcgttcggcgctgcggtagccggtctttatgacgacgtcatccagaagcaggcaaggtcgtccaggagcgtggggcgagctatgcggccttatgtagagggtgtttcttgcgcaggcttgccgggggcggaattcaagatgtgctgcatcattttcttggcatagagcggcaggtcctgagcgttgcgtacgcatagcacgaggtctctggtggcccaagggtcggtgagttcgatgcgcttgattcgggcggatctggcgcagcgtatggcggcggttttgggtaccactccgatgccgacgccatggccgaccatgcggcatacggcgtcgatattgcgcaggcgcgcgcgatagaagacctgcttgccggcccgccgcgcgtgctgggttacgtgttcctgcagggcgctgccttccagtaggccgacgaaatcatggtcgacgacatcgggaaggctgatggatgcgcgtgaggccagttcatggccgcgggccacgatcaataccagcgagtcggggcggaaggggtaggtttccaggccctgcaggtccgcggaagtggcgaccagtccgatgtcggccattccagtgcgtatggcgtcggcgatttcataactgggccgttcttcgagatccactgaaattttcggatgctccgtcaagaaggcgctgagtatttcgggcagatattcgctgagggaagaagtgttgcaaagcaggcgtacatgccccttcaagccttggccgtagtggtccagttccccgcgcatgcggtccatctgttgcaggacgacgcgcgcatggtgcaatagggtccttccggcaggcgtcagtttgactccgcgccgctcacgtaccagcaaggcgacgcccagggtgtcttccattcccttgatgcgttcgctggccgatgccagggtcatgtgcgagcgccgggcgccgccggtgatggtgcccgcctcgtgcacattcaagaacaggcgtagatcggtcaggtcgaagcgcatgaaaaaatcatagcacgggtggatcaggcgcagcctgaggctggctttgaaatatccggattttcaaaccaagccagatacgtcagaatggctgctcgcgtgtggagcatgcatttcattgcaagaaatgcacacgatcgcaagaatcgcatgcctccgcaagaagtgtgctttcgcgcaggaaatgcacattcccgacaggaatgcgcccgcggcaaagagtgcgcgctctcgcaaggaagggcatgcttctgcaaggagtgcacgcccgttcgcaagaagcgcaagtccccgcatggaactcgccttgctcgcgtatccgcgcatccgtaagcctgcgcgggctagcggttcttagcaaaaataaagataaaggcgtttttcaggatgatcgcaaattttctgccagattcgtttttcctcatcgtcgcggtctttgtgctggcgggcttgatcaaaggggtggtcggcatgggtttgcctacgatctccatggccttgctggtgctgttcatggcgccggctcaagccgccgcattgttgatcattccttccttgatgaccaatctgtggcaagcggggccgctgcggactttgccgccgctgctgcgcaggataggcggcatgcaatggggcgttgctatcggcgccttggcgggcgcgctgatcctgggggcgccgacgggcaagtcggcatccatagcgctgggggccgcgctggtcgtttatgccgggtggacgcttttcggcaggcaattgaatgtgccggctcgtacggaaaaatggctggggccgctggccggcgccttgacggggataatcaccgcggcgaccggagtattcgtcgtgccggccgtgccctatctgcaggccttgtctctcgaccgggatgcgctgatacaagccatgggcgtgtctttcaccgtctccaccgtggccttggcggcaggcttgtggatcaatgacagctatacggtcggagccgtgggcgcgtcgctggtcatgctgattcccgctttggccggcatgcatgccggccagtttttgcgcaggctgctttcgcccaaggctttccgcacttgtttcctagcgagcttgctgatattgggcgtttatctgatcatcgaaaggtctgtggcgtaaggagcgcggccccacggtgcgcgtgcggacgccgcggaaggccggcgcatatcgaggatgtcgctgcgatggattcatcttcatatgcggatccatgtacagtggagcctgctcaggcctcaacctttttcaggagcgcagacgatgaaacgagcattgggtgacaccggtatttccatctcgccgctggttttcggcggaaacgtgtttggctggaccgccgacaggcagcggtcgttcgaattgctcgaccggttcgtggaggcgggctttgagaccatcgataccgccgatatttattcgacctgggttccgggcaatcgaggcggcgaatccgagaccatcatcggggattggctgaaatcgcgcggcaagcgcgatagtgtggtcctgattaccaaggtgggcatggaaatgtcgccggagcggcaaggcctgtcggccgcatggatcgaacgcgccgtcgaggattcgctgcgtcggctgcagaccgatcatgtggatgtttatttttcgcacatcttcgatcccgatgtgccggtggaggaaacactccgggcatacgaacgcctgatcatggcgggcaaggtgcgcgccatcggcgcatccaaccactcggcggaacagcttgccggggcgctgaaggcggccgatgagcaaggcctgccccgataccaggtgcttcagccgccgtacagcctctatcatcgcggcgattatgaaggggcgttgcggaacctggccatttccgagggcttgggggtgattacctactacagcctggccagcggcttcctcacaggcaagtaccgcagtagcgccgacctgggccaaagcccgcgcggcagccgcatcgaagcttatctgaatgaccgggggatgcgtattctcgccgctctcgacgaggtggccgaagcgcacggcgccgctcccgcggaagtcgcgctcgcctggctcatccaacgagaaggcgtgaccgcgccgatcgccagcgcgacccgcctcgatcagctcgaaagcctgatgcggtccacccgccttgcgctttccgcggcggatgtcgagctgcttgataaggccagcgctccttgaagggttgacgcaggacgctcgtcctcgagatgcctcgggtatggcgcttgctgggaaatcgttcgcatttgaacgccgtcccgccgcagcgcccgagcccaccccgtcgaggagaacgtcgcaatggaagtcatcatcgaacgcaggtattccgaagcaatctttccgctgcatgcattgctgctggccggcaccgtcccgctatttctgggcgcggcgctgagcgatgcggcatacgcctcgacctatgagatccaatggagcaatttcgcatcctggctcatcgtcggcggcctgatattcgccgggctcgcgctgctcttcgccatcgtcgacctatgcatccccagccggcgccgcgcgcggggagccggctggtatgccttgatattgctgatcacatgggtgctgggcttcgtcgatgcgctcctgcacgcccgcgacgcgtgggcggccatgcccgcgggcctggccttatccgtgatcgtcaccctgctagcctgcgtggcggcatggttcggcttttgcaccccacgcatcggagggatgaaatgaaacccggcctgttcatggccgtcgcgctttcggcattgctggcggcctgcggcggcgacacgcaacccgcgcagtatggcgcagcgcccgaacttcccaagccgcggcgcggcctgctgcccgacatggtgattgccaagcccgcggaatggggcgacaagctgcccacagtccccgagggctatacgatcagcgcaatcgccacggatttgaaaattccgcgccagacgctggtgctgcccaatggcgacatcctggtggccgagggcaggggaggcggcgcgccggccctcaagcccaaggacgtgatcgccggttatatcaaatccaagggcaccagtccggtgaagggcggcaatcgccttacgcttttgcgcgatgccgatggcgacggcgcctacgaattgtcgaccgtcttcgccgataatctcaatgcgccttacggactggcgctggtcgacggcagcctttacgtggcgaatcaggacgcgttgctgcgattcgactaccaggaagggcagaccaaggccagcggggggccgacaaaaatcaccgacctgccatcggcgatcaaccaccactggaccaagtccctggccgccagcgcggacgggcagactctatatgtgggcatcggctccaacagcaacatcaccgagcgcggcatggcggcggaagtcgatcgggccatggtatggcaggtggatgcccgcagcggcgcgcacaagccttatgccacaggcttgcgcaaccccaccgcgcttgccatccagcccggcacgggccagttgtgggcggtcgtgaatgagcgcgacgaaatcggccccaacctggttcccgactatcttaccgccgtgcaggaagggcggttctatggctggccgtacagctactgggggcagcacgtggacgaccgtgtgcggccgcagaaccttgagaaggtcgcctcggcgatcgcgcccgattacgccctcggctcgcatgtggcggcgctgggcgtgactttttcaaatgaggcgatgggctcccaattcgccgacggcgttttcgtcggcgagcatggcagctggaaccgcgccaatcctgttggctacaaggtggttttcgtgccgttccgcgacggacggcccgccggcccgccggtggatttcgtctccggcttccgcgatagcgacggcaccacgcgcggccggcccgtcggggtaagcgtggatccgcgcggcgcgctcatcgttgcggacgacctatccaacaccgtctggcgcgtggcccccgctcgcagcggttgagcggccagtccgcagcgccgcctactgatccagcgttgcgccgccatccacccgcagatcatgcaaggtgatatggctggcgcgatcggacaagaggaatagcgccgcatcggcgatttcgtcgggcgtcgcgatttttttcagcggtatgcccaggcgatagtgcccggccgaaccattgatgacggtctgggcggaactgcccgccgcccacatggcctgctgcatgggggtgtcggtggaaccgggcgatacgatattcacgcgtatgcccgcatgggcgagttccagccccaggcaacggctgaattgggtgacggcggccttggacgcggcgtaggcgcccatgttcatgcgcggcgtcgtcgcggcgttcgaactgatgttaacgatggcgcctttgcggcgttccagcatctgtttggcgacgacgtggcacaggttgaatacccctgtggcattgacggcgaaggcgcgcgcccattgcgcgggctccagttccgtggcggcgcccatttgcagtatgccggcggcgcagacgagcttgtcggcaggcccgaactttcccgttccttcagcgatcgccgccgccaccgcatcgaaatcggaaacatccgcctgtatcgcatgcagctgctgcgggtaccggccgtgcaaagcccgcagcggggctatgtccagatccagggcgaccacgtgcgcgccacgttcgagcaactggcgggcgatggccgcgccgatgccgcggccggctccgctgacgatggcgcattgttggaaaaactcgttcgactccgcggcgttcatgcctgatccccatgatcggacagccagcgctgcaactggctggtggtgacggaaacgccgcagcgctgggacacatatttgatggccatcgcgtgttcttcggcggaaaaatcagcggtggcgtcgctgacgaaaaacggctgaatgtcgttcatgaaggcgtccagcgccgtcgtcatgcagcctatgtgggaataaatgccgcagatgatcaactggtcgcggccctgatcctgcatgatcttcttgaggtcggaccggtaaaacgcgctatagcgccatttggtctgaatgaggtcttgcggcgccggagcaagctctgcgatgatcgcctcctgatccgcattgtgcggatcgctcaggcccggcccccagaaatcggtcagcaaagcccggtcgtccgggggctggtcggaaggctgggcggtatatacgacgggtataccgcgcgcatggcacagctcgcgcagctggcttatatgcctgatcagcgtcggcaccggctcggcgctcacgtcgaattttttcaggaaatagtactgcatgtcgtgtataagcagtaccgcccggctggcatgcgctttccaggcgacccgattctcgggctccatccgaggcatggggtaagcggcgatagcggggatgctcaagtgctattcctcttcgtgatggtgcatgatggcccggccggaaccttgccggccgggcatgtcggctttatttcagcgtgatcctgctgatgcggtcgccggttttatcgtctttgccgcgcgccttgttgatggcatatacagtgcctttaccgtcagtcgacaaatggttggggaagctgccgccttcgagattggccaccagcttgccgttaagatcgatgacggcgatggaatcgctgccgcggctcacggcataggccactttgtttttcgggtcccatgccaggttcagcggaccggcgccgacgctgacatcgtgcaggaccttgccatctttcaagtcgaccaactgcacatcgtcgctgccttgcgaagcgacgaaaaggacattggcttcaggggcgacggccacgccgctggcgcctttggttccttccaggggatagacctgttcgacctcctgcttggccaggtcgatgacgacggcctcgttggtggtacggcttacggtataaagcttgccattctgggcgtccagggccaggctcatggggctagcggtctggccgcgcgatttggacttgatggcgatggcgcccaccggttcgagcttttgcgtatcgatgacgatgatttcattcgtgccggtcgccgatacataggcccgatgcttcttgccgtcgacgaccacatcgcgggcatgcgggacggtgccattgggaaactgcttgatcagcgacaggtccgactgcttgtagacagcgacagtgttgccgcgcgtgttggtcacccataccgtgccggcctcgtcatcgacagccacgccatagacggccatgacctcgcctctgtcgcttgttttgtcggccgccggcgtaatgctggcttcgatcttgagcgtgtcggggttgaccttcatcagcgccgattccttgacgggcggacggcccaccgacgatgtgacaaacagggcgttggcggcgtcgctgtaggcgctttggtacaggccgggcttcaggtgctcggcggtgatgttgaatttgtccgcgccgctgaatttgatatcgggcgacaccttgagctcgaagatgctggcggcggagggtttggctacctgcaccacgaccggatgcaggccgacggcggccgttttcggcacggcgatggtggtgctgaaattgccctcgctgtcggcggtcaccaccttgtctttggcgatgttctggccgttgcgcagcaattgtatttcctgacccggcttgaagccgcggccgcggaccacggcttcgtcgcccggcttgacgacattcgtgctggagaccatgccgcggaagctggcgtcgggctgatcgaatatggcgtcggcatgcgcgacgccggcggacagggccatggcggccagcgcgagcgccgtgcgcttcaggacggccttcttgtaatggcgaatgcaaataagattggattgcattgatcttccttcagatgaatagaccgaacggatggtctggaaaagagcttaaacagggtgcttacgggtgcgcgggcatatgccctttgtacaggaaccggactgaaagaaagctgaggccattatttgcggcctccttctatccgcttcagcgaattggaggtcagcgcataagctccgccaaccaggaagcaggccgaaccgccgatcaatagcgccacggaagggctgaaccagcgggacaccagccccatctgcatattgcctgccgccgtgcccagagaagactgggtcatccacaggctggacatgcgtcctagcaagtggtcgg

SEQ ID NO: 1836 - DNA, 23066 bp, synthetic construct
  source 1..23066: mol_type = other DNA
  misc_feature 1..23066: note = Synthetic
cagtgttttagcggaaattgaaatccgccttggcgaatatcctgcactcaacgatatccagtacttgcgtgacctgattgcagagatacgcccaccccgcccacaagataccgcaagggctaccgacaacctgcgtgcgctgtgctttgtgctgcaaagtaatcctgcatggcgcaaggccttgcgctgttatctggtacaggtattgaccacgcgtaagctggtacatttgttcacagacgtgggtattacccagaatattggtttctggtcagcggccaggcaaagattaatgaataaatttttgccgccgctggtgaatgacgcctatatcaaggatgtgtttggccagttgtttcataaaaaaactgaccacatctggataaatgcagtaaccgaccaggcctggatggatttgctcaaggccataggtttccgctcacgcgccccgcgcactacgtatgccggcctgacatgtgaaatcttgagtgccgtgcaggtattgtcttaccgtattacgaatatcggcctggaagccgaactggtacgcaattatcctgatatagaaaaattcgagtcgcctttcttgcgccagaatgacgccatcaatgactatgtgatttgctatacaaaatggctggctgacaagtcgcatgaacgggaagacagcaaacatatcgaagtcttgctgacgcaatgcgaagacatcgccaaccgcatacgccgcactgccgccatgcaaggcgtatcgatcagcctgacgcgcctgctgctgcaattgatgcaaagcatagcgcgactgcgccagttgctggacatgctcgacagccgcagcactgaccatgccgcagtaataggcactaccctgttcaaggaattgtctatcgcagaaaaccacaaccatagcttgcgcaatctcatgcaaagcaataccgagctcttgtcgttgcaagtaaccgaaagagccgggaaaagcggtgagcattatgtaaccaataatcgcgcagaatggctggacatgttgcgctctgccctgggagctggcttcatcgtcggcttcatggcgctgatcaagattttgttcggcacccttgcactggcgccgttcggctatgccgtgctgtacagcctgaattattcaggcggcttcatgctggtgcacgtactgcatttcactatcgccaccaagcaaccggcgatgactgcggccttgctggcacgggcaattgatggcggcaaacagaaactcgatgaactggcagaactcattgtgcgcgtgttgcgttcacaattcattgccattatcggcaatattggtctggccatgcctactgcgtatgcgattgcctgggcctgggtctcgatcacgggcaaacatctggtgtcaccagaaaaagcccagcatctgctacatgatatcgaccctttcgccagcctggccttgccacatgcggcgattgccggcgtctgcctgttcttgtctggcctgatttcaggttattacgataacaaggccagctatggaaatatccctgagcgtttgcgtcaactaggttggctgagaagcctgctgggtgaagcgcgcttgctgcgtgtcaccacttacataggtaataatctcggcgcactagcggggaattttttctttggcatcatgctcggtacgatagggcagttgggcagtttctttggcttgccgatagacatccgccacatcacctttgccagcgccaattttgcctttgccctggtcggccttgacaatgtcatgaactggcaagtggcggcctattcgctgtttggcatcatgtgcataggcatggtcaatctcggtgtcagcttcagcctggcgatgctggtggccttgcgttcacgccgcgtcagttttggccagggtggtttgctgaccgtcttgctgtggacacgcttcaaggaaaatccgcgtgattatttcttcccggccagggaagccgctacagcagaagaaacacaaacggaactggaaaaggaaaagaaagactgagactgatctgtcctttttgatccctgtggttttgccccttcgctgcgccagtcaaccaaatgactggcgcagcgttaatgagggatcaattcttttcgggggtcttccatgaaacttgtacctgctctgctcgccagtgccatcaccttgctcaccatgcaagccgccagcgcccatgagtacgatggcttgatgaaggcaaagaaatatgctgaagcagaaagagccgcgaatgccaagttaagcaccgatgccaataacgccgatgccttgctggtaaaagcagaattgatacttgccgaaggcaaactcgacaaactcgatgaagcggcgaaatacgtagagcaatgtgttagcgcccatccccaactgtctgagtgccatgaaatgctgggcaatgttttaggcaccaaggccacatccggcagcatgtttgccgccatgtcttacgcgggcaaaatccgcgacgcctttatcaaggcagtggaactggaccccaaaaattacagcgcgcgcagctcactgttgcaattttatttgcaggcgccggcgattgctggtggtggcaaaagcaaggcacaaaacctggtcatagaaaccgcgaaagtgaataacgctgctggcaatttattgcaggcgaatgtggacctggcagacgataaatttgccagtgcagaaacagcagccctgagtgccattcccggtaatactgagtcactcatcaacatgcagcgcaacatactgtacagcataggtgcaaattatgtgcagcaaaagaaatacagtgatgccgaacgcatttttaccgacctgcagcaacgctttcctgccaaataccagggcgcatttggcatgggccgctccttgcaggagcagggcaagcacaaagaagccttgagctggtttgaaaaagcccagacacttgataccaatgcaggcatctattaccgccttgcacaatgcctgcaagccgtgaatgaaaagcccaaggcaatttcttactttgaaaaagcactgagcttcaaaccagccttgagcaaaaaactgcgtgcagatgcagaagaacagttaaaggccttgaaagcctgaatgcaaaaaataccaggacacattgagtaaaaaaagcatgacttatccggcgcggcaagtcatgctttttaatcaccactggcatctgcctgttgcaaaactgaagcaggcggtttgacaaaggtcaatgaaagcgggaatgcacactgaagtatgatgatgggctgggaactgcggcgtacaattgcctttcattcccatactttgcaccttcatgaaaaccgccacagcatctaaacgctttatcccgcatagcctgctggaagatgtgctggcaattatcactggcactttattggtgtctctgggtatcgccctattcaatcaggcgggcttgctgacgggggcactgctggcctggcgttcttgctgcactatacgacaggctggtcatttggtatggtgtttttcctcatcaacctgccgttttactggctggcctggcgacgcatgggctggcggtttaccttgaagaccttttgtgcggtggcactggtctcggtattttccagcctgcatcccaagctcctgcatctgacagccataactgtcatggttcccttttatgttgccctgactggtggcctgatgatgggcgtgggttttatcgtcttgttccgccatcaggccagcctaggtggcatcaatatcctggccctgtacctgcaagaaaaacgcggcatacgggccggtaaattgcagatggcggtcgatttcatcatcgtactggcatcgctggcggtggtcacgcctacggccttgctggcttctgtacttggtgcgtttgcgttgaacctggccatcagccttaaccacaggccagggcgttacatggcaatgtaaagtttggcgatgtaatacataaaaaatcaacttagcgctgcacggtactgtgttggtgacatctgcaaacgcttttgaaataccctgcgcaactggtcgtcactaccaaagccacagcgtgacgctattgttttcaccggcagggtttgctcagacatatctgccagtaattgccgggcaaattcaaggcgcgctgtctcgataaattctgtcgtgctgacacccacttcttgctggaacagacgagtgaagttacgcaagctcatgcccgccatcttggccagttgagatactggcagacgctggtgcaggttggataatatccactgctgcaattcacggatattggtttgtgccgttttttggctcatcagatgcgtgctgaattgcgattgtccgccaggacgtttcaggtacaccaccatgtcgctggcaacttcgagtgccagttcatgaccgcaatcatcttccacaaaagccagcgccagatcaatacctgcagtcacacctgccgaagtccacaggttgccgctgcgtataaaaatcgcatcagcatctacctgcaccgcagcaaagtcatcttgcaattgctgggcgacgctccagtgcgtggtcgcatgtttgccatccagcaaacctgtgcgcgccaggaaaaaagcgcctgaacatagtgccgccaggcgtttgatcctggtcgccacttctgccacccagtcgataatggcctgattatctgccagcgcctgctgtatatggcgcgaaccgacgatgatggcgtcatccggcaaggccagggtattgatgatcttgctggcttccaggcacatcagggtatctgaacgcacaggccccaaatgcgccgctgcaatcttcacatcataggcggcaggcttgccctgacgctgcaaatggatattcgcatattcaaataccgacatagggcctatcgcttccagtgccttgaaaccggggtaaaccacgatgtctactgtgcgtgccaatgttggtcgtttgaccatgcctggcttcactgctttgattggcttcatcattagccctggcccaataatattcaataaagcactcatcataatcgaaacagtacgatccgtctttttaagccattcttagcgcacaatcggccagacatgcaaaaagattacagactcactgcgctttacagcacaatcagcaaacttattttagaactcatttcataaataggatgagtgcgaacaagacgatttgggatgcagtgcaaggccttaggtgtgtaccctgtgcagctaaggcgtccgcctttgcaagtgcgaggtaacaaaactgcacgctgcaatgcgcccaaatcgtcagttcccggagggtttgcctcataacgcgcgctggactgcgttggactcgttatcaataggcaaagctattgactgcctcgtccaaagttttaccattggccagcccacgttatgagacaaacgcatctcaccctatttatgaaatgagttctagagtcagaccaagacccaccatttaaaggacagccatgaaaaccaaagccgccatcgcctggaaagccggagcaccactgacgatagaagaagttgagttgcaaggtccgcaagctggtgaggtgctgatcgaagtcaaggccaccggcatttgccataccgactattacacactctcaggtgctgatcctgaaggcctgttcccagccatcctcggccatgaaggtgcaggcgtcatcgttgataccggccccggcgtcaccagtgtgcgcaaaggtgatcatgtgatcccgctatacacaccagaatgccgccagtgcaaattctgcctgtcgcgcaaaaccaatctctgccaggcgatacgctccacccagggccgcggcctgatgccggatgcaacatcgcgcttttcgctcgatggcaaaccgctgttccattacatgggtacatcgacattctccaattacatcgtggtgccggaaatcgccgttgccaaggtgcgtgaagacgcgccctttgacaagatttgctatatcggttgtggcgtcactaccggcgttggtgccgtggttttcacggcgaaggtggaagcgggtgccaacgttgttgtattcggcctcggtggcataggcctcaatgtcatacaggctgcaaaaatggttggtgcagacaagatcattggtgtagatctgaacccggcgcgtgaaagcatggcgcgccagtttggcatgacccatttcatcaacccgaacgaagtagaaaacgtggtcgatcacatcatccagttgacggatggtggcgctgattattctttcgagtgcataggcaataccaaggtcatgcgtcaggcgctggagtgttgccacaagggctggggcaaatccatcatcatcggcgtggctgaagctggcgcagaaatctctacccgccccttccagcttgtcactggtcgtgaatggaaaggctcagcttttggtggtgcacgtggccgcactgacgtaccaaaaatcgtcgattggtatatggaaggcaaactcaatatcgatgacctgatcacccaccgcctgccgctggaacgcatcaatgaaggctttgatctcatgaagagcggcgaatcgatacgctcagtggtgttgttctgatgtcgcagcgcgaatccaacaacgacgcagaagaagtgactttgctgagccagcacgcctgccatggcggcgtgcagcgcttttatcagcatgactctgccgagataggcttgcccatgcggttttcagtctatttgccaccacaggccatggcaggcgggacttgcccggccattatttacctggctggcctgacctgcacagaagaaaccttcatgatcaaggcgggtgcgcaagccattgccgcacgcgaaggcattatcctcatcacaccagataccagcccgcgcaatgccaacatccccggcgacagcgataactgggattttggtgtggctgccggtttttacctggatgctacgcaagcgccctggagcaagcactaccgcatgcacagctatatcgtcgctgaactgctgcccatgctgctggctagcttgcccatggacaagacacgcgtcggcatcatggggcattccatgggtggccacggtgccctggtactggccttgcgccatcctgacctattcactagcgtatctgccttcgccccgatagccgcaccgagccagtgtctctggggacaaaaagccttcaccggatatctgggaactgatgaaaatgcctgggccgaatttgacgccaccgccctcatgcaaaagcagagccagccgcccttccccaaaggcattttgatagaccagggatttgccgacaaatttttggccgaacaactacaccctgaagctttcaagacagcctgcgccagcgtgcaacagccgctgacactgcgctaccatgaaggctatgaccatggttattacttcatcaataccttcattgaagatcatttgctgcaccacaaacagcaattgactgcctgaccctgtcattgccgcactaaagattgcttgttccaggcgcaccaaactggaataagcactctatttctgtgcgtttctcgtttaactgtcatctttattgtgtaaaatcgagcgacttcgtcgcgcatttttgcgcataattcagaacgacataaccagaaagcaagagatgagcaaagtagtcatcagcggcaccggcttgtacaccccttcccagtctatttccaatgaagaactgatcgccagtttcaatgcttatgtccagcaacacaatgcgcaaaacgccgcctccatcgccagtggtgaagtagtcgcgctggaagaatccagcgtcgccttcatagaaaaagcctcaggcatcaaatcccgctttgtcatgaacaaggaaggcgtgctcgacatcaaccgcatggtgccacgcatccctgagcgcagtgatgaagaaccatctatcatgtgtgaaatggcagtcgctgccgccaaccaggcgctggaacgcgcaggccgcactgctgccgatatcgacgccgtcatttgcgctgccagcaatatgcaacgtggctaccctgccatggcagtggaaatccagaatgccctgggcatagatggctatggctatgacatcaatgtcgcctgctcttctgccacctttggcatacaggcagccgtcaccgccatccaaagcggccaggcgcgtgcggtactggtcgtcaaccctgaaattaccagcggccatctgaactggcgcgaccgtgacagccactttatctttggtgatgcctgcactgccatcatcgtagaacgcgccgacctggcgacatcgaagcaccagtttgaaatcgttggcctgaaactcaagacccagttctcgaacaatatccgcaacaactttggctttttgaaccgtgccgatgaaagcggcataggcaagccagacaaactgttccgccagcaaggccgcaaagtgttcaaggacgtctgccccatggcagctgccgtcattacctccacggtacaggctgccgacatcgccatccctgacgtcaaacgttactggctgcaccaggccaacctgaacatgaacctgctcatcgcccgcatgattttgggccgcgatgcaacgccagaagaatcaccaacgattttggacacttacgccaatacttcgtccgctggctccatcatcgccttccataaataccaggacgacctcgaagctggcaatgtaggcgtgatctgctcttttggtgcgggttattcgataggctgcgtggtagttaaaaaactggcctgatacccccccgcttgaatagcaaaaaggccgcaagtgcggcctttcgtttgcttgcctgctccagacaggcaaaactgaactctgagatatcacaaacttaaattacatacccagagacttcagcaattcggagttttcgtcatcatcaggcgcggcgggagcagaggacttttgttccgaagcctgctcaaagtccagcaaagcatcaggatcagccacttcatgcgcttcaaagtcatgcagcttgatgaactctgtcctgtctatcgccagttcaagatagaagatattgtttttctcggtgaagaaagaaacacggcgcaattcaggcctgtccagcggggtatccacactcagcatgacctgcttggtcagcaccagcatcttgggctggttctgggtgatattggtctgcaactcgcggcgtatcttgccagtgaagtcaccaacaatctggttcatcaactcaccgaggatatttgccacctcgtcagaagtgaacgaagttgccagctcagatttgggcatgcccatgttaagcatgtatttctcgtagatttccagcgccgtatcaccatcaaaattcagcaccaccaacccggaaaagccgccatcaaacaacacaaagcagcctatatccggcttcaagcctatcttggtgatgcgctgcaccatggcagaataatgcaccttgctatttgtggcgacattcaacacccgtattaccgagttgcacaaactcgtcaacagatcttctgttccgtacactacaccattttcttccgaggccatgaccaactcctgaatttgttacatgaaaatcaatgcagatgcatgcaatgactggctatcttcaagaaagcgacaaaacggaatcccatcccgtagcagcaaaccctgaaagcctatacgaataatgaaagaatactgaacccccagcgccccgtccacatgtttcatgcgatggcggtgatttcgctggcgatacatcaaatgtatatctgcgtactgttgctattttgcaagcatgaaaaagcaaggatggcatttgcgtctactcccttacaaaagcaaaaggccgcatatagcggccttttcatttggtgcatctttcagcttgttagcgttcagagcacatatcccaatctgataatgcttgaataatagtgtggaattaatgtaaagtcaacatattaacaaaaatatacgtggagcatggcatgctttggaaaatgcaatatagactggcccttgatttaggtgcatcctcactgggatgggtaatgtttcgtttgaataaagacggaaatccttgcgctattatcaaagctggcgtccgcattttccccgacggcaggaacccaaaagatggcgcatctctcgcagtcactcgccgtgacgcacgctctatgcgccgtcgtcgtgaccggctgttgaagcgcaaagcgcgcatgatgacagcactcatttctctcggtttttttcctcaagacaaagatcaacgtctggaactgacaaagctcaatccttatgagttacgtgcgcaaggtctggacacagcattaagtggtgaagagtttgcccgggccctgtttcatataaaccaaagacgtgggtttctcagtaatcgcaaaaccgacaaaaaagacaatgatagtggtgcattgaagcgcgccatcaaagagctgcgtgagaaactgaaagaagaaaattgccggacactaggtgaatggttggcgaaacgctcaaaaaatggggagagcgtacgtgcccggctgcaagggaaaacgcaaaaggacaaaaaatacgatttttacgctgaccgcgcaatgatagagcatgaatttgatactttatggtcagcacaagaaaaatttaatcctgcactctttactgaggcggcacgactggaattaaaagacatattgctgcatcagcgccccttgaaaccagtagtgccgggccgctgtactctgatacccgaagaaccgcgagcgcccctcgcattaccaagtacgcagcgattccgtatctatcaagaactaaatcatttgcgaattttaacggaaggcttacaagaacaaaatctgacaatggcgcaacgcaacacacttgccaatctgatggagaccaagagtgacctgacattcactgccatggtcaaggctctcaagttgcctgggaccaccagctttaatttggaagacatcaaacgcgaccggctaaaaggaaatgcaacaagtgttgcgctttcaaaacctgaacactttggcgcagcatggcatgactttgtaccggcattgcaagatgacatagtgactcaattattagaagaggcaagcgaagccaaacttgttgcatggctacagggccacaccggcgtggatgaagaacatgcagaaagaattgccaatgccagtttgccagaaggatttggacgactgggaaaaacagcactgagccgtatcttacctgcattgatgtccgatgtgattacttatgacaaggcagtggtcgctgcaaaatttgatagtcatagtgcaatctcacatgcgcaacaaaccggcgagatcatggaggaattgccttactacggcattccattgcgacgccatgtggcatttgaaaaaaacaatccacgcaatgatgaagagcgctatgggaaaatagcaaatccaactgtgcatattggactgaatcaagttcgtgcggttgtcaacacgctcatccgggaatatggacatccaacacaagtcattattgaagtagcgcgagaattaaaattaagccgtgaacgtaagctggaaattcaacgcgaacaaaaaacaaagcaagatttaaatgatattcatgtcaaggaagcttgccgaatactgaatcttgaagcatcacatctcgataaaaacaagcgacgtgaactatcacagaaaatgcaattgtgggtggaattaaatccaaagaacatcgccgatcgctgttgcccatacacaggcgagcaaatcagcatagacagattgctgcgtggagacgttgagattgagcacatcttgccattcaaacgtaccctcgacgatagcatggcgaacaagaccgtctctttaacccgtgcaaatcgtgcaaaaggaaatcaaactccatatgaagcctttggacgtgtgcaacaagctggttatgactatgaagccattttgttgcgtgctgccctaatgccgacaaataagaagaaacgctttgccatcgatggaatggaacaatggctagatggtgaaaaagatttcttaccacgggcattgaatgatacggcttatttatcacggatagcaaaagaatatttgacttgtatctgtccacataatcaagtctgggcgatcccaggtcggttaacgggcttattacgcggtaagttttcactcaataaattactctcaggagatgatacaaagaaccgtgaagaccatcgccatcatgcactggacgcctgcgtgatcggcattaccgacagatcaacattgaatacattttccagttccagtgaccgtgcatgggaatcaggaagcaagcgattgctggacaaggtcgacgagccatggcccggttatcgtgaacatgtagaacgtgcattgaataatattgttgtcagttacaaacccgaacatggttaccagggtgccatgcacgaagcaagcgcatggggattgcgcaaagatggcttggtccaacacagagtcttatccgaagatggggtacgccgtgaactagatgtgcgcaaactcggcgttattgcgtttagcgatgctaaagcaaatgatcgtcacggcatcactgaagatggacaatcaaaaccctataaagggtatgtaggtggcagcaattattgcatggagatatgggcagacgacaaaggtcgctggaatggtgatgtcattacgacttttgaagcgtatcaaattattcgtcaatttggagaaaaaaagggctgggaaaaacttcgcgatcccaaattaactgtatctggaaaattgctagcaatgcgaataatgagcaaagactacctaaggttagagatagatggcaagctgaaaacaatggttattgcaaacataaaacagaacggccaaatatttattgctgagcacaatgaagctaatgtagatgccagaaatagagacaaggaaaattcattttcatatatatcaaagatgcctggttctcttcaaaaggccaaaggcagacgctgtacagtttctgaaaccggcaaacttcgtgaccctggatttaggggatagttaccatgataggccgcatagtagaaatagcagatgaccgacggcatttatttctatcacgtggctttatggtggtgcaagatacagaaggtgagcgcaaagaattaggccaggtaccgctagatgatattgcggcagtcatcgccaatgcgcatggtctgagttataccaataatctcctgattgccctggccgagcgttgcgcaccttttgtactatgctcggccaaccacaatgcagcaggcatgctactccccatagaaggcaattaccaacaagccaaacgctttgacgcgcaaattgcagcttcacaacccacgatcaaacgtttatgggcagatatcgttaagtccaaattgcagcagcaggcagcagccctggaagctgccaatgcaccaacaattcctctgacatccctggtgcgcaaagtgcgctcaggagatcctgataactttgaagcccaaggtgccagaagatattggactttactctttggtgatagcttcagacgtgaccagcaagcaggtggactcaatgccatgctcaattatggctacaccgtgttgcgtgctacaacagcaagagccattgttgcggcagggctacatcccacacttggattacaccacagcaacgaaggcaatgccatgcgcctggttgatgacttgatggaaccttttcgtcccatggtggatttaaaagtgtggcaactacaaaaacagggggaaaacatgatcacgccagaaaccaagcgcgcactggtacgcaccatgtacgacgacatgcaaaccagcgcaggcgtcacgcccatcattgtttgcacccaaaaattggcaacttccctggcacagatatttattggagaaaaagaaaaactggatttacccctgcccggccttcccctgaacctcgcggcatccctgcttgatgagtaatatgccatgctcagcggatatcgcatcatgtggatgatagtgatgtttgacctacccgttatagagaaggccgagcgcaaggcagcgacagaatttcgcaattccttgctggacatgggatttgaaatgtcacaattttctgtgtatatgcgcttttgcacgagtcagacacaagtggagacttattgcaggcgcgtagaacaaaaactgcctagcggtggcaaggtaaatatcctacaatttactgacaaacaatacgagcgcatcatcacttttcgcggaaaagccaagcaggcagcgaaaaaaatgcccgaccaattcgatttattctgatgaattcagccatttttcttgcctcaaaaaacaataaacccctgaataatcaggggcttattgcatttctagtctaacagattgggatatgtgctctgaccggaactgcggcggcggtatgtatgtggactcaactagtctaacagattgggatatgtgctctgaccggaacctcattgagcgcgccacgactcatcgccgtagtctaacagattgggatatgtgctctgaccggaactcaggatgcaggcgcaatataatgccgtccagtctaacagattgggatatgtgctctgaccggaaccctatattgttttgcatatacaagcatgatagtctaacagattgggatatgtgctctgaccggaactcctcgttaaatggaaaaatcaggtctgatagtctaacagattgggatatgtgctctgaccggaacagtcagctttcggctaccatccaatttgtaagtctaacagattgggatatgtgctctgaccggaactgattgatccaatcaggtgagtgataaatgagtctaacagattgggatatgtgctctgaccggaaccctgctgctggttctttgttggagtcgtccagtctaacagattgggatatgtgctctgaccggaacctgcggctgtaccgcgatacgtgtacgcgcagtctaacagattgggatatgtgctctgaccggaactacatcaccctcttcgcgtgggatgaatcagtctaacagattgggatatgtgctctgaccggaacaggaattgcgcgatcaaattgcacagatagagtctaacagattgggatatgtgctctgaccggaacccggatgacatacacaggtggcaatggagtagtctaacagattgggatatgtgctctgaccggaactacattgggcttgacctcaaatgttacgccagtctaacagattgggatatgtgctctgaccggaacttgtcattgatgaggcgtggaagttctgggagtctaacagattgggatatgtgctctgaccggaacaacatgcttggtcgaggattcagcttggcaagtctaacagattgggatatgtgctctgaccggaaccttaccatctttgtcaacgtatcgtccgcagtctaacagattgggatatgtgctctgaccggaacgcgatagctaataaggcgtggattgatgccagtctaacagattgggatatgtgctctgaccggaacagtatggtctgccagtggtgatgtgggcaaagtctaacagattgggatatgtgctctgaccggaacaatcaggggttttttagacatgacgcgctcagtctaacagattgggatatgtgctctgaccggaaccaggctgtacctgttgccggaaaccctgtaagtctaacagattgggatatgtgctctgaccggaacgaccagcaagcaatcatccttgaaactctcagtctaacagattgggatatgtgctctgaccggaaccgcctcacattgatgtcatcgctcatttgaagtctaacagattgggatatgtgctctgaccggaacacctcaacaaggtgattctgctgttgatcgagtctaacagattgggatatgtgctctgaccggaacatgtcgacggccttggcgtattcgccttccagtctaacagattgggatatgtgctctgaccggaactcggttaagcgtacggtcgccatgatgttagtctaacagattgggatatgtgctctgaccggaacaccgcaattaatgactcgatagacggcggtagtctaacagattgggatatgtgctctgaccggaacagaatatgtccaaaatcacgatggcgctcaagtctaacagattgggatatgtgctctgaccggaaccactcgttgccgtctttgcaaagtatcttgagtctaacagattgggatatgtgctctgaccggaactaagctatttggcgaattgatacttgatgaagtctaacagattgggatatgtgctctgaccggaactatgccctgctctccatgcacatataagtgagtctaacagattgggatatgtgctctgaccggaacaatcaatgtgtccacaacttcacgatcaaaagtctaacagattgggatatgtgctctgaccggaaccaatatcgcctgccgatgccgcagcactgaagtctaacagattgggatatgtgctctgaccggaacttgagatgtgggaaggttacaagcagaatcagtctaacagattgggatatgtgctctgaccggaactgttcaatgaggctgatcgattggacggcagtctaacagattgggatatgtgctctgaccggaactccatcgctacgcttggcaaaaacgtcgctagtctaacagattgggatatgtgctctgaccggaaccatcccggctattcagacgaacttgcctctagtctaacagattgggatatgtgctctgaccggaactgattgataattcatgccagcatttgtctcagtctaacagattgggatatgtgctctgaccggaacttcaccggattgaacgggctgcgcgttctgagtctaacagattgggatatgtgctctgaccggaacaggatttaatcacgcgtcaaatggttataaagtctaacagattgggatatgtgctctgaccggaacttctgaatggatgttgtgctctggttctgaagtctaacagattgggatatgtgctctgaccggaacgctggtccgtttcttcgctgagcaaattgaagtctaacagattgggatatgtgctctgaccggaaccatcctttcttatttatgccagccttgactagtctaacagattgggatatgtgctctgaccggaacacgatgtgggcgcttgtgatcagcgactgtagtctaacagattgggatatgtgctctgaccggaacactgtttgcatgccgtccagcgctggtgtaagtctaacagattgggatatgtgctctgaccggaaccgcctcacattgatgtcatcgctcatttgaagtctaacagattgggatatgtgctctgaccggaacatagataaggctgtcgcgcatgtccaaggcagtctaacagattgggatatgtgctctgaccggaacagagggtcggcattcatgcgcatgctcataagtctaacagattgggatatgtgctctgaccggaactggttgaatgctatacctgacaagagggaaagtctaacagattgggatatgtgctctgaccggaacactcgaatggttgtgtcgatcgtgtttttgagtctaacagattgggatatgtgctctgaccggaactgcgggtcggtggaatctacaacgaccttaagtctaacagattgggatatgtgctctgaccggaacttgcgcgaagcgtggccgctgacccgtgaaagtctaacagattgggatatgtgctctgaccggaactttaatcccccctacccgcaggcggataggagtctaacagattggaatatttgctgcgagaagaactatgcggcgtaagccccaatacaaaattctgcttacctgatcaagcaaaagctgccgcgcgccagcaaattatttagacaactggcgcaggacttgaaaggcattttcaaatttcactatttgggcttcaccttactccggatataacgcatgatctacatgcccaactgcctcaaaatcttttgcgcagtctctatgcgtgtctgatttggataattcttgttggccaggatgacgatacccatgttactggctggtacaaaggcgatgtaggcaccgaagccaccggtggcgccggttttatggataaagacgtttttaccgggtgtgaacggtggtgtgattttggtcaccggagtggcgtcaaaggccatgagtcgggatgagcctgtgatcacggcagcaatatctgtcgggtagggataaagttcccagacaagactctgggtcatgccacccgctttgaagtagccggtgtgggtgttcttcagagcggctgcaaattcgggggagagttccatctgacccagattagcgcggatgaattgcacaaggtcgctggcgctggttctgacgccgtaggcttctgccgagagaacatcttcgctcatgcgtaccggggtgtcgtcctttttatagccttgcgcatagtctgcacgttttctttctggcacaacaatgtaactattattcatgcccagagtgggaaatatctgttcctgcatgatggtggcaaagggctgctgcaggctctgggctgcgataacaccgagcaggcctatgctgatattgctgtaagtgcggtatgtgccctggatatgatctgccttccagttcttgagataggtgatcagttgctcatcactgatcacttcctcaggaacctgctggggcaagccgcctgtcgtgtgcgttgccaggctcagcaggctagtctcgccaaactgcgagcctttgaggctggcaatgtggtcagcgaccttgtcgttcaaagccagttttcctctgccctgtgccagcgtggtcatggtggcgataaaggttttgctgatggaacctatctcaaacaaggtgttatcggtgacgggaacattcccggctttggatgcgagcccgtagttgaacacatattgtttgccattgacgaaaattccgacggccatgccagggatggcatttttctcctgtaccgggagtatggcctcatcaacgacacgtttgagctggtcagtttctgcgctcgtggctgtcaggctgaacatggctgcgatgaataagatgctgatttgatagaaatgcaggacgactgatttcattttattttcctaaaagtttttttagctgttgttttaacagccaatgttttaaaaatggagagatgctgccgggccggattacaacttcacttcccataccagccgccaggttcgcgctgactgttgttgattgatatctgtccagcgtgaaactgcattggtatagatgccgctgtcgagcttgtcttgttgcagcacattactgactgaaaaacgcaactgactttgcttgttttgcttccaggccaggtagatatcgagatgacgtctggggctgttgtgccctgtcagataagctgattcacgaatattatttgcggcctgatagctgtaatctgcccccacccgcaaggcgggattgatctggtagtcggcaccagcactgaccatcaaacccgcctgttgtgccagatggttatcagggccgggcacttgttctacccttgaccagttgcggttgaaagtggcgcgcagctccagcactggcatgctggacgccagttgctgcaagttcagttttgcctcaatttccagaccaaggatacaggcgcgaccattgttggcgagactgctgacccaggtgctgccaatctgtgtagtctgctcgagcatgacatcatctatccgtcgccaataggtgttggcgctgatgacgctattctcagtcaggtagtgctcataagccagctccatgccccaggcgcgttctggccgcaagttgggattgccctgaaaatctgaattgagcggggtattgttgttatcgatgcggaacaggcgtggtacgagattacccacggtaggcaatttgaaactgcggttgagtgccatgcgccattgtctttgggcgtcgagcttccagacgctttgcagtataggactgagcatgctggcattattttgaaaatcaaaattacctgcttctttgctattgctgctgatacgctccatgcgcaaacccaggtaagctgaccaggcattattgatggtccattcatcctgcagataaacggccagtttttgcaagctggcctggtagtcgtgtgcgctgtcaggcagtgtagtgaattcctgctcattacggttttcatgacgcaatgcccgactggcttcccagcccagactcagcacatgtgattctgaatacggtgccaggtatttgccattgaagcggtattcattttcatcggcatcacctgtgacataacgatgtatttttaatgtccctgcattgtccttgccccagaaatgaaatttggtcgatctgtccaggctgttccagcccaggttcatgctcagcctggcgctgtcggcgaggcgtcgctcccaactcagatcgttacgcgaggtgaatacgtgggcgctccagatggagtggttatccgggaactcggtactgtcaccaacataggtattttctttttcctgcttggtctgctcctgcctggcgagagtcaaattgccctgccagctcagactgtcttgcgcattgattttccagttcaggcgtggcgacaggctggcagcatcacgacggttttgctggctttgctgcagttgtctgtctgctgtcgtttcccatgcatcacgcatgctcgcgcgttcagactggctttccgtcgccaaggtattgagctgattgacattgctctccaaggtacctgccagcacataagaaatttcaggtttatcgtcaaactgatttcccaaactccatgacaggttgcccgacaaacgtccggcctgcaggctggcatttgctttgatttctgtcgcctggttgctgctttttttcttgaggatgatattgatcgttccagcaatactctgggcactgacatcggcgctggcgacacgcatgacttctattttttctatcaagtcaggggcgatgctatctatggtgaaacctaccggcgtggtctgtccattcaataatatctgggtgtaaccattaccgaggccgcgcatgcgtatctctgcgcccttgcccttgctctcggtgacactgatgccgggcaggcgtttcaagacttcgctgagattggtatccccgtatttttctatgtcttcacggccatagatgctgcgcatgccgacatcgtcttgacgatcgcgattgggttgtgactttgcattgatttctacctgttgcggtgtttgctgtgcctgttgttgtgccaacgcctgcttaccggcaaacagtgccagaacactgagcgctatggtagatagacgtgttgatgcctgctgaaaaagcatgatgttttctttcatcgacagattaagggttgtaacgggtgtgactggtccttgcgccgttcagggttcagggcgcaggacagtcagtgtgtaaatgggactgtggtttagccgggcttggcagtttccagcgccgtgcgtatgtgcatcacgtcatcagtacgtacatcgctgttttttgcattcagcaagaccatgatgacgggcttgccagcgatggtagtacgcatggtcaggcagcggcctgcgattttggagtaaccggtttttgagatactgatgtcccagtccttgctggccgtcaggctgttggtgctctggtagtcatagcttaggccggcgacggtatagctgccttcactgcggctggcgagcttgcgcaattccgggtagctggctgcggccttgaccagcagtgcaatatctctggcattcgagcggttattgggtgagatgcctgccgcttcttccagatgggtagcctgcaaacccaggctggccgtcttgctttgcaaggctgccacaaaagcgggcttgccaccaggataagtcctggccagtgccttggcagccgcattgctggaaggaatcagcgccaactccagcagggtctggcgtgacagcaccgtgcctggctgcagcttgacctggttggtatgccagcctgccacgtcttctttgctgatggtgatggcttcatctttatccagttttgcatccagcgtcaccatggctgtcatcagtttgctaatggatgcgatgggcacgatagtgtcggcatttttttccagcaagactttgccactttgttcatccaccaccagtacatgttctgaactggttttgacataggcgctgatgtgggtaaccggttctgcttttgcggcggcaactggggctgatggcactgagggctctgatgattctggtgtggcattcacctgggtttgcaataccagcaacagtgccgcagcaataccgagcacgggcgcggccatcttccagtgccagggttgtgaatcagggcgcaccaggcgtttgatgcgtgacagcaaatcaccaccgctggccgccatcgcggcttgcggcattgcagcgatctgcaatttatccagcacttgcagggcacgcgccagtgggcgggtctggcccagcatcgcggctgccatgtcgtcggcaatcagttctctttctgcatcgatgcgcttggaaatccaccacactgcaggatgataaaacagcagcgacaagaccaggttttgcaaaaggttgacgacataatcccagcgcttgatgtgggccagttcatgtgccagcaaggcttctatcatgtcgggtggcatgccggtcagcaaggacgcaggcatgaccacgacaggcttgatacagccataagtgaccgggcttaacaagtctttctggaacttcacctgcacctggcggcgtatagcaaattgatacgccaattgattggtgcgtgcctgccattgctgcgtcaagactgcaatatcattgccatgctggccaaggcgatacacccacagcaagcccagtgccaggcgcatcaacatcaatagcacacccatgctccacagggtgactaccagcggcaaccaggcc

SEQ ID NO: 1837 - DNA, 23060 bp, synthetic construct
  source 1..23060: mol_type = other DNA
  misc_feature 1..23060: note = Synthetic
  variation 14362..15325: note = n is a, c, g, or t
gcccacctctaagacagcgcatcaatactgattaacgaataacgccgtaacctaccataagtaaggtcccagtcagcaaggctgggaccaatcttttagcgggattagataccatcacgccaatcgctaaagcacaaattagaatacgtacccatagaggtacggttgccattaaacccagtggcatgacgatcaagcgtgttgtgagtgcagctaccatcgcgtaagttacagcagctagccagcgaaagatctcgctctcttgattaatactctgcgagagaaataccccgatcgcacggcagaaataagtacctaaacaagccccaaccaaagcgatccaaagaccccaaccggaaaaagaattgctcatctgatttaaggcatccattagccaagcactcctgcttttttacgcaagaaatttcgatcaatcaagtaggcaatggttccagctactaaacctgaggttaacaagctcgtgtcgcgatcaatgatgaaaaagatcgggccaaagatacaacccagcaatagggcagttcgattaatccaaggcttcacctctgtaaaggtcaacaagaagaacagtggattaataaaaaccagccccaaagtcactgcggccggcaccatccctgccaagtaaaaacccaagatcgttgctggaacggaaatcaaccagcagagcaaacctagacctacaaaataacttaagcgatgtctagcttcaatcgcatgaaactctcgcatcgaaatcgcccatgcagtcatggccagcaaatgcaccgaagcatagagactgcgattgcgattactttgatgcagctgcggaaagagtgtcaccgtcatggtgataaagcgtgtagaggttaaggtcactgctaaggcgattgctagcgctgatgagccggtaatcgccatctcgaggagaacgacctgtcctggtaaagcgaacatgaaaaatgaagtagaggtggtaaaccacacatcaaagccattggttttacccatcgctccaaaacccaccatgccggcaaagagtaccgctgcaggtgcaccagctgcatctcgaatcccggaccaaaacgcatcacgcgggtttttaaagcgctgtacaacagcctcttctagcggggtttcgctaggatcgctaggatctatgcgaggctggttggaagatgacatagtttgattgtaaagcttgtgactatgttgactgacccaaagcccattgaatatgctcagtcactaaggggtctgtactctccagcgctgcgctgagggcatgacggatagcgtcctgctcttctccgctagccaaggcgttacccagagcgacagcgagattgcgacgccagcgactatagccaatccgacgaatggcgctaccctcatgacgctgattaaattgttcttccgtccaagaccagagttgcaagagactcgcctttccgagaccatgacgttcagcaaagtctggcaacgctgtacgttgcgcaaacttattccaagggcaaatgagttggcagtcatcacatccatacacacgattacccattgctctacgaaactccactggaatagcatcgggattctcaatcgtcagataggagatgcagcgacgggcgtctaattggtacggtgcagtaattgcttgcgtaggacaaacctcaatacaagcttggcaagtgccgcaatgcgactcctgttcttgatcaactggcaatggaacatctactaagatctcgcccaaaaagaaggtggatccagattctcgattgagcaacaaagtatgtttgccgcgccaacccaatccggcctttcgcgccaactccacctccatcaggggcgcagaatccgtaaacacgcggttgccaaatgcgccgatctgcttttcgatcatttgggcaaactcttgcaaacggttgcgcatgactttgtgatagtcacgaccacgggcatataccgacactacagcctgagttggatcagctaaacgttgccattcatcatcaaaatcaattttcggggagaggtaattcatggtgacgcaaatgaccctgacagtacctggtactagcaagcttggatccgagcgtaattgagcatgccgtgccatgtattccatttggccatgccgcccctctgccagccactcattcagacgctcagttgcaacgccaagatgcgtgtcggtaatgcgcaagccgtcaaaacctaatttttgagactgctcatccagccattcacggagattggcatagtcaacgggggcgcagtcaacggagctgggtatttgggaagaagtcatcaggaaatcaagaatacagaatgtagcttaataattgaataaactaggcaaatggctcagaattcatttactcaacattgtaggcaggaagcagacaccactgctttggcgcaacagcttgccatgaccatgagccatttttttcaagcaaacccaggtgcccatcttaatatctccctagaaggtgatcttggtgccggcaagactacctttgcacgttacctcattcagggcttgggatatgacggcagggtcaagagtccgacctacagcttatgtgagctttacccaatacaaataaagactgaccatccagatagcgcagtcagcatcacagcacatcactttgacctctaccgcatgagggatccgctggagtggcaagaagcaggatttgtggagcattttgatgagcctggcttctgtttagtggagtggccagaaaaagcagaaggtaccctccccgcttttgatattgaaattcatttaatcgctggtgaagcggagtgcgataggcagatcgagcttaaagcgatctctgatcatggggtagcagtcttagagagtcttcggccccaatagcgatgagtaaaaccgccatcaattcctccagaagaaaacatctccagacttcggcaaagatgctgggtttcatcctcttcttttctgaaatggatattgcttggggagcaaagattctcggtgtacgtatttggccggccgaggactacacacgcattaccctcgaatccgataaagcactcccgattacccagcaactcctcactaatcctgatcgtttggttgtcgatgttcagggcatggaactcaatgccacattaaaagacttagtcgctaaagtgaagtcgaatgacccctatgtgtcacagattcgagtggggcagtttcaacctggcacggtgcgcctagtatttgatctcaaggaacccgtaaagccgcagcttttcacactcgatcccgttgcagagtatcaatatcggatggtgctcgatctctaccccgctacgccaccagatcctttgatggagttggtcaagagtagtgcccgcaaagaaagcgccttagataaagccaatgaagaaatcgatctaattgcacagttcgcgacaaaaaaagaaaaggatgcccccagggcaccagtagcgcaagccatcccagatgtaaaagaagcttcaacaaaagcgaagcagaggcgcctcatcaccattgccatcgatgcaggccatggtggagaagatcccggcgctataggagcgatggggtctaaagaaaagcatatcgtgctttctattgccaagcgtttacacgacaagattgagaacgatccatttatgcgaccatttctgacaagagatggtgactattttgttcctcttcacaccagagtacaaaaagcacgtcgagttcaagcagatttgtttgtgtcgattcatgcagatgcttttatcgaacccagagccaagggtgcctcggtctttgctttatctcagatgggtgccagtagtacgacagcacgctggatggccaataaagaaaattcttcggatttgattggcggaatcaatatcaagactcaagacaagcaagtagccaatctattactagacatgtcgactactgcccaaatcaaagactcacttcaagtgggcacttccatcctcaaacaaatcagtggatttgcacccttacacaaagcaaaagtcgagcaagccagctttgccgttctcagggctccagatattccatccatcttggtggagactgcctttattagcaaccctcaggaagaggcacgcctcaatgacgatgcttaccaagaccgcattgctgaagcaatcatgaggggaattaaggactatttctctaaaaacccacccgttgctagacgcgcaaacgcgtagcgctcttgtaagtacaagggcttgaaggcagacacctacagacccgggagtgcccataaacttcttgctataatcttctttttactgggtcggtagctcagtcggtagagcagcggacttttaatccgttggtcgcgagttcgaatctcgcccgacccaccaagcattacaagggcttagattaatttctaggccttttttgtttgtaggttttactctgggtaacattggggtaacttctgcatgagatatttcttattgtttcctacaatagaacacaagccactcgggatctattttctggggcgggttattagtttttggctttaccccataaaaagttggtagcgagagcttatctactgctaatcctactacaccacctagtgtagatttaacctgtatgtagcatacagcctcttgcgtcttcggataatatttatactcagtcacatccttatacgatgttggcaaatcccatcgctctccctttgaattttgtacccatttaatttcgaaccttgtcctagagagcatgccctcctctacaccatagattttgtcgaccgcaacataatcagccatagcctgagagcaaaccatgaacgataagcacgcaaggtaaatagatgtaattagtctaatcatttctttaaaccatctctatcctgtaaaaagctagctaaatgcttaattaaacaaggtaaaacatcgctaactcatcgcacaataacaatatagattcattcaaacaacgcacttattgctggggtttattgactgcaaaaattgctataccaaaagaaaacaacaaggggagaactattgcattaatggctgcctcctgattggatccagaacctaagccaaataaaagcctagtgatggcggacaaaaatgcaatgagaattacatacagaataatttgcagcaaatttaactgagctttcccacgaaatttaagagccaaataaacgcacacccaaactaataaggaaggaaataattgctcaagaaaaagatgaattaaaggagtcataggtaaccaagtcttctaagttttatatgtttgtagactatattccgtggactgtcaatccacataacgccatattcgaggggtgagaaactcctactcccagtcaaagaagcttatagctattgttgccaaggctgagagaacgcgacttggactttctcaggaagcatttgctgatgcctgtggaattgataggacgtatgccagtcagattgagagggggatcgccaacccctccctagaggtactttgcaggattgctgatgcacttgaaatctctgtgacagatttactcggcaagcaccccagctaagcaactaacaaaagtaaaaagaacatgaaacctacagagcataggttttgtaatccttaatgactggccttggggttacgataccaatgatttcagctagatccatagggtcccttgataccagctggacaagttcattttgaactgcactatctcgcatactttcctcattgacagagagtaggccaacaatttcggtggctatcttcatgcgatattccgagggataacgcactgtaggacgtggcttagtaagtccaaaaaagaccccaacattctcatagaaatgttcatgcatagccctcatttttgtgcggttcccataaagtttcgatccttgaaggctggaattgaccagtggaataagaataatgtggcaatggggacaagcttcatctctatgaacaattgcgcttaacacgtaaattccgaaatacttcctgcaccactcaatacaactattaaaaaactcttcttcattgagtttatgaccattaggtaagctaaagacggcttcgattcccagaactgcatctcttcgaatctttctgagtagattagctgacttgatgactgcatcatactcaagcttaacttcagaagaggtgtcatggcctacaagaatttgattctctcgcgttctcatggggtcaatcttgccaatcttagttctttctgcaggaatttccctaaggttatgcatggaagccatcttaatttttgttggaccctttagccttgcaagacacagtacaggggctatgcttttatgaggatggttaatgattgattcaaccatttaaacccccagcattgcaaacattgcgatcaataaattcacatagatcgctcatgcggtatctaatcttacgaccgattctgatgaagggtaatggatatctattggttgccctccatacatcaagggtatgaggagatacatccaatatctttgctgcttgctttgtgtctatgagtacaacgttgttatcaatcaattaaatctcctttgaacaactgagtaattggctctcgaagaaatttcgtgaatctcagttatgaaaaggaatttagtccatcaataaaatactttcaacttagcatttagatataacttatgaagcactaagatgctttgtagtgctttaaattaatctaagaagttttaagctgcactgtgaacgaaaaatatttttaacttcatgcctccccgtgttgtttattagcactggttcctaatacccctagtgatacatccgattggtccctatggggggtgtctgcattgtcattgctttggttgcatctgatgtagataccctgacaggatccatatccatgcgtgcataaatctgtgttgaagcagggctttggtgatttaagcttttcccgataatcaaaggtgagactccgttgatggcctgccaacttccataagttctccttagatcatgcatccacagatcttccattttccaaatgttgatatcaatttttagcctttcactaacatcacatagctttgtataggccgcactaggactgtcctttagcatgctattcaaaaccgcctcctcctgaaggctaagatggttccgagactttaagtagctcataccattaaggcaatttgctctcatttttattcttacccaccccttctttggctccattaggtgaccatacttaccagcactaggaaatacatagtttgatgattgattcgtagatcgaggagagagaatgccgatagcctctggagtaagcgggatggtttgagacatgccattctttgttcgtttgatattccataaccgattcgaaaagtctatgtctgaccagcgcatcgataaaacattcgaacgccttgctccagtaaacagtgatacgaggacatagtccctgatgattacgttttcctccaactgtgtagcacttaaaaaggctgccatttcattgggaagaatgtacctctctcttgacttctctttattttttctaatgccagaggcaggattcagggtgtaataaccccgatcgattgcccagctaaatactgctgagattaaggcaatggttctattggccgtaaccccatgaccacttgccgttatagaggagtgaatagatccaatgtcacccctgtctatttctgcaagcttcttgttaccaaggggggctttcaaatacttgatgtatttctgccgatctgaactatgcgtgatcttattgggaatggagtgttccttataaaaaagctcaaatagatcggcaaatgtcatctgcgatcgcttaatttttaagccttcagccacactcaccccattagaaagcattgaaacgatttctaaggccttattacgggcctgttcaactgtggtgcttgggtattccccgatagtaattcgttgcgtcctaccgtttttaacgcgtttgtgtacagaaaatactatccgacccttttggtttattcgcaaacacagtcccctcacacccgtatctctgtattcaatccgaccacccaatgcggcaggctctagcatgtcaatagtatttttagtgaatctaaactctctacttttcattatgtatctctcctgtgggtaacgtgtgggtaacaaagtacatgcaattgcgtgattgcgtatgcatctgggtgaatacttgatttgctttgaagcctttttgataaaggctgagatgacttgatgcatcatcatgaacaatgctgaatagattgaacacgtgacttttaatccgttggtcgcgagttcgaatctcgcccgacccaccagtatctataagccccacaggttaacgcctgcggggctttctctttatattcacctttatattcaccaaatggtgaatatattagaaaacatacctgattttctcaagtgcaataagctcatagaattgatcatcgagtggttagactgaaatagcgtaactcagatagtcaaaataaaaaggtgggtaaataaactttctacactcaaatagccaaccgtcccaaatcaaataaaggctcaagcaatgggattacgctttcaaaaacggattaccttatttaagggactcacgatcaatctgagtaagactggtgcgagcgttagcgttggaccacgtggcgccaaactgaatatccgcggtgacaaagttaccgggaatatcggaataccaggaacaggcatcagttatcgacagcgcttagatagccaacaaagctctgagcaatctgctcatgtagagcctcttcaagaacatcatcaattaccatctgaggataagacataccgcagagaattaagctggagggtgtttgggttgattagcttcgcgggatttgcttatgtcacctacctactgataacaaggtaatgacattttggcgatggaaactaaagaccccgcagggcaatctgaaaagcacccacttaagtgagactcgctccagccgtttacggggtattagcaatggagttgtatcactaattccccatgcccattgctggactgttccctcttattccgatgtgataggcgggtttagttttgcgcccgacggagacaatttcataataaaaggggcgattcattgcgagagagcaaagcccttttccctcttggtcgtaattcacgcctgcggtttgaacgaagggctctacatagaaggtggcagtttcgcccgtgtcgaattgggcaaccttgatgctctctatccaaagttccaagtaacaaccgccccccaaaaatccctcatccctagttacgctaagtggataggttcgtttttcgtcagggatttggtatgccaataagcgatctttgggtaccggcttagcatccttagatgaaatattcgtagcgcagcctgtcgccattaacactaataaaaaagttggaataagtgatcttttcaaaataaggtcctttgcatgcgtaggtggcatcctatttttttagacaatgttgttaatactatgccttattaacccgataaaacgatgatgcctatgtttgccgttagtaaaagttcaaactgacataagattatctgacacccccttattcaaggggtgtcatacataaagatcttagttaagaatgatttgaaaatatggataactaataaatccttttgcttttcctgctcaagtatttgtaagcaaatcttctctttactacgaagcctttgtttgctccgcccgctgagtgtaagcaaggggttgggtggatagaaaggcgataggggaaagaaaagagccgcacatggcggctctgcatttggtgcatttttcggcttgttagcgttcaaagcacatatcccaatctactagcttcttagtgtagtctatctttatatatattctgtaaattttataaattatttaaatattttggagatctaaatgctacctaaattaagatatagactggcattagatctcggcaccagctcgattggctggtgcctactaaaaattaatccagattaccaaccccaagccattatcaaaatgggtgttcggatattctctgatggcagaaaccctaaagacgggtcttccttggcagttactagacgtgaagcaaggcaaatgcgtagaagacgagatcgacttctaaagcgtaaagcccgcttaattgattcacttattaaacatgggttctttccaaaatctcctgaagaacgtcatgctagtgtgaccttagacccctatttgttacgtagaaaagggttgtatgagactctttctgccagtgaatttgccagagccctcttccatcttaatcagcgccgtggctttttaagtaatcgcaagaccgacaaaaaagataatgatagcggcgctcttaaacaggccatcatcaaattacgtaaaaaattagaggaagagcaatgccagactttgggtgaatggctggctaaacgtcatgaacaagggctaagtgtcagagctagattgcgcggtaaaacccaaaaagataaggcatacgacttttatgctgaccgcgccatgattgagcatgagttcgataccctttgggaaaaacaaagagtattcaatgccatgttatttaatgaagctgcaagattagaactaaaggatgtactactattccaacgcaatctaaagcctgtgagacctggccgctgcacattaatacctgaagaagagcgtgctcccctcgccttaccaagcacgcagttatttagaatttatcaagaggtaaacaacctccggattctgtctgaacagttggcggaggctgagttaagtaagggacaaagagatcagattgtttcattactcaatctaaagagccgggttaccttcaaaggaatatctaaggcgcttaaactttcgtctggatcttcatttaaccttgaagatgtcaagcgggaattcctaaaaggtaatagcaccacggcaattttgtcaaaagatgatctttttggtgattcttggcatgaattgaatcttttagagcaggatacaatagttagccgacttttaaacgaccctagcgaacagaaagttatcgcttggttaatgaataaatttactttagacgaatccacagcagaaagaattgctaatgcctctttacccgagggctacggaagccttagtaaggctgcactagacaaaatccttcctcaattaatgggcgaagttgttacttatgacaaggcagtggtagcagctggctttgactctcatagcgccctttcacattcccagtcaaccggtgaaattatggagtctttgccatattacggcgatccattgcgtcggcatgtcgcttttgccaaagataaccctcgcaataatgaggagcgctttggaaaaattgccaatccaactgtacatattgggttaaatgaacttcgtaaagttgttaatgccttaattaagcgatatggacatccgagcgaagtaatcgttgaggtcaccagagatttaaagctcagccgagaaaagaagaaagagattgagcgcgatcaaaaagacaggcaagactttaatgaaaaattagttatcgaagcgtgtggcgttttaaatctaaaccccgataatttggatcgctcgaagcgaagagagttatcgcaaaaaatgcaactctggtatgagctgaaccctcatgatgttactaatcggtgctgtccatacacgggcgagcaattaaacatctcaaaactactgtctagcgaagtggagattgagcatattctgccgtactcgagaacattggatgattcgctaaataataaaacagtctgtatcagtcgcgccaaccgaattaagggtaacgatacgccctatgaggcttttggtgctaagacagagccaggttatgactatgagtcaatagtgcatcgagcttcactcatgtctaaaaataaggggaagcgctttactgaagatgggtaccagcgctggctaaaagaagataaggattttctagctagagcattaaacgatacagcttacttatccaaaatagctaaggagtacttatcgcttatttgcccaccaaaccgggtcagagccattccagggagaatgactgccctgcttagaggaacattcggcttgaaccaattactctctagcgatagctctaaaaaccgtgacgaccaccgtcaccatgcgttagatgccgcagtgataggtgttactgaccaaggtctattacaacggttttcgcaagccagtgccaatgcaagaagtatgcagttggatagacttgtcgaaaatatgcctctaccttgggatacctatagagagcatgttgaaagaggactctcgaacattgttgttagccataaacccgatcacggttaccggggggctatgcatgaagagactgcttggggtcttcggagcgatggcgtggccaccagaagaattcatgaagaaggtagcgatcatcgaattcgtgaatttgctaataaaaaattagtagaaattagcagtactaaaaatccagataggcatggccttgatagtaatggagaacctgccccatataaaggctatgtaggtggtagcaattattgtttagaaatatgccgagatgagacaggcaaatggcatggagacgttattagtacttatgaagcctaccaagtgattcgcaaactaggcgaagcggaaggtgcaaaaaaattaagccactcaaccttaagtcaaacagataagccactggtaatgcgcttgatgatgaatgactatttaaggataaaaatcgatggcatcagtaagataatgcgtgtagtaaagatcgcgggaaatggacagatttccttggcgctacatcgagaggctaatgttgacgccagaaacagggataaattaaatacttttagctatatctctaaaatggctggctcattgaagactgcggaaggttataagattaccgtttctccgattggtgaagtaagtagccaattccgttagagccagattgtgcttaatcgaatcgttgaaatcgccgaagaccagcgatacctttcggtgttacgaggattcatggttattgaaagtacaggtgtcgagcgaagggaattaggccggatccctttagatgatattggggcagtaattgcaaatgcacacggcttaagttacacaaataatttgctagttgctttggctgagcgtggagcaccatttgttttatgcgggtcaaaccataatgttgttgggatgctattttctgtggacggaaatcatcaccaagccaaacgctttgacgcgcaaattagaattagtaagccgattagagataggctatgggctgatgttattaagtcaaaattagcctggcaagccgccgttttagaacgggtcggctcaccttctgcacccctaaaatccttagtcggaaaagtaaaatctggagattttgaaaatatcgaggctcagggtgcaaggcgctactggactcttttatttggcccttcttttaggcgaaatcaggaggctcaaggcgctaatgcgatgttgaattatggatatacagtattaagagctatgaccgcgcgtgctgtggtcgctgccggcttgcatcctacacttggccttcaccatagcaatgaaagcaatccaatgaggctggtagatgatttaatggagccctttaggccagtcattgattttaaagtttggcaattatgtcaaaaaggcaagatggagattaatgctatcgtcaaaagagaaattgtgttgacaatgtttgtagatattgaaacgaaagatggtatttctccattatcggtttgtattcaaaaagccgcgacatcacttgcgcaaatatatttaggcgaagaaaaaaagctttacttacccactatatttccttctatagaggaatttatgggcgacgatgaaccctaaccatgttatcaagctatcgaatcatgtggatatttgtgatgtttgatttaccagtagttgaaaagagtgagcgtaaagctgcatctgattttagaaatgggctgctggatattggttttgaaatggctcagttttctgtatacatgcgattttgttccagcactggacaagtagagactctcgccaatagggttgaggcatctctaccagagggtggcaaagtaagtgttttacaatttaccgacaaacaatatgaaaggattatctctttcaatggtaagtctaaattatctaaaaataagtccccagatcagtatgatttgttctaaaaaaactgtaattttagttgctaaaaaagcgatnnnnnnnnnnnnnnnnnnnnnnnnnnnnnnnnnnnnnnnnnnnnnnnnnnnnnnnnnnnnnnnnnnnnnnnnnnnnnnnnnnnnnnnnnnnnnnnnnnnnnnnnnnnnnnnnnnnnnnnnnnnnnnnnnnnnnnnnnnnnnnnnnnnnnnnnnnnnnnnnnnnnnnnnnnnnnnnnnnnnnnnnnnnnnnnnnnnnnnnnnnnnnnnnnnnnnnnnnnnnnnnnnnnnnnnnnnnnnnnnnnnnnnnnnnnnnnnnnnnnnnnnnnnnnnnnnnnnnnnnnnnnnnnnnnnnnnnnnnnnnnnnnnnnnnnnnnnnnnnnnnnnnnnnnnnnnnnnnnnnnnnnnnnnnnnnnnnnnnnnnnnnnnnnnnnnnnnnnnnnnnnnnnnnnnnnnnnnnnnnnnnnnnnnnnnnnnnnnnnnnnnnnnnnnnnnnnnnnnnnnnnnnnnnnnnnnnnnnnnnnnnnnnnnnnnnnnnnnnnnnnnnnnnnnnnnnnnnnnnnnnnnnnnnnnnnnnnnnnnnnnnnnnnnnnnnnnnnnnnnnnnnnnnnnnnnnnnnnnnnnnnnnnnnnnnnnnnnnnnnnnnnnnnnnnnnnnnnnnnnnnnnnnnnnnnnnnnnnnnnnnnnnnnnnnnnnnnnnnnnnnnnnnnnnnnnnnnnnnnnnnnnnnnnnnnnnnnnnnnnnnnnnnnnnnnnnnnnnnnnnnnnnnnnnnnnnnnnnnnnnnnnnnnnnnnnnnnnnnnnnnnnnnnnnnnnnnnnnnnnnnnnnnnnnnnnnnnnnnnnnnnnnnnnnnnnnnnnnnnnnnnnnnnnnnnnnnnnnnnnnnnnnnnnnnnnnnnnnnnnnnnnnnnnnnnnnnnnnnnnnnnnnnnnnnnnnnnnnnnnnnnnnnnnnnnnnnnnnnnnnnnnnnnnnnnnnnnnnnnnnnnnnnnnnnnnnnnnnnnnnnnnnnnnnnnnnnnnnnnnnnnnccatgttgctgcaatgatttactatagaaaaactctctttggtagtggacctaaattgacagcagttcaaggagaagtatcaaatattcgccggctgtactaaatcgctcttccatagctccaggattttattgaactcgaccggttgaatagcatttgaaccagagaatggcgtgttgtagcttaagatgagaaagaaaattaatcctagtgaagtagccagcaatgagatcatcaatatatgatgacgccgttgaggcattgcatatagagactgataaaaaatataaacaaatgcacccaagcataaagtcaaaagcattgaataatctaagtctgctttagaactagtaatacgctctaaacgcagcttgtagtattcggatattaatcttaactcttcttgctgggcaattaactcggtgttattcatcggaatgtgtcgcagcataagtaattggaattgatgaaaatcagcaaaatattgatcatcaaattgactttgggccatcagcggccactcttttgcaatgacattctgaacatagcccgttaagagtttggtgcttttctcctgaagtggaggctgaaatgcatctaaggtcctataaatggtagtgagggttgtagcctcctgcacgacaattgaattaatacgattgtaattttgccaggtcgaaacagtgatgaaagctaaggtcagtccaaagatggtgcctatcgcaaatgaaaaaatagttgcatggctagtatcatcgattgttaaaaatgaaagatatttttgaactacaaaaaatatgatgagtgaaccggcaagaaaagttgcaagaacaagtaaaagagttaatagtattgttagcatagatgtttagagtgctaactgaatataactcatatgtcatgcagcactatttatggagcaacccattgttttgtgaggacccttctcaccattggatcaaaggtagatagaggttcacttttgtaattgggatcaaaagagatttcatcgtacttggcacaaaactctacggtttgctcataggcaggatcagatttgtattgatcacgtgcattagggtcaaggccaattttgtcaccgtaaaaatatgtctggaataaaccatgctgaaccaacatccagtagttatttcttgagataaaaggatgcaaaattgaggcaattacctccccatgattaaagggtcctaatggttcagtaatatcgtggaatagtgccacgacaatatactcttcgtctttaccgtcacgcaaggctctagtagcggtctgcaaacagtgctctttcctagtgatattgtaggcagtatctttagaaagattctccagaagtgcgaagagctgatctggcaaaacagctaatgtatgttcatgcacttttttcagcttttcgaaatcagcaaccgttccttgatccatgctggtgaaatgcattttatccattagaggcctttaaaaataaatggaagagctttgttactttgcgtacatcaagattagtattttatgcttgccttgtaatgtcatgacaatctgcaactggtccagccgacttatcataacgatcggtggttgtagaagcaaaacagactgacatctcatttggaccgctcatcttaaaggtataaataccatctttatccgccattgtgccactcatcagatcgcgactaaatgagccaacgatctggactgtatggccctcaatagtaaatgtcccagcgaatgctcgatttgactgcttatcaaattgatacgttaccgttaagccaagaaatcgaacttcacctttctcgccattaggatagtggcttccgcccccgataactgcgtcatttgtcttccctatccatgtgccaatgacattgggagcttgtttgtttgaatcagacatggtcattacccttgaaattaaagaaactacactctggcatttgcctttgatacatgacttccccattccgctaactctttagaacagtcatcacgtaacagtggacactcaattaaaacagggcctccctcatgcttgatagcttggttaatcgcggcagtcagatcacctgctgtccgtaccttaattccaagacccttaccatcattcgcattaaagacattgattaagcccgcataatcccaatttttaatctggttataagggccgtcatgcagctctacctcaatggtatatccaccattgttcatcagaaaaataatcgggttgacttgatagcgaatcattgttgatagctcttgtgccgtcatctgaaaagagccatcgcctatcaacgtaatgactctcctgtcaggcttgcttgctaaggctacacccaaggttgccccagcggaccaaccaatggaaccatattgcatttgtacgtgatagcttgcacctttaggtaaatgtattttttggccattaaaccaagaatcaccggtatccaccaataggctcgtctccgagttaatcatgccctgtatttgcctttttaactctcgcaagttcaagacatcggctgttgctgcaatagccactggagcaatgggttcttgataacgctgaaactccaacattgaggcatcttttttagatacttttactgctaacgcctctaaaaattcagccatataaacctgagaaaagacaccctcaggcatgctgacttggtcaatcccaatattaattgcactgtccatcttatagagcgccgtccatccagtggttgtgtaatccgtttgttgcaccccaatcaacacctggcaatcgcttgactcaatgatttctgagcaattaggactgctgacctcagaccagtatgttccgatgaaatgagggtgatcttctgaaaaaattcccttagcatctggggtggtggctacggcacaatccatcgcattcgctaagcccaagcttgcattacctgcctgagcaggtcgtactttgaccccgacgaccaatgctggcttaacagcagcattgatacgctgtacagcagcatctaccgcagcagctaaggcgcctggatcgcttttagcagcagggattgggaacagcattgaagtaggcgccggaattttaagtccagtgaggttgcaagctatttctaaataaactggctttttcttagtcaaacaagtgacaattgcttcatcgatcattctggccgcatcatctagatggcgaatattaaaaacagccgctactacagtggcaaagcaccgctcagcttgatagagatctagttccccaatcgtatgatgaattctgtgatggtcttgctgatcgtttgagttaggaccacctgatacggctaacaaagaaagatcatccccataagctcctgccacagcattgatcaaactaagaccgccaacggtgtaagtcacaactgccgcagaaaatccggcagtccgtgcatagccatcagcggcatatcccgcattgagttcattacaacaactaatcattcgaagaccaggtgtcgctattagttgatctagcaagaccaaggtaaagtcgcccggaacggtaaagaaatattttagtccagcctcgaccagacgctgaccaagatatgagccaactgtgacctgcttcacatcattcatcttcagatgctttcaatattttttaaaataatttttatttatcactcagatttttgaagcctcattactaaggcggtccaaaaagaatattgatacgtgacttccagtttgaagtattaacgaggcctttggctatgttccggaattgtcctaaagcaatatcgaacacgttagagggtcttggcagcgcgggagttagtccaaattggggtttattatcggcaagctcaacttgatatgtgccaaagatatgatcccaaatcatcaaaattccaccgtaattcttattgatataaatatcattagtgccatgatgcactcggtgatttgacggcgtgtcaaagacataatcaagccatcctaagcgtgggaccaattctgtatggacagcaaactgataggctaaagatgcgcttaccattccatatacccattcaggtgtaaagcctaaccatacgattggtaaatagaatagaaaaacacccgatatcaccggaaaccaagtcaatctaatagatgctaaaacaatcattctttgggcggaatgatgaaccgcgtgagaggcccacagtaaatttacagaatgactagccctatgcatcacataataggcaaaatcacatagtacaaatagaagtactcccatataccaatgattcatatctactgttaatgtaaataatcgatagtgatatacggtgtaagcaaaaaatccaaagatgattccatgaactgcagcgccagcaagcaagtgacctaacatcagcgccaaactaacacgagcctcttcccaagggtatgcctttttttgagttcgataagcaatgacttcaatgagcattgcgaaaatgatcaatgcaaaagccgccctgcctgctgcataaccttcttgaaaaattaacttataccaatgctctgtacttaaaaaccattccatcctatacaccctttaagaaagcaagttcatttcgcaagcaatttttcaatattgcttgcgaacaaaaaaaattattttctagagatttcgtgacagtctgcaacagggcctgcattcttattggcaggatcgatagtggtagttgtaaagcagagggcaatcttattaggatcaaccatcttaaatgacgttgttccttgcttagtcgcaattgcaccgcttgagagatctccagacaaagagccaacaaatgtaatgctgttgcctttaatggtagcagcacctgaaaaagttcgaccctcttgcttatcaactttatagctaattttttcttttagaaagcgaatttggcctggactaccgcccggataaatacgaccctcaccaatcgtggcgtcattggtttcaccattccaagtgccaactaaattaggggtctgctgtgcaaatgcactcattgaaaagcctaaggcgagtaagagggttgcggtttttttcattttgaatttagtttcattcacttacagattaaaaacaaaggacagataatttcagatgcaaatcatcagtagttttctgctatcaaaaatctctatccagcgagctaaaaatgacttttcagattagaaaaactcactaatgacaagattatgcatgagcgggttattttgtgatacccgtcgatcggagggggcttcagaacaatgaagcgtcagtcggtaatggcgagctcaagggcctagaaattagtggacagcgcaatcaactctaccagagagcgtaatcgcaatttatacataacctcggatttgtattcttttacagttgatagtgagatacccaaagcttctattggcgttgatagctattgaacaaattatcttgcaagacataagctgctcccttggccaccaaatttaaatcttcagccagtaacctggttcgataagaccagccttttggcaattggagttgtttctctagcattggcaaatccgccattgatagcttggggttcacaatttgtgcatacgattgcatgacatactgctcaccagagggtgatatgagctcatagactggtgagccagctttgtatatccaggttgtattgcgatgaacaatagtggcttgataagtagggtttccccataataattgcaattgcttaaatagcccaacttcaatagtggcacgcaagttcatctcaataccgccaaaacttgctcgctcgtgattaactgtatttccagtggcttgtacgccatcgatcatccaatatcgtggtccattgaggcggacaaatgacgccttgtacgcatccgaaatcgtttggttcgtgattaacttccatgcatcctctggacagtcattgagcccttgagtactaaataccttgactactaaagtcaaaaaagagcgatcaccataaaggacctcacaatagcgcttattacgaagattgctaacgctaaccacattactaatgaacttctcttcgacagtacttgaagtagctgcatacacagataagctagcaaaaaacgctagggcagtgagaaataaatacattttatgggtcattgggccgccctgtcaccagactaatgagggccatcttgtaagacccccgcgtaagtcagcggagcctatgcaagagtgaaactgaatgcaatatcggggcgcaatcagatccaagctatttacagctccaaataagaaactccttctccggactctcgggagtgaccaaaatcatatattggccaggagcagattgggtaactaaaacaccgtaaacttttaagttacttttagaggcaatccgatcagccacaccccaaacattagtaagatcatcaacataggcgtgggagtattgactaaattttgctgcagcattttcatccaatctggccaaatgaatatgtaattgattttgactgcggtaggttttaggattcgcagcgagggcaatagaaccagttttaatttggtctttggcggccttccaggcaaaaacccatatttcttctcgtcgcttaggatcttcaacgccagtgattggaactcttggcatagccagcccatgtataaagcctttcgggcatccacacatcttagcttccctaatcgccacaaactgtgaattctcagaccaaacatctatggttttgttacatacatttgcaccatcacaatatgcatccattcgaggagatacacaatcaccgcaataatttttcacctttgaatcaacgcatttggtggcaacgtttaataagacatcgcttgaagccatatcaatcgcgttacttttaccaatcaatacaaatataaaaattgagagaatagcaaaaagtttaagtcccttaataatattcattggcttctcttgtacggaatctagattttaaaaagatgataattacggagatcgaaaattgactgatctcaattcaaaaaccagtatttcaatgaagtgtattactgccaaatccgtcagcatggacaagtcattgaactaatttttgaaatctgagaagctcacgattaaaaatatcaaagtccataagcaaatttggaaactcgagacagaaaatgatatacatgagaaataataaaagcgacagatatagggttgttagcaaccaatcctcatgtttcttcactgccattgaatatccgcataacatcgaactgactactagttgagcgtataggaatctttctaagagaaatgaagggtgattctttgcacgtaattggtgttgaaaaaaagcatccattaattgctgcaatcgacccccgaggatcaacttagccggctcaaggttgtttgctggcgccctcgtaatactttgaattatgaactcatgaaatttttcaagttgctgctcctcataatcgatatgacgatcaaggtcatcaaccgtatgtacatctttataaacatcgaggcgagcagtgacaatgtcattaagatatttttttgcagtaatttggtcatccgcattgaggtacttagtcgcgtcatacatacgattcagactgagagcctcacttctaatgctttcagtacgatcgttaaagtgattaattgatgtaataaacgtaaaccctagtattagggcagttaaactgtaaatggctttttctaatgcatct

SEQ ID NO: 1838 - DNA, 23060 bp, synthetic construct
  source 1..23060: mol_type = other DNA
  misc_feature 1..23060: note = Synthetic
ttaggtatttatcccgtgctgagatacttgttgagtggccattgtaagagattacctgttaaatgtgtgtttttttattatgaaggagatatttgggggtgtttgaggatttgggtgttgaaggtattgcttgtattcatatggatagttgttttttatgtatttctgttgcttcctggggatgatataaatggcattatgcaagttctaattttggcttttatttgggggatatacttatcggtgatattgagtcaacgtcatcgactttcaagtcaggaagagagattttgtctttatgctgtggttagttgtatattgattggagtcgtgatgtggctctctggaaactctttgagttacggactttatcgtatgatagattttattcaaacagaaagtaatgcacgtacttatcagattagtcatgaattttttaatacacaacaaaaagaggacttggctgcgcgtttatacatgcaagagcaatacgccaaattacatatggcgaaatttgtaaatcatccaaaggtacgagtttttcaatctataactcttcaccttgctacgaaagcatctgaagtgacaggttttggtcaatgtagagatatagcaagaaaactagtcaagagtcagggagttaatgtaccagagtcaagagatgaagctattgctcatattaagaaacaattggaagcgccatttgaagcctatttagggtggaatttgggtgacaaggtggtattgtgtgcatcggaaaagctatggttaaattgtcgctctatgaatagtagctcagcaataaggacaaatcttgcgtcaggtttattgattgatcgtaagtttttgaagattttaccggaagtgccttatgtaacgagatagagaacgcgccataaaaacaaacaagggctatccctaatttactttaaaccttgactaaaccataatactgcctttattcatcaggtttttaagatgtcgaatatattgaccgtcaatgatttaagtgtggcattttcgggtaaagaggttgtgcggcatctgtcattccatgtgcccaaaggcaaaaccttggccattgtgggtgagtcagggtctggtaagtcggttacttcttcggcgattatgcagcttttgccatggttaggtggcaaaatcacctcagggtctattcagtttgagagtcaatctggagcgatagatattgcgacagtgacgccagagcagatgcgccatatacgaggtaaggaaatcgccatgattttccaagaacccatgacttcattagatcctgtattcactgtagggcatcagattaaggaagtccttgctttacatcgcggtttaaaaggtagtgctgcggataaggaagttattcgcctactggattttgtgagattgcctaatgcggcacaactggccaaacgctatcctcatcagctatctggtggtatgcgtcagcgcattatgattgcgatggcggttgcatgtcatcctaccttactaattgccgatgagccgacaactgcattagatgtgacgattcaagcacaggtcttacaaattctacgcgatatgcaacaagagctcggtatgtcgatgatttttattagtcatgacatgggcgtgattgcggagatggcagatgatttgctcgtgatgaaacgaggtgatcagattgaatacggtaaggcacgagatattattcttaatccgcaagcagaatatactcagcagttattggctgctgtgcctcaaattgggtctatgcaaggcattgatttgcccttaaagtttgaaattcctggtgaatcacgtgttgagtcgcctgatttatcggtgctttctaaggagcctttagtcattttggataaggtatcaacacattaccctattcgtagtggtttctgggggagagtaacccacaaggtgtatgcggctgagaatgtctctttggagatttatccgggagagacgctcgcgttagttggggagtcgggatctggcaagtcaacgattggacgcacattgcagcaattagtgaaaccttcgggtggtttgattcaattcaaagggcaagatgtttttggtattcatcaagagcgctttaagaaagaaattcaatatgtgttccaagacccttatggatcgcttaatccacgcaagactatcagagaaagtcttttagaacctatgcgtgtacatggtcttgttaaaaaccctcagcagcaagtggcgagtttattggaaagtgtacatttgcccgcagagtttgcagaccgttatccccatgagttctctggtggtcagcgtcagcggatttgtattgctcgtgctttagcgacggagccttctttaatcattgccgatgaggcggtctcggcattagatgtgtctgtacaagcacaagtcattaatttattgatggatttacaggcagagcgaggattggcctatctctttattagtcatgatatggctgtcgtggagcgcattagtcatcgtgtagcggtgatgtacctcggtcaaattgttgagttaggctctcgccgtcagatttttgaaaatccacaacatccgtatactaagcgcttattatctgctgttcctgtgatgaacccagataaagaacctgtgcgcgtggagtttacaggggatattccaagtcctattcgttctattcatcatccaccgatacatcatcaatatcaagaggtagaggcggggcattttgtcgcgttaacgcaataatttttggagagagttatgtttaaaaaggtcgtattgagtacggttttatcgagtgtttttatgggagctgcctatgcggctgctcatgaattgacagtggcacaacgtcaagacccaggtagctgggatcctattgatactttcttggtggcatggtcatcagcgggtaatagtctttatgatgccttagtattgcgtgatgaacaattaaagctacaaccagggttagcagagaaatgggaagaattagatgatggtttacgcttgcgattttatctgcgtaaaggcgtgaacttccacaatggtgagccatttaatgcagaggcagtgaaatacacgattgaacgtttgttgggtgaggagggtaaaaaaggtccgcagcgctctaactatacagcgattgaatcggtgaaaatcattgatgaacacacggtggattttgttttgaataaaccagatcctgtgttgttaactaaacttgctggttatggtgcgatgattgtgccgccaaagtatatcgctgagaaaggtgatgccttctttaatgaaaaccctgtgggtacgggaccgtttaaatttgtttcgtataagcaaggtgatcgtttggtgcttgagcccaataacgattattggggtggtaaaccaaaattacaaaaactgacttatcgttttattaaagaagatgcgacgagtttagcggagttacaagcgggtcgtatcgatgtttggcatgatgttgctatttcggcggtacctattattgagaaatctaaggataataaagtcattgctgaaacaggtccaacgattatgtcattgcaatttaacttagaaaatggcattactaaggatgtgcgtgtgcgtaaggcattgaatatggcggtagataagaaaatgctgattgatgctttcttagcgggttatgcagagccaattgctacgttacaaagcaagctttctttcggttatgacgaaaacttaaaagattatccttttgatccagaacaagctaaaaagttattggctgaagcgggtgttaagccgggtacgaagatgacgattgactatcgtgcttcgcaatcgacatttggagaggtagctcaagcattgacggcattctttggtaatgtgggtcttgatgtgagtgtgaaacctattgaggatgcggtatttttaaatgagaatgtccctcaaggtaagaccaatgaggctttccagtttggttggggtggttggacatttgactttgataatacggcttacttagtatatcactctggtcaaaaatggaacccctacttgaagtcagataaaatggacgctttgcttgagaaacaacgtgtggcgaccaataaagaggatcgcttaaagcagctccaagaagtggctcgtttagcacaagaagaagcttatcacttaccactctacaatacgaaaaccttatatggcgtgagtaataaagtgaagaatttcttacctgcaccagattttcgtgtgcgctatttccaaactgatgttgagtaatcgttgtgccaattgtttcttatttagctaagcgaagtatacaagcgctctttgtgattattgtcgtatccttattggtagcatttgctatccgtatgacaggtgacccagcgatgactttattgagtcagagtgcggccgtcagtcaggaggatattcaaaatattcacaatgctttaggtctaaacaaatctttttgggctcagtataccgactttatggtgggcttgctaagtggtgatatgggcaatagcttctttcgaggagctattgctcccttgattcaacaagccttgagttcgacagtcttgttagcttttttgtcactgggcatttctttactgatttccattcctttagggatctatgctgcatgtcgcccaggttcgtttggggatcagttaattcgtgtattgacgttgacaggtctatctttccctaatttctggttaggcattatgttgatgttattctttgctgtctatctgggatggttaccaccatcaggatttgatagttggttgggattgatattgcccgctgtgacaatgggcttgattttgacagcgagtaatgtacggctagtacgtacggcgatgttagaaacgttggctaaacagcatattatggtggcacgagccaaggggctaagtgagtggtctgttgtctataaacatgctttacgaaatagctctattacgattattacgtatttaggcttgcagttcggtgccttgttggggggcatggtggttgtagagatggtgtttaattggccgggtatgggaaccttagcgattgaggcgattgctcagcgagattatcctgtattacaaacgagtattaccttgttggcgattatgattgtgcttgttaatttactggtggatattgcctatgtcttactcgaccctcgtatccgtttggggtaagcgatgaaaaagtcatcatttaaacactttgagtttattctgggtggtagcttgttattgttgatgggtgggttggtgctattggcgccggtgtttttccctgacggtggcaagaccatgaatttcttggcacgtcttacgcctccatttagtgagaatttctggctaggtacggatccaatgggacgtgatgttttggcacgggtcgctactggcggtaaggtatcgtttattgttggaatcttttctgcattaggtgctgtggtattaggcacgatagtggggctattagcaggctattaccgtggtttatgggatacgctgtttatgcggtttgcggatattcaattggcattgccatttatcttattagcgattaccgtgatagccattgtaggtcctggcttagataagattattttgctaatgattgtggcgcagtgggtgcagtatgcgcgccttgttcgtggttcggtgttgtcgttacgagaggcagagtatgtgctagccgctaagagctatggcttgtccaattttaaaattatgtttaagcatattttacctaatgccttaggtcctttgattattttgatgacgctcaatgtcgctaataatattttattagaaagtagtttgacctttttaggcttgggtattgatcctttgacaccgagctggggaggaatgttggctgatggacgtaattacatccagacagccccttgggtcactgtttttccgggtattgcgattatgttaactgttttaggtttaaacttaattggtgactggttgcgagatcgtttagaccctttagggcgtttaggaaaagcatagaatgcagaaaatatatcaacaggaaataccagagggtagtgctatagtctggctgtttgcctctaagcgtttgcgtgagcagattgcgagggtagcgcgacaagcaaaaggtgagagcgcagagatacaagtaaaaagtgcttataaaacgctcttatgtgaagtgcgtgagcgtggcttgttggatagtgaaaaacaagtcactatctattatcctgtggtagatggtgacgagccattgcgctttcgattggagtgctatcccttagatagtttgtatcctgattgtgatattcagtatcaagcagagccaaaaatggtaggcaatggcgtttattatcgtctcgtttttgctgatggtagggaagaaaagatttttacgccagttaaatggcgagataaagcgaatgggcagcgcgaattatgtgctagcgcttgggtagcatatagtgatgggcattcggaagccatccatagtccgtatgaagacatatacaatgaggcatgtaattatcttcaaaatttgccattgacggtttgtcagcaaggtttgggcagtgtcgtctttgatattgaattgcagggtgaggatgagcctttaggcgttggacatgagagcttatgtttagcagaggctttacatgaggatttgtattttagtgctttagaaatttttcaacatcgtttaggtttatcatcaggagaccgtacgctcaaaccgggtcaaattttgcctgtggtgcgttatggtcaacaaaatagtttacgtattcgagaagagcaatgggctgaggtagaggctatctctgcctgtgagataagattggatttatcgaatatagatagaccattaagttttgcacaaattcaagctgaatttaacgccttaaatggcgagtgttttaatgccaatagtcaacaaggaagacccttgtttggggctggttttaatacgcatttggcgcgaggattggcattgtcatcaggacaacatgcgaatgaatcgagtggtgtcgtaggaggtcttagagcggcacagcaattattaaaagaaggtgttttggcgtttacttatcgacctttaggtaatccagatggctatgctgcatttttaaaactatgtgagatttctcctcgtcaaatgcatcatgcagcacgttatacagctagtggttgtgatttggcttatggtgatgtgccagagaggacgtttgcagatgaggcgagaaacaaacttccccaagcattggtacatcttaacctacatggatatcctgctcatgagtggacgcgaccattgtctggttatgtccctagaaatttttcgcgttggaccataccaaagggtttttttctgattatgcgttatcagccagcgtataaggcgatggctgaagaggtactacaagcagcgattgaagcggtgatgggttatccagaacaagttgcgatgaataaagaaatgctatctcgctacttaggtactgtgggtggtgcagattttcctattgcccatgatgttgttccgtatagtatcactgagtatcctaatcaagattatccgattgagctgattacagaagcgcccgatgagacagtacaaggggattggtttaggattgcgcaggagtcgcattatcgtgtggtgatggaggtagcgaagtggttggagaggttgagttaatcattttaaatacatttaaaaatcaatgccgtaatttttttacggcatttttgtttgtgttatgatgtcaattaacttattcatctaactggaagacattgctgtgttaaagaaaatacaagttaccaatttcaagtcgtttaaggatacttttgtatttaatttaggagaggtgcatcagtatacatttaatcaagaatgcattaaaaacggtattgttaataagggcattatatatggtatgaatggctctggtaagtctaatattggattggctatctttgatttaattggacatacgacgaataagtatgacggtagagagttatttctacgacattatgtttacgcaggattaccagataaggaggtttcttttgaatatacttttgagtttaatggaagttcgttaatttattcttattccaagaaagattacgatactttaattaaagagagtctttctattgatgaattagagtgtttatccataaatcgtaaccacagtaatgtggcagtgataaatttgccaggagcagaaaccctaaataagagaatagataattcagccctctctattatttcctatattaggtctaatgctaatttagataagagaaaaaaaattaataaaattttttacgagtggttagattttttagatggaatgctttttttccgtactttgaaagaaaatatatttattggacattcatcactaccaaacgatagtattcctttgcgtattattaaaaataaaaaagttaaagattttgagatgtttttgaatgcagttggtattgagtgtgtattgacacatgatgaaaaaaacatcttttgggatatagatggttatcatgttcctttctatgaaattgcatcaagcggtacagaagcattggctactttttattattggtttcttttcctaagtaataattcggtatcatttttatttattgatgaattcgatgctttttttcaccatgatttaacgtatgcaattgtggcgatgttgaagaaaaaggaaaatctacaagtcttattaaccacgcattctacatcaattatgactaatgatttactgcgaccagattgctactttgtcattgataaacaacacatatcgtcattgccagatttaacttttaaagagttaaggcaagcacataacttggaaaaaatgtatagaggagaggcttttcggggtgatacatgagagaacgagtacttgtgatttttgaaggagaaaagagggagtcagaaatttggaaatcttttagtcaaaattcattttttcctttttctgaatcgagtcaagtagtatttggtagtgatatttatcaattatggagtcaattaagtaaagataaagatattgatttaattggtttgttacaggaaagagggattctgagcaaagagttacggagagaaagtttttcttcggtttatctgttttttgattatgacccacattcacagatgttaataaatcaagagggtgaacgaataattaatcgagatttagttgaaaatctcttactagaaatgcttcgtttttttaataatgagacagaaaatggcaagctttttattagttatccgatggttgaggctttacgcccatgtgtttgttataacagtaaaaatgattttttaaaatgttctgttacctatgataaggtaaataagtacaagcaacaaagtgattctcatgcacaagataaaaagtttacctactctaagatttctaatgagcagtggagtttgattgtacagaaacactgtgtgaaaattaattatttattgcgacaagaggagacttttcctcttgaaaaaatttctcaagaggaggtatttagttgttacaagagttcgaatgaaatttattcattatccgcttttccattgttgctgttagattattatggagcaacaaccttattgaaactgctgaaggtaaacgatttataatttatacctatatcatggcgctcatttcttaatctattaaatcgccttcaaagtttcttaattgaaaagggtcgcctatagcgacccttggatttggtgcgtttaaacgcttgttagcgctcaaagctcatttcttaatctgttaaatgagccttcattctatcaataaaaaataaatctgtaaatatattagatagagaggttagaacataacggacttgtcgttggtggttatactatttttgtttacaaaggcttagggtagaataacttaaaaacattgaggagagcaatgatgaaatatcgtctagggctagatttgggtagtacgtctattggttgggctgtattacggttaaatgaaatcgaggtggggaaatatgagcccgctgcgattattcgtacgggggtacgaattttttctgacggtcgtaatccaaaggatggtagttcattggctgttactcgtcgtgttgctcgtgcggcacgacgtcgccgagaccggttgttacgacgtaaagaaagtatgttgcgtcaattagtcgcattgggtttttttcctgctgatgaggaggcacgtcaacgattggttgatttaaatccctatcatttacgagccaaagggcttgatgaagcactgacacctaatgagtttgggcgagcgttatttcatattaatcagcgtcgaggctttaagagtaatcgcaaaacagataagtcagatgcagatggcagtgtgatgaaaaaagccattgctgatttaaaggctaaactggatgagttaggtgtacgtacagtgggtgaatatctataccaacgtatgcaaaaggggcaaccaactagagctcgattacgacaattcactgttcagcaagataatggtcgaaataagattgaaaagtcgtatgatctttatatcgatcgtggtatggtcgaatatgagtttgagcaattatggtctgtgcaagaaaagtttaaccctgagctttataatgctacagctaaagagtgtctcaagcatatcttgttgtatcaacgacctttaaagcctgtagatcctggacgttgtagctttttaccacagcagaagcgtgctgctaaggcgctacctatcgcacagcatgcgagaatctatcagttcgctaatcatttgcgttatctagatgcgaataatcaagaagtgcccttaactttatcacaacggaatattgttgcgagtgagttattaaagtcctccaaaagaacttttgaccaattgcgtaaagcgctggatttctctgggacggctaagtttaacattgaggatgctaagactaaagatgtccaaggggatagaactgcgggtattttgagcgggaaaaagtactttggcaatcaatggtttaaatttgatgcagaattgcaaaatcagattgttgaaaagttgctttatgaagaaaatgaagcagaactgatagattggttagtcgctcatacaggggtaacatcagaggacgcagaggtaatatcagccgcgcctttacctgatggttatggtagtttatcggtgatggcgttacaaagaattctacctgagctgaaaaaggacgttattagctatgataaagctgtggtgaatgctggctttgaaagtcatagtgctttggcaacttatcatgacggtgaaatttatcctgagcttccttattacggaacagtattagcacgccatattggctttggtacgaataatccagacgatacggatgaacagcgttacggacgaattaataaccccactgtgcatattggtttgaatcaattacggcaggtggtgaatggtttaattaaggaatatggtcatcctacgcaaattgttattgaacttgcgcgagatttaaaattgggtgtggatgagcgcaatcgtattaagaaagagcaagcagaaaatcagaaaaataatgaacgtcgtcgccaagaaattgcggcgattataggtaaaacagctgagcaagtgactcgcttagatttacaaaaaatgattttgtgggaagagttagcagagtctcctcaggaccgttgttgtccatatactggacggcatatcagtgcaacaatgcttttttcggcagaagttgagattgagcatatcttgccgttctctcgtaccttagatgatagtctaaataataaaaccgtggcaatggcatgggcgaatagagcgaaaggtaatgccaccccatttgaggcttttgctggtcaacagattgaaggtattcattatgcggacatccttaatcgtacgggtagaatgaaaaaggaaaaacgttaccgttttgctgagggtgcttatgaaaaatggttgcgtgaggataaggatttcctagcacgagcactgaatgatacacgttattttagtcgtattgccaaagagtatattagtgtgatttgtccgaaacatacttgggcaataccaggacaattaacggcattactacgtacgcaattggggttgaatgcgattttagatgaaatagaagaaaagaaaaatcgtcatgaccatagacatcatgctgtcgatgcttgcgtaatcgcaatgacggatcgaggtatgttgcaacgctttgcgacagagaatgccagaacgcaaggtaagcaatatagtcgtcttattcaacgtatcgagccaccatggccgactttccgtgagcaggtgcgacgagctgtgagtgctatttgggtgagttataagccagaccatagtcatgagggtgcgatgcataatgatacggcgtatggtttattgggtgatgggaaaatgcatcatcataaggtagttgatggacgtagaactgaggtcatcgaagcgttaaatgttattccgatgacttgcgagaaagcgaataaacgtcatggaatgaatgctgatggttctcctaaggcttataaggggtataaaggcgatagtaattattgcatggaaattttccttaatgaaaaaggaaaatggcagtccgatgttattagtacatacgatgcttatcaaatagtgcggaaacaaggattggagcaattgcgtcataaaacattagcgcaaaatggtaaaccattagtgatgcgtttgatgcggaatgatttaattaagatggagcatagtgatttgcttggtttatatagagtgtgtgccttgtctacgaatggagtaatcacgttagcacctcataatgaatctaatgtggatgctagaaatagagataaggatgatccattctcatatacgtttaaaacagcaggttcgttgcaaaaggctaaagctcgcttgactactgtatcggcaacggggcgtttaaaagatcctggttttaaggagtaaatgatgttagggcgaattgtcgaaatagctgacaacaatcgccatctgtctgtttatcgtggttttttagttgttaaagcgactgatggcgataaaaaagaattagggcggattccttgtgatgatatctgtgcgcttatagtgaatgcgtatggcgtctcatataccaataatgtattaattatgttggcagagaaaggagctccctttgtattgtgtgctaataatcataatgctattggtatgctttggccgattggcggtaattttgaagtgtctaaacgcattgatgcacagattaatgcaaaattaccattgaaaaaacggctatgggcagaattaatcaaaaataagattgcacaacaggcaaatgttttgcgtgctattgaggtgccagataagccgctaagtgccttggtgagtaaggtgcgtagtggtgatccagataatgtagaggcacaagcggctagacgatattggacattattgtttggtaaagattttcggcgtgacagacgaggggaaggtgctaatgctttactaaactatggctataccattttaagagcaacagtagctagagcggtgattgcggctggcttgcatcctagtataggaatccatcatagcaatgcctctaatccaatgcgattggtggatgatcttattgagccttttcgaccttatgtagactatcaggtgtatcagcttttgcaagagggtgtaaatgatgttaatcctgacagtaagcgacaattagcacgattaatgtatgaagatttggttaccgaggcagggatggtaccgataacggtttgtgctcagaagttagcagtttcattggcacaagtgtatttgggagagagggaaaaactagaattgccacttattggcgcgcctattattttaggggcgattatgtaggagagatgtatgttatcggggtatagagcaatgtggttacttgtcatgttcgatttgcccgttacgcagaaggctgagcgtaaagaggcagcagagtttcggaattatttattagacttgggatttgagatggcacagttcagtgtatatatgcgattttttacgagtgctaaacaaattgaaacgtgttgccaacgtatctgtgcagctttgccaaaaggtggtaaagtgaacataatgcagtttactgataagcaatacgagaagattatttcattctatggacaggttagacagccagaaaaaagttcaccagatcaatttgagttattttaatgagtgatttttataaactgataccccataatatcttttcaaatcaaagtgttatggggtatcgagtttagcagattaagaaatgaactctaagcggaacaatgccgacagaaagctaaaactaagcgatagtttagcagattaagaaatgaactctaagcggaacactccatagtgactaatgttgcagaggcagagtttagcagattaagaaatgaactctaagcggaacagtaatcgtgcgtggaaattcgagcactcagtttagcagattaagaaatgaactctaagcggaaccgttaatgtaagtcaattctattttcatttagtttagcagattaagaaatgaactctaagcggaacttaatttcttttcaaaagcaagatggcgatagtttagcagattaagaaatgaactctaagcggaactagatgatgccactgtattaaatatgctaaagtttagcagattaagaaatgaactctaagcggaacgaagttgaggcgattaatccaatctacataagtttagcagattaagaaatgaactctaagcggaacatgtctttaataattgtgtgtgcttgtacgagtttagcagattaagaaatgaactctaagcggaacaacttaacattatgatgtttaaacaggcttagtttagcagattaagaaatgaactctaagcggaacatatttttaattatactgccaatattaaaagtttagcagattaagaaatgaactctaagcggaactatgggatgcagttatgggcattacttaaaagtttagcagattaagaaatgaactctaagcggaatggcaatgcgattacagtatcaaccatcagagtttagcagattaagaaatgaactctaagcggaacagaatataacgatacgcgacaactcaatacagtttagcagattaagaaatgaactctaagcggaacaaaacacgagcaatcagctgtacacgcattagtttagcagattaagaaatgaactctaaaacaaacaacagagaggtatccaaaatttccatatctgcttagaggattatttgtatcagtatttttaatcatataattgatatatacggcaaattgccgtataatttatcgtgtataggagattttgtatggaaaaaatagcaacggctcgtcttgaagcaagactacagcaggatatttataacatcattaagcaagctgcaaaaatgactggtaaatcggttactgagtttgtggttaattctgcttattctgaggcaacaaaagccattaaagagcattctttgattgagttggctattagtgatcagcataagttgattaatgcattagcacaagattatgagcctaatgaggcaatgaaacgagctgccaaacgccatcaagccattttgcaggaaaaataaatgacatattcgttcgttgaattgtcttcttcagtgaataaaaaggattttgccagtcgttttgatgctttaaatgagtatttaagaaaatttgccgctcaagaccaaaaacgtaatctagcgaagtgttacgttttactttctgataatgctgacgtggtggggtactacacaatttcagcgagttcgattcctctaacaagttttcctgaaaacgttcagaggcgagcagcttacgaggtactgccagtagcattgataggtcgtttggctatcgataaacagtttgagggtaagggttttgggtcagtgttgatttatgatgctattgagcgagtcaaaaatagtgcattagcggtatcagcggtgattgttgtagctaaagatgatagtgctagccgtttttacagacacctaggttttattccctttgatgagtctgttaatggaaaagaagcgttattttatcctttatctaaaatttttaactctaattaggattggcaatatgcaaaaacccgttaagcttgcgcctaacgggtttaaattctggtggcctggggcggaatcgaaccgccgacacaaggattttcaatcctctgctctaccgactgagctacctggccttgagaaaataatattaacctaaaaataaaaaagataaaaggaaaatttataaaaaatcatcaaacttagtttttcactattgaaatcattagtttttttatttttgatgttgtttttttaatacaaatatgcgtctttcaaggagtataatagagcacattcacattaatggattgtgtgcagaggatatgaggtgcgtgtagcgacagatagcattttaccaatctcttttgcataaatatttatttcagtttagttttcccgttatggcagacgttttcacatttggcttaaatcatcactcggcaccggtatcggtgcgtgagcgggtgtctatggctggtgatttggtgcgtcctgcattagatgcgttacgctcgacatttggttcttctttaaaagaggcgacaattttatcgacatgtaatcgcacggagttatatcttgccgcacgtcctgagattgtggatcatattccaacatggatggctgattttaactctttagatgcgagtcttattcgtcctcatctgtatttatacaatcaagagcaagcggtacgtcatgcgtttcgtgttgcctctggtctagactcaatggtgttgggtgaggcgcagattcttggacagatgaagacggcggtgcgtacagctgatgaggcaggtgcattgggcacgatgctgaatcaactcttccaaaagactttttctgtagcgaaagaggtgcgtacgcagactgcgataggagctcaatctgtttctatggcggcagcggctgttcgtctggctgagcgagtgtttggtgatattagcgatactaaggtgctatttgtcggggcaggagagatgattgagctatgtgcaactcactttgctgcacagaatcctaagtcgattatggtcgctaatcgtacattagagcgaggtgaggcattggcttcacgctttgatgggcagacaatgcgtcttgcagatttaccagaccatttgcatgagtatgatatcgtagtgtcctgtacggcatctactttaccgattttgggcttaggtatgattcaaaaggccattcgccagcgccgttttaaccctatggtgatggtggacttggcggtgcctcgtgatattgagccagaagtagcgaccttgagtgaggtctatctttatacggtggatgatttgggtcgtgtggtgcaaatgggcaatgatgctcgtcaggcagcggtagtgcaagcagaggccattatcgatagtcgtgtgcagaattttatgcattggttacaaaaccgtagtgttgtgccagttatccaaggacttaaccatggtgctcatgttgttgcaaagcttgagctagaaaaagcgcgtaagttattggctaaaggtattagtccagagcaagcgctagagcgtctggcaaaatcactaactcaaaaatatatgcatgcgcctatgcaagcattaaatcgtagtcaagcagaggaaaaggcacaactcttagatgtgctgcctaagttattcccttaccaagaaaaagacgatacaacgcctgcacaatcgtctatctcacaagcagaacattagctaataaatcgcttgttcatcatccttgagagggtgataaagatttatgttggcaatctattttttaaatttaaattattttttagttgagattttattatgaaagcatctatgcgttctcgcctagaacagttgagtcaacgtcttattgaagtggacgctattttagcggagcctgatacggtagaagatatggatcgtttccgtaaactctctcgtgagcgcagtgaaattgaccctgtggtggcattatttaagacttatacgagtacagagggagatttagctacagcgattgagatgatgtctgaccctgatatgaaagaaatgggtgaggaagaaatgaaggcggctaaggcgcgtattgaggagctagaggcgcaattacaggttgaattgctacctaaggacccagatgacggtcgtagtgtgttcctagagatccgtgcgggtacgggtggtgatgagagtgcgatttttactggagatttattccgtatgtacagtcgttatgcagagcaaaatggttggcgtgtcgaggtaatgagtgaaaacccatcagagttaggtggttatcgtgaggtgattgcgcgtattgaaggtgagggtgtttatggtcgtcttaagtacgaatcaggtgctcaccgtgttcaacgtgtgcctgaaaccgagtctcagggacgtgtgcatacttcagcatgtacagtagcggtattgccagaagccgatgagttggcagaggttgttttaaacccagcagatttgcgtattgatacgttccgtgcaagtggtgcaggtggtcagcatattaataagaccgactctgcggtgcgtattacgcatattccaacaggtattgtggcagagtgtcaagatgaccgttcgcaacataagaataaagcgcgtgcgatgagtgtattagcggcgcgtattaatgatattcaacggcaagagcaacaggccaaagaggccgcagagcgtaagagcttggtgggtacaggtgaccgctcggaacgtatccgtacatataactatccacaaggtcgtgtgactgatcatcgtattaatttgactttatacaaattagcgcaaattatggaaggttctttagatgagcttacaggtgcgttgattgcagagcgtcaagcggagttattggcggcattaggtgatgactaattctccctataccttaagagatttttttgcacagtcaggcttacctttattggaggcaaagatgctggtagagcaagcgctgggagtttctcgtgcgtggatgattacgcatgatcttgatgttttgagtgagcaccaatggcaagctttacaagctttgtgtaatcgacgtaccgctggtgagcctatggcgtatattatggggtcgagagagtttatgggattggattttacggtgagtccggcagtcttaattcctcgaccagatacagaaaccttggttgaagcggcgttagggttcctaaaagataaagtgacagcacgtgtattagatatgggtactgggagtggagctattgcattatccattgcgcactttgctccacaaactcaggtgtttgcgagtgatattagtcaggaagctttagcgattgcacaagttaatgcagaaaagttcaaactcgatgtggattttcgtcaaagtagttggtttgatcaattctgtggagagactttccatttgattgtttctaatcccccctatattcatcaaggcgatgagcatttgagtcaaggtgatttgcgttttgagccacgattagccttaacggacaacgcggatggtttaagttgttatcgcatcattattcagcaagcacctcgtcatttaacacagggaggtgctatttatcttgaacatggttggaatcaggctgaggcagtgcgagcgttattgatacaagctgggtttgctcaggtgtgtagcattcgtgatctggctggtattgaacgagtgagtgggggagtatggttagctgagtagtcgtacgattgctaaggttaaagcgcaaccgctctaaaaaattagtacaataagtttttagtccaaattttgtaaaaggttttatgatgagtgaagttcaagattttattcgccaaacagtaacagaccaccctgttgttttatttatgaagggttctgcacagttcccacaatgtggtttctctggtcgtgcggtacaaattctgcgtgagcttggtgttaagaaactggtaacagtaaatgtgctagaagatcaagaagtgcgtgaaggtattaagcaattttcaaactggccaaccattcctcagctctatgttaagggtgagtttattggtggtgcagatatcatgacagaaatggctggtaatggtgagctaaaaacggtactagaagaagcaggcgcgtttaatgactaaacgattagtgattggcataacaggggcaacaggctctatttatgccattcgtatgcttgagcgtattaaggagattcctgatgtggagtctcacttaatcgtatctccttcaggtttgttaaatattcattatgagttaggtatggatcgcaagtcggtcaatgccttggcagaccatgtacatggttttagggatgtcggtgcgacgctagcgagtggggcatttgatacggcaggtatgattgtgttgccatgttcaatgcgtactttggcagcttgtgcgcatggtttctctgataacttaattacgcgtgctgcagatgttcatcttaaagagcgtcgccgcttagtgttagctgtacgtgagacaccgtttaatctggcacatttgcgtaatatgacggcggtcacagaaatgggcggtattatttttcctccattacctgcattttatcatcaccccaagaatttggaggagatgattgaccatacagtagcacgtatgttggagttgtttggtattgattctggtggtccaaagtgggaagggacgtagcgcttttataaatcgtaagagctacactacgtactttcttaccttctttttccagtacattcaacttgtactagtttacgatcacttaagcgaatagcgcttaatttacctccccaaacacaacccgtatctagcgcgatgaggttttttctaatcattaatcctaatgttgaccaatgaccgaaaataatagtggttttttcggttttgcgattgggtaattcaaaccagggcataatatcgttgcttttattatcgaagggcgagtctttagatccaaactccatagagccatcttcaaagcacatacgcatacgcgttaaggcattgataatcacacgacggcgtttggagcctgtgagtgaatcacgccaacggttaggttcgttaccgtacatcttttgtaggtatttttgccaatgtttggattgcaatgcatcagaaacctctgcggcaagtttgagcgttttcttttcatcccattttgccatcacacctgcatgcaccatcagatgattttgatcaaagtgagcaagagggcggtggcgtagccaatggataatttcctctacatcaggtgcttgcagaatttcatcaatggtatctgatttattttcgcgacgaatacctgcgtagaccgctaagaggtgtaggtcatgattgcctaagacgcaaacagctcgttcgccaagttgcataatggtgcgtaatgttttgagcgaatgaggtccgcggttaatcaaatcaccagcaaaccaaaactgtgcgtgttcatcctctttaatctcaggatgattgagtaattcttgtagggcatcacagcaaccttgaacatcgccgatagcccagatagtcggggtctttttatttggcatgaataaaattacgaggtttactacggcgctccattaaataaagcgctccaaaagctaaaattaaggcaatgatattgggtagaagggcagttaaccaaggcgggaggttgttgagcattcccacattgagggccagttgattagccataaagaagataatgccaatcaaaatacccaagaaaattttggcccctacaccacctttacgactttgtacaaaaccaataggagccgcgagcgtaatcataacaagaagtgtaaatggatagcttcctttacgccagagcgcaacaatatgacggttagcttgcagattattttcttctaagtactggacataattgagtaaatcaggtgtgctcatcttatcgggttgcaactctgttgctaccaatcgctcactcgttagtgaggttttaaaactgattgttttttgagtttttaagcttgaaatactttcaagaggtgcttgctcattcgttagtacttgggcaagattggatgttaacgtgcgagtggtgacattatctaaacgaagttcaccatgctgtaaaatgcctttggcagcattcgttacgctagagagttgattatcttgcgtgttatattcgaaaatagtgatagtgtctatttcagtactagagttcaaacgacgaatattgataacacggtaatgagcgtcatcgactggctctctaaaccaataaccactatccatcttcgtgctattcttgcctagtgcagagattgtaaattcacttgttttcttttctgtataaggggtgacgacttccgaaacaaatgctgcaaaaatcataaaaggaatggtaatcagccataacatccataataggcgtttgctactaatgcctgatacgcgaaggataactaattcgtttctttgtgctagaccagccagggcaatgaccgtgccaatgagtacgcaaatgggtaataaatcatagagacggttagggatttgtaaggcttgtacgtagagtaatgatacaaaggtaaacttctcgttgagattatctagtgcatcaatcatatcaaagaagataaatagaccgagtagcaccaaaataaccgcaatggtggtgcgataaatttcactagcaaggtaacgtcgagcagttttcatcgtatgttttttatttaaaaggcaacttattataataacattgtgggcgcttatctttatgaaatccactttgtcacaaaagcttaacaattacggtatgtgttaaggtggactgacttgg

SEQ ID NO: 1839 - DNA, 23057 bp, synthetic construct
  source 1..23057: mol_type = other DNA
  misc_feature 1..23057: note = Synthetic
cgaggccattcccccggccctgctcaagctcgaccccggcaagcaccagctggtgctggatggcatcccctaccgggtggccgtggccgaccggggcgacgagcgctacgtcatgctgttcaacgaggtgcgccagcgccaccgggaggagcagttcctggtttacctcgccatcggcgccctggtggcggtcctggtctccgccgccatcggctggtggctggcggggcggatagtggcgccggtggccgagctttcccgccgggttgggcgggcgaggcccgaggacgaagcgtcggggatggaaaaaggctttgccgacgacgaaatcggccggctggcccgggtgttcggcggctacctcaagcggatgcgggctttcatcgaccgggagcgggccttcaccgccgatgtcagccacgagttgcggacgcctttgtccatcgtccagggggcggtggaattgctggaggacgacccgcgcctggacggcaagcagagggagcgcgtggcccgcatcggccgcgcctccggcgagatgatcgaactcaccgccgccctgctgctgatggcccgggaagaaagccccgacgagccggcggattcgaactgcgacgtgtgcgacgtggtccggcacgccatcgacgcccaccgccacctgctgagcgaaaaaaccgcagtggaactggattgccgcagccgcccccgcgtcgccgccgagcgcaccctgctgggcatcgtcgtcgccaacctgatccgcaacgccttcgcctacaccgaatccggcaaggtggccattgccgtggaggaccgctgcctgacggtagccgacaccgggccgggaatccgggaggaggaaatcggcaaggtgttccagcgccatttcaagggcagcggcagcaccggcgccggcatcggcctgtccctggtcaagcgcatctgcgaccgctacggctgggaaacggtgatcgacagcaccgagggccaaggcaccacggcgcagttgttcttcgccggcccggcctgaggggcggactcgccgccggtccctcatccccggcccttctcccggagggagaagggagaaaaccccctctccctccgggagagggttggggtgaggggcagtcgccagttgttgttctccagcgtggtcgtgcttcgagccctcggcgcgaacgggttctttcggcgcttccttgacgttcccttgacctatccttgacgcccccttgacgggcgccgtcgtagcataccaaggtaaccggtcagctgcgttgccgcccctcctccccggggcggcgctccggtttcaaccacctgcgagcgacgccatgagaatctcctccctctcgaccccctttgtggaaccctcttccaagcccggccacggcggcgattcgtccggcccggtcctgggcatcttccgtaaactggaccggatgctcaccgccatggcctgcgccgaagcgggcgacctggatgcggtgaaggacatcctgggccaggacacgaagcggaaaaaacgatgaacgcctgggtccaaaggctgcccctggccaagcttctcaccctgaatccggccaccttcaagcatgatctgatcgccggcgtcaccgtctccctggttgccattccccagtccctggcctacgcccagttggccggcgttcccgcctactatggcctgtacgcggccctgctgcccaccatcatcggcgccctgttcggctcctcccgccagctttccaccggcccggtggccatgacttcgctcctcaccgccgccagcgtggctcccctggccgcccacggcagcgagctgttctacgcctacgtgatcctgctggccctggtgtcggggctgttccaggtcctgttcggcgtgctgcgggtgggggtgctgctcaacttcctgtcccacccggtgctgatgggcttcatcaacgccgccgccctcatcatcggcctgtcccagttgcccaccttgctgggcataccggccagccagtcggagcatttcctgctcgacatctggcaggtgctggtccatgtcgacaccctgcacgaaatctccgtggccttcggcctgtcggccatcgtgctgctgatggggttcaaaaagctggcgcccaggatgccgggggtgctgatcaccgtggccctgctgacctgggtcagctatttcatcggctacgccggcctgggcggccgggtcgtcggcgcggtgccccagggcctgccctccctcagcgtcccgcccctggactggaaagccaccgtggcgctgttgcccgccggcttcgtcatcgccctcatcagcttcatggaggccatgtccagcgccaaggtgatcgccatcaagacccgtcagccgtgggacgagaacaaggaactgatcggccagggcctggcgaaaatcgccgccgccttcagccattccatgccggtcagcgggtccttctcccgctccgccctcaacctggcctccgacgcgaaaacccccctttcgtccatcgtctcggcggtgttcgtgctgctgaccctgctgttcttcaccggcttgctccatcatcttcccaagcccgtcctggcggccatcatcatgatggcggtgatcggcctgatcaatttccgcgccatcgtcaacgcctggcgtgccagcaaggacgacggcatcgcggccatggtcaccttcgccgccaccctgggcttcgcccccaacatccagaacggcatcctcaccggcatcatcctgtctctggccctgctgctctaccgcatgatgcagccccgggtggccgaactcggcctgttcgacgacggcaccctgcgggacgcccaccgccaccacctgccgcccctgcaccccaagctgggggccatccgcttcgacggggcgctacgcttcgtcaacgtgtcctacttcgaggacgcgctgctggcctacgagcgggaaaaccccgcggtgcgctacatcctggtgaaatgcaacggcatcaactatctggacgcctcgggggtggagaccttgtccaacctggtggtccgcttccggaacagcggcatcaccctgggttttagcgggcccaagaaacaggtacgggaagtgatggacgataccggcctgagccaaagcatcggccccgagaatattttcgccaccgaccaggaagctttcgaccaactgtaccggcggggcgtgatcgacgctgaaatcgggaagccgtaagacctcaaatccaatggagtgcaaatgaatacgcttccgggcaggttggtattggccggcggccggcgcagcgaagttttccgcaattagcacctgacttcctctcgatgcccaccgccgggtggaaacggcggtggtttttttgccctcgaaaccacgcgccatgatcgcagtacaagacgcatggaaggccgggctgttccggcgcgaacattggctgcccaacgtggtgtccggcgtcatcgtcggggtggtggccctgcccctggccttcgccatcgccctcaccaccctgctgccgcctttcgccctgaaatggctttgccgccgctacggcggagacggccctctcccggactagcccaccgccgaatcctttttgtgttgtttggcgacctcctgctccagctgcatgatggcgcccacgatgtccttggaggcggaggagaattcccgcccgctggccatcatctcttccgcccctggcttgtccccggcctcggtcttccgcaccacttccgccgcctggaggtggaattgggcgtgcttcttcaccaggtccttgtaaggggccgtttccgcgaattgcttcccttcgccgtaaatccattgccccaactcgcaggcatcgtccttggctaccatcgtgctgtcgagttttccgccccggccatcgaggaaattgcgcagatgtattttccacttgagatggctgacgatcgcctcatcgaaatccatggtgccccccattgttttggtaagtgacgtgtgcccgaatattgcagcgtgatttcagcttagcttaaacccagattatccattaggcggcgcttcgcgcctacgcgagcgctggcggccggtttgcggccatttttgccgcttgttcgtcgtccatggaataaccatggactcctcgcaagcaacgaaactgtctcgcaacccacctcgccatcatctcgcgtcctaatggataatctgggttaaaaatcgtttcggctatcgttgctcctttgagcgcggtgtctcccgcccttccgggatgatgccgaacacgtaccaccagccggtcaggggcgatttgcggaacaggaccgtgcgctgcttgtcccggaacaggtagcgggtggacccttcctcctgggcctgcatgcggccgatggcccggctcaggtccgggctgagcttggtcgggtcggtgaagatcaggtgggggtcccagtccaggccgatcaggggggcggcgtcgaaggagtagaaaatcatggtctggtccagatccatatccttctccaggcgggcgctgagctggtccaggtagaccgaggcgccgagcatccccgccacggatttgtccgggcccatcaccggcacggcgacgatggcgacgcttttgccggtggccctgctcaccaccaggtcgccgatcaccgtcttcccggccaatagcttggggaaataggcgcggcccgacaggttgccggcggcgcggccttcctgcacgctccagtagctcccgtcgggcagggcgaaccagttgagggcgggaacgttccgccgccccacctgggcgaggccggatttgatccgctcccagtttcccgattgggcttccggggtggccgccaattcccccaggtcgtcggccatcttctgcaggtggccgtcgctcagggaaaccagggaggcgagggctaccttgccgtccacggtgaaggcgggctccccccgggcgagcccggcgccgaggaaaagggtcagtacgataaggaacaggcggggaagcagcggtgtgttggccatgacttttctcctcggttagatgtccagcggccccacgtgggccaccagggtggggttttcccgccacagttccgggtcggcgtccacgtagagctccagttcgttgccgtccgggtccgccaggtagagggactgggacacccaatggtccgactggccggtgacggggattcctttcgccagcagttcctccttcaccgccttgagctcctccagggaatcgcccaccttgaaggccaggtgatagaggcccagcgcccggggcggcgggttgggggcgccggggcccagttccagcagggccaggtcgtggtggttggtgccgagggagaagaacaccatgtggtcccggtagcgggccacttcccgcattcccagcacgtcccggtagaagggcacggagcgttccaggtcgcggaccttgagggtggcgtggccgagggcgctgatgtgcataggcgatccctttagcgaatgagcaaaccttaatgagcaaacctaaggctagactgtgagcatggctttgaccagcctcaccgcgggaacgagaaagggagagacgatgacaacaggcccgagtttgatcgtgcgccccatggcggaggaagaagtggccttcgccgtggaccaggcggcccgggaaggatggaatccgggcctgttcgacggcggggtgttctaccgtgccgacccccggggatttcttttggccgaactggaaggccggccggtgggcgccatttcggcggtggcctaccccggcggattcggtttcatcggcttctatatcgtgctgccggagcaccgcgacaaaggctacggcctggccttgtggcaggccgccatggagcggctcaagggctgcaacgtgggcctggacggggtgctggaccagcaggagaactaccgcaaatccggctttcatttcgcctacagcaacatccgcttcgaaggggccgggggcgggacccggccctccgatccctccctggtggatctgggcatcgtgcccttcgagcaactgatggcctacgaccgccgcttcttccccgccgagcggcggctgttcctcgacggctggctcggcctgccccagtccaggggctgcgccgtggtgcgggacggcgtgctgtcgggctatggtgtggcgcggcgctgccgcaaaggcttcaaggtcggccccctgttcgccgacgaccgggtatccgccgaggaaatctaccgcgccctggccgccttcgccggccccggcgagccggtctacctggacgtgcccgaggccaacgccgaggccatggccatggcggcgcgctacggcatgcgccaggtgttcggcacggcgcggatgtataccgggccggcgccggacatccacctggccggggtgtacggggccaccagcttcgagctcggttgacagcccgtgggcgggtttttttcgtacaatgtcaattttaatctgaaactcgcgtagcgagccctcgtccccctcgcccgttccgccgtggttgccgctttgcggcgggcacccggcgagaacaccccttgtgggtgcgggtgagggtaggggtgagggaaatgggagtcggcatgaaaatcgcgttcatcggcggcggcaatatggccagcgccctcatcggcggactcgtcggcaagggcttcgcccctgccgacatccgcgtggtggaaatcacccccgaggcccgggagcggctgcagagccgcttcggcgtcgccgcctacggcgagatggcccccgcggtggagggggcggacgcggtggtgctggcggtgaagccccagcagctttacccggtggtgaaggagctggcgcccttgctttcgaaccagctggtggtgtccatcgccgccggggtgcgggcttcggacatctcccgctggctgggggattaccccaaggtggcgcgggccatgcccaacacgccgtccatggtgggggccggcatcagcggcctctacgccatgcccggcctgggggagggcgagcgcaagcaggccgaaaccatcctcgccgcggtgggcatgaccctgtggctccacgacgaatcccagatggacgccgtcaccgccgtctccggcagcggcccggcctacgtcttctactacctgcaagccctgcaggaagcggcccaggagctgggcttctccagcgcggaaggccgcaccctggccctggaaaccttcgtcggcgcctgcaagctggcggcggacagcggcgaggacttcgccctgctgcgggccaaggtgacctccaagggcggcaccaccgaggccgccatcctcagcaaggaggccgccggggtgcgcgccgccatcgtccagggggtgaaggcggcccgcgcccgctccgccgagctggcggaagaactcggcaaggcggagtaggcgatgctggcccaagccctgcaattcatcatcgaatcggtgttcaacctgttcgccctcgctctgctgctgcgcttcctgctgcaatgggtgcgggcctcctttcgcaaccccttcgcccagttcctggtggccctgaccaatttcctggtgctgcctttgcgccgcgtgatccccggcttggccgggctggacctggcctcacttttcgccgcctggctggtggagttcctgatgctgctggcggtcctggcggtgagcggtttccccttgctggtggcgggctggggcgtggtgccgggggtcatgctgtgggcggtggtgaagctggtttccctcagcgtttacgtcctgatgggggcggtgctgatccaggccctgctgtcctgggtcaacccctacacccccctggcgccgatgctcgacgccctggccgggccggtgctgcgcccggtgcgcaggctgcttccccccatcggcggcgtggacctctcgcccctggtggtgctgctggccctgcaactggtgctgatgctgccggtggcgtggctggagatgatggtgatggggctgttccgctgatgtggtatcgctttgacgacaagaagaagctcttgtccctcaccctctacatccagcccggcgccaagcgcaccgaagtggcggggctccacggcgaagcgctgaaaatccgcatcgccgcccccccggtggacggcgccgccaacgaagccctgctggatttcctcaagaaagccttcggcgtgccgggctccagcgtcaccctgaaacacggcgccagcgggcgcagcaaggtggtggaaatccagtcccccgcagtctctcccgaggccctgctgaaatgatgtcgaagaaaacggcttttgccgccaagacgccaagcacgccaggaaataaatctcttctctcctttgttttccttggcgttcttggcgtcttggcggctaaaaacaggtttttgaaatgatggactggaaccgcctgctctccccccgccgcctgggcaaggccgccccggacccgtccaccggcctgcgcaccgacttccagcgggatttcgaccgcatcgtctattcctccgccttccgccgcctccaggacaagacccaggtgttccccctggcccagagcgactacgtgcgcacccgcctgacccacagcctggaggcggccagcgtcggacgctccctggggatgctggtgggggaggcggtgatcgcccgccacggcctgaaagacctggcccccgccgacttgggcgccatcctgggggccgcctgcctggcccacgacatcggcaatccccccttcggccacctgggggaggcggcgatccaggaatggttccagaaaagccccgcgggctgggaggcggtggagcgggcgcccctggcccagcgccgggatttcctcgaattcgaaggcaacgcccagggtttccgcctcctcacccggctgcaaagccccgacaaccccggcggcatgcagctcacctgcgccaccctgggggccttcaccaagtatccccgcacctccggcgccgaactggcgggctaccagggggccagcgtcaagaagtacggcttctttgcctcggagttggaccattttgccgacgtggcggcggaaaccgggttgctcgcaagggccgacggcgcctgggcgcgccatcccctggccttcctgatggaggcggcggacgacatctgctacaccatcgtcgacctggaggacggcttccgcgtcggcctcctggcctacgacgaagtggccggccccctcaccgacgccctggggggcaaggaccaggtggcggtgcgcctggccggcatccgcaaccccaaggagcgcatcgaatacctccgcgcccgggccatcaacgaagtggtgcgccaggcggcggaatgcttcctggaccacgaagccggcctgctggacggcagcttcgaccagcccctggtggacctgatcgccgtcgccccggcggtgcgcggaatgaaaaagctgggccgggagcgggtctatgtcgctcctcaggtgctggagatcgaagccgccggcttccgcgtcctgggcggcctgctggaactgttcgtgggggcggtggaagaggtggcggagaaagggaagaagggcgccagcgtcagctcctcaaccctgctgcgcctgcttccccctcagttcctgggggagaacggcgagccggagaccgacccctacgcccgcctgatccagctcaccgatttcgtgtccgggatgaccgactcctacgcggtttccctgtacaagaagctcaccggcatttccctgccgggggggtgaatgccgccgctggtagtttgaaagattccacctctagccaggcgagtgtttgttgcatggctcggcagaaaatgaaagaggccgcatgtagcggcctcgcatttggtgcatctttcagcttgttagcggacagagctcatatcccgatatcgtagtaacatcaaggctacacgtatagtcccgtaaaatcaaacacaaggggggagtgtgctcaggaagatgcgttatcgcctggcgttggatgttggctcgacatccattggctggtgcctgattcgactgaatgccgacgatgagccgattgccattatccgaatgggggtgcgcatattttccgatgggcgcaatcccaaagatggctcgtcccttgccgtgacccgccgcaacgcccggcaaatgcgccgtcggcgggataggttgctgaaacgcaaggaacggatgttgtctgctttgacccgtctcggcttctttcctttggatgaggccaagcgccgcgaattagtgagtctcgatccctatgccttgcgtaaaaaaggtctgtatgaagcgttgagcggccccgagtttgcgcgggcgttgtttcatatcaatcaacgacgcggattcctaagtaatcgcaagacggacaggaaagacagcgaaagcggggcgcttaagaaggcaatcaaagggctgcggggaaagctggccgaggagggatgccgaacgctgggggaatggctggctcgccgccatgagcagcgcctgagtgtacgcgcgcgcctgcggggcaagacgcagaaagaaaaggcctacgatttctatgccgaccgggcaatgatcgagcatgaattcgacgcgctttgggaccggcaggaagcgctaaatcccgtccttttcaatcccgccgctcgtgatgaactcaaagacatcctgcttcatcagcgccgtctcagaccggttcgacccgggcgctgcacccttctgccggaagaggagcgcgcgccgctggcattgcccagcacccagcgtttccgtatctatcaggaggtcaacaatctgagggttctttcgccggcggatatgtgcgaaaagccgttgacgctggatcagagaaaccgtgtcgtcgaattgcttgagcggcagggcgaggtccgttttaccaggatacttaaagagttgaacctgtctggcgccaccaaattcaacctggaagacatcaagcgcgatcggctcaaaggaaactccacctccgctgttcttgccaaggagaattgctttggcgagcggtggtacggttttgatggggcagtgcaggacgaaatcgtggaccggttgctgaacgatgccagcaagtcggccttggtgaattggttgcaggaacggacgggcgtagacgaggcgtgtgccgaaaccatcgccaacgtgagcttgccggaagggtatggcaacttgagtcgcaaggcgctgtcccggattcttcccgaacttgccgcggatgtgacggtgtattccgatgcggttgtccgagcgggatttgacagccacagcgcgctgtcttccgcggagcaaacgggcgaaattttgggtgaattgccttactatggcattcccctacgccgccacgtcgcctttgccaaagaccatccgcgcaacgacgaggagcgttatgggaaaatcgccaacccgacggtgcatatcggcttgaacgaattgcgcaaggtggtaaacgccctcattcgacggtatggccatcccagcgaagtgattgtggaggtggcgcgagagctcaaactggggcgtgaacgaaagctggaaatccagcgcgaacagaaggaacggcaagacctcaacgacaaacaggtggccgaagcctgcgccgtgctcggttggaccccagccaaccttgaccgcgccaagcggcgcgaactttcgcagaaaatgcagttgtgggtggagctcaaccccaagaacgtggctgaccggcagtgtccctataccggcgaacaaatcggcattgagcggcttttgtcgagcgaggtggagattgagcacatccttccttattccgccactcttgacgacagcatgaacaacaagacggtttccctgcgccgcgccaatcgcgacaaaggaaaccggactccctatgaggccttcggcgtgcagccgatacccggctacgactaccaagccattcttctgcgtgcctcaaatatgcccagggagaaggccaagcgtttcgcaccggatggctatcagcgttggctgaaggaggacaaggatttcctcgcccgggcactcaacgataccgcctatctatcccgcattgccaaggaatacctctccctgatttgcccgcccaataaggtacgtgttatcccgggaagaatgacggcgctgttgcggggtaagtttgggttgaatcagctcctgtccggttccgaggtgaaaaaccgtgacgaccatcgtcaccacgcgctggatgcggcggtgatcggtgttacggaccaagggctgttgcagcgtttcgccaaagcgagcgcaagcgcgcgggagcggcagcttgatcggcttgtggaggaaatgcctctgccttggcctagctatcgggaacacgcggagcgggcattgggcggcatcgtcatcagccacaaaccggaccacgggtatcagggtgccatgcacgaagagacggcctggggcctatgcggcgacggcgtggcgagcaggcgcgtgcgcctggaggacgggggtccccgccagcgcgaattcaggaataagaacctggtcgagatcgacagtacccgtgatccaaaccgccacggcatggacgagcatggccggccacggcactacaagggctatgtgggcggcagcaactattgcattgaaatttggcggggtgagaaaggaaagtgggatggggacgtggtatccacattccaggcttaccaattaataagacaatggggggaaatcgagggagcgagacggcttcgcgacctaagcttcagccagtccggtaggcccttggtgatgcggctgatgatcgatgatttggtaagactgcaggtggatgggaaagaaaggacgatgcgcgtggccgtaataagcggcaatggccagatttttatgtgcgaccatcatgaggcgaacgtggacgcccggaatcgggataagcaaaatccctttgcgtacatctctaaattgccgggttctcttcagaaagcaaagggccggagggttaccgtgtccgaaattggcgaactgcgcgatccgggcttcaagggataattgaaatgatcggccgcatcgttgaagtggccgatgaccgacggcatctctttgcctcccgcggcttcatggtcgtgcaggatacggaaggcgagcgcaaggagttggggcaggttcccctggacgacatcgcagccgttatcgccaatgcccacggcctgagctacaccaacaacctgctggtggccctcgcggaacgcggcgcgcctttcgttctgtgcgcagccaaccacaacgctatcggcatgctgtggccgatagacgggaattaccagcaggccaaacggttcgatgcccaattggcggcgacccgtcccacgcacaaacggctgtgggctgaagtggtgcggagcaaactgcaacagcaggccgccgctttggaggcggcgggcgccaactccatacctctttccgccctggcggccaaggttcgttccggcgactccggcaacctcgaagcccaaggagcccggcgctactgggcgttgttgttcgggggcgacttcaggcgcgaccagaatggggacgggatcaacgccctgctcaattatggctacaccgtgctgcgtgccgccatggcacgagccatcgttgctgccgggcttcatcccaccctgggccttcaccatgccaatgaaagcaacgccatgcgcttggtggatgacctgatggagccgtttcgcccagtaatcgatttgcacgtatggcaattgggcagaaccggggaggcggcagttacacccgacaccaagcgaaccctcgtgcggtcactttatgacgacatgcaaaccacttccggcgcgactccggtcatggtgtgcatgcagcggttggcggtgtccctggctcaggtatacatggaccagagagacaaactggaccttcccttgccggggttgccgttgtccatggcggccagcctggccgatgactgagttgtcgccatgctcagcggatatcgtctcatgtgggtagccgtcatgttcgatcttcccgtggtggaaaagaaagagcgcaaagccgcaaccggattccgcaatgcgttgctggacatgggattcgagatggcccagttttcggtatacatgcgtttctgcaccagccaggcgcaaatcgatacctactgtaggcgggtggaggaaaccttgcctgacggcgggaaagtcaatattctggttttcaccgacaagcaatatgagcgcattatttctttccatgggaaagccaaacaggacccgaaaaaatcaccggaccaatttgatttgttctgagtcggtgcgccttttttcgattcgaaaaaataagaaacccactgacgaatcagtgggtttcagaactgcgattctactctatcgggatatgagctctggccggaacgcctgccgttcgcgctcgttcaggtcctctattctactctatcgggatatgagctctggccggaactgcgttgtggtatccgccgctgatcgtgatattctactctatcgggatatgagctctggccggaactttgctcgcaagctcaacaccaccgccggcattctactctatcgggatatgagctctggccggaacgcggccggctcccaggtgaagccggctgatattctactctatcgggatatgagctctggccggaactgtataatacaccttactacttgaacgcacattctactctatcgggatatgagctctggccggaacttggtcgccacggtcatttttggcgtgcttattctactctatcgggatatgagctctggccggaactcaaagaggatgcaattcaccgctacatcgattctactctatcgggatatgagctctggccggaacaaggacggaagcgcgcagcagaagtccaatattctactctatcgggatatgagctctggccggaaccccatgagctgtatcccgcctatgacactcattctactctatcgggatatgagctctggccggaacgcatcacaggtaacacggcattccgcttttatcccagattatccattaggcggcgcttcgcgcctacgcgagcgctggcggccggtttgcggccattttcgccgcttgttcgtcgtccatggaataaccatgaactcctcgcaagcaacgaaactgtctcgcaacccacctcgccatcatctcgcgtcctaatggataatctgggtttattctactctatcgggatatgagctctggccggaacttgcaacgtcacctactgttgcccccgactattctactctatcgggatatgagctctggccggaacgcggtcactgcggcggtcgcgcttaccttggattctactctatcgggatatgagctctggccggaactcgcggcgctccatgacgtattcgcggtacattctactctatcgggatatgagctctggccggaaccacttacccagttgtgtaaaatatttttagattctactctatcgggatatgagctctggccggaacctggcccgcgcgttcagcttttcgggcagcattctactctatcgggatatgagctctggccggaacttgggggcgcatggctgaccagtggcgcaaattctactctatcgggatatgagctctggccggaacccaccaggagtcattatgccgccattcttaattctactctatcgggatatgagctctggccggaacgcatcgacgagctgatccgcgcccgcgacgaattctactctatcgggatatgagctctggccggaacgcgcctggctcccaggtgaagccggctgatattctactctatcgggatatgagctctggccggaaccctttgggttgcgtgttggtgcgttcaagtattctactctatcgggatatgagctctggccggaacagtccgacacgctggcccgcctgatcgaatattctactctatcgggatatgagctctggccggaacgctgttggagcgtcggcgcgaccgccggccattctactctatcgggatatgagctctggccggaacttcagtaagttcaatatctcttggaagctaattctactctatcgggatatgagctctggccggaacggtgccaaaggactcatgcaggtcttaccattctactctatcgggatatgagctctggccggaacaggaccaccccgccgtggcggaactgcgcaattctactctatcgggatatgagctctggccggaacccggaaccgcactcggtccacagtgggatcattctactctatcgggatatgagctctggccggaacaggtgtgcttcgctcaagctgaccgctcccattctactctatcgggatatgagctctggccggaactgaccaggtgcgcgcctatgtcgaagcgcaattctactctatcgggatatgagctctggccggaacctggcttgggtttcggggcgggtactatggttattctactctatcgggatatgagctctggccggaacgcggtgaggaggggtgatcgtggtggcatgattctactctatcgggatatgagctctggccggaaccggtaacggcgaacggcaaacgtagatagcccgccgtccttggagtagtacaacccggaaagcgccgggtctagtccccttgatagctggccgctaatcgcatccagtatgcgaagccttccttcttcgcttttttcgcatagaagggtattgacgagagccgttcttttaagcgttgcgcttcccgctcgatagcggctatcctctccggcggcaaaggcctggctaccaattcggccaaagtcatcatccgtaaccgttccgccttgttcatcgacaaacctccgtccttcgaaatcatacgtaatgcccttgatcgcgggcacatggtcaacggtgttcattctactctatcgggatatgagctctaaccggaaccgtgaaggcgcgatcaacgcaaaaatcccccgtccttcagctcctccgccaccttcttcgccagctcgacctgcccggcttcattggggtggagggcgtcgagcttcagttccttgtccgacagcacgtcggggatggcgtcctcgatcaggaatactttccgcgcctcggccagttccgggtagacctccgccgccgacaggctgccgatggcggcgcccactacgcttggccggggggtggccaggaggatggggacggcgccggcgttgcgggccatgtttatcatttcctccaggttggcgcgggtttcggccgggggcactttgcgcagcatgtcgttgccccccagttcgatcatcaccgccgccggcttgtgctcttccaataggccgggcaggcgttcccggccgccggcggtggtgtcgccgctgacgccggcgttgaccacgttccagccggtggcggcggcgagcttggcgggccaggcttgttcgggggtgaggccgtagccggcggagatgctgtcccccagcaccaggaccgtggcgccggggggcagggcctgctgcttgggggcggagcaggcggcgagggcgaggaggagggcggcgagccagaggaggtggcggtggggggggagtgttttcatcctgagtcctctgttgatccggttggatttgacatgcgctgcggtccacccccatcccaaccttcccccttcaagggggaaggagcttgatgtggacgcggccgccttgggcggccttggctacatcagcacgatgtcgtagcgctcctgggtgtaggtgctttccacctggagggagacggatttgccgatgaattcggatagttgggccaggctctgggattcctcgtccaggaacaggtcgatcacctgctgggaggcgaggatgcggtattcccgggcgttgaactggcgggcttcccgcagcagttcccgcaggatttcgtagcacacggtctgggcggtcttgagcacgccgcggccctggcagatggggcagggttcgcacagcacgtgttccaggctttcccgggtgcgcttgcgggtcatttccaccagacccagggcggagaagccgttgaccgtgatgcgggtgcggtccttggctagcgcccgcttgagttcctccagcacgtggctgcggtgctccgggttgtccatgtcgatgaagtcgatgatgatgatgccccccaggttgcgcaggcgcagctggtgggcgatggcctgggcggcttccaggttggtcttgaagatggtgtcgtcgaagttgcggccgccgacgaagccgccggtgttgacgtcgatggtggtgagggcctcggtctggtccatgatgaggtagccgccggacttcagctccaccttccgcgacagcccgcgctcgatttcctcctccaccccgttgaggtcgaacagggggcgttctccggcgtagtgctcgattttgttcaccacgttgttcatgtacaggcgggcgaattcctgcatcttggcgaaggtttcccgggagtccacccgcaccttggcggtgtcgtcggtgatgaagtcccgcagcacccgcagggacaggcccaggtcctggtagagcagggtcttggggggcgcggtgcgggcggcatcggtgatgttggaccacagcttgcgcaggtattcgatgtccgccgccagttcctcgtcggaggcgccttcggccacggtgcggatgatgtagccgcccttctcctccggcggcagcagctcctgcagcttgttgcgcagcatgtcccgctcgctctcgtcgccgatgcgctgggagatgccgatgtgggactcctggggcaggtagaccaggaagcgtccggcgatgctgacctgggtggagagccgcgctcccttggtgccgatggggtccttgaacacctgcaccatcaggggctggccctcgtggagcaggcgctcgatgggtttggggctaccgttgccgttggcggcggcctgccagatgtccgccacgtggaggaaggcggcgcggtcgaggccgatgtcgacgaaggccgactgcatgcccggcagcacccggcacaccttgcccagatagatgttgcccaccaggccccgggcgctttcccgctcgatgtgcagctcctgggcggcgccctgctccatgacggcgacccgggtttcctggggggtgacgttgatgaggatttcgttcacgtgggcatcccgatggtattcaataattcggcagtctcgaacaggggcaggcccatcaccccggaatagctgccgtcgatgcggcggatgaagcgcgcggcgtggccctggatgccgtaggcgccggccttgtcgtggggttccccggtgagcacgtaaagctggatgtcgtggtcggagaggggggcgaattccacctgggtggtggacaggcgccactccagcttgtcctggtaggccacggcgacggcggtgagcacccggtgggtggtgccggacaggcgtctgaggatttgcgccgcgtgttcgtcgctttccggcttgccgaagatttcgtcccccagggccacggtggtgtccgccgccagcaccgggtgggggggcagcttgtgttcctggatatgttcccaggcggcccgggccttgtccttggcggcgcgcaccacgtaatcctcgggcttttcgccggggaggggcgtctcgtcggtttccggcgccaccgcctcgaagtggaggccgatctgcttcagcagatcccgccgccggggcgagcgggaggcgaggtagaggtggtcgaaagggttgatcatggtcggtggtaagggtggcctttgtggagcgacatcgcccggtacagttgttccgccagcagcacccgcgccatgccgtggggcagggtcatgcgggagagggacatcagttttgccgccttgttcttcacgctcgggtgcagcccgtcggcgccgccgatgacgaaggccacgtcccggccgccccccagccactggccgaacatttccgacaactccacggtggaagggttcttgccccgttcgtccagggccaccactttgcagccctggggcagagcggccaggatgcgctcggcttccgcctccatcaccgcctccgccggcttgcccccggtgcggctggcgggcttgatttccgccagttcgatgcgggcttcccgcggcattcgtttggcatactcgtcgaaggcgtcgttcacccaggcgggcatcttgttgcccaccgcgacgatgagcagtttcatcccttgggagggaacggcaggcggggcgcgccgccccacagttcttccaggttgtagtactggcgcacggtggggttcatgatgtggaccacgatgtcacccaggtcgatcagcacccactcgcccacgtgctcgccttccacgcccacgatgtggccgccgttttccttcaccttgacctgcacgttattggccagggccttggtctggcggctggagtcggcgctggcgaagaccatgcagtcggtcatgctggtgagtttcgatacgtccagggaaacgatgtccttggccttgatgtcttccagggcgtcgacgacgacccgcttcagttgttctacggtcatgctgccttcagagataaagatggttcgaacgaatatagtcgagaaccgcgtcgggaagcaaatagcgcgggttcttgccgccggcggccatgagccggatgcgggtggcggagatgtcgaggcgggtggtttcccgggcgatgatttttcctgccgccgcgctgcggatgtcggccgcgtcgtgggtgaggcggttttcccactcgtcccgcagctccaggggcatggcggtggcccagctttccatggcgtagccggggcgctgggcgacggcgatatgggccaggtcgaacaggtcttcccagcggtgccaggtggccaggccgaggaaggcgtcggcacccaggagcagcaccagggggcgctccgggccgagttcggcgcgcagttcggccagggtttccacgctgtagctgggggcgggtttctggatttcccgcccgtccacttcgaacaggggattgtcttccgccgccagccgcaccatttccagccggtgtttcggggcgacggtgggcgttccccggtggggcggctggccggcgggaatcaggcgcaccttctccagccccagcatctcggccatttcctgcgccaggcgcaggtggccgtagtggatggggtcgaaggtgccgccaaaaacggcgtggggggtgcggtctgccatggcgggattatacccgagtgagtggcaacgatttgaatcggcgtggttttctgcgctctggtagaaagataccggattgaggggcggcgggacgcggagtaaagtggggccgagtcgattgggtcgaggagaagaagcgatgaaattgtggcggggcgtgatgtttggggttctgatgttgctggcgccatgggtccgggccgaccctcctgcggactatcccttcgtcagctacgaccaggggttggtgcgggccagggaggaggccaagccggtgtttctctatttcggccgctacggctgcgcctggtgcgacaagaccaaccgggagtccttctccaacccggagatacgtcagcgctacacggagcattacgtgctggtgtacgtggacgccgagggcggtcggcggctgaaactgcccgacggcgagcgcatcaccgaggcggaactgggtgcccgcttcaaggccttcgccactcccctgttcgtgttcctcgaacccgacggcaaggtgatcgtgaaaatccctggcttcaagaccgtggaggatttccgcgacttcgaccgctatgtctccgagggccattacaagagtcggaccctgctgcagttcctcgggggcaagtcgtgagagccgggtggctggccgcgttttttcccttggccgccttggcggcgccctgggagttttccccgccggtggacctgaccaccgtttccaccaagggggtgttccaccacgtggaatccgccgggcgcaagagcatcgccgtcgccgaagggggcgtggcggttgtgtgggaggacaaccacgatggcgtgtcccgctgctatctggccttgaagccggcgaaggcgagccgcttcagcgcaccgatgcgggtcagccgtacccatgagagcttcgagcccagcgtggcggctatgggcaaggggcgctacgccgtgggttgggaagaggacggcgccgcctgggtgcgggtgaccgacggcgtgcgcctgtcgccgtcgctgcgcttgagccgggaggaagccggccaggtgagcctggccaggggaccgaaggaagggttgtacgccgcctggacggaaggggccgggcgcttccgccaagtgcgggcggcgcggattgcggtggagggcgaccacttgggcatggatggctcacgcccggtggatgccgccataccccaggacgagcaactctatccgtccctcgccgtgacggcggaggaaagcgtcgtggtggcctgggaggaccggcgggaagggcatacccgcattctttacacctaccgtaacaaagacggcagtttcgccaacccggcagccttgaacgaaatccagcgcggccaggcggcggccttggggctggggcggggctccggggcgatgcgggtggctctggcggcggagggggaagacggcattgcagcggcgtggtccgacaagcgggatttcctgtccggctacgacgtctacgccgctttttcctccgatggcggccgcagcttcggcaagaaccagccggtgcaggacagtttcggcgacagcttcgcccagtggcacccggccattgccgccggtccccacggccgggtggcggtggcctgggacgacgaccgggacggcacctccgacatctggctggcctgggcggaagggggcggctggagcgagaacctggctttgcccggcgcttcgggggagggcgtgcaaagcgaccccgccctggccctggacgaggacggcaacctgcacgtggcgtgggtggaaaaggccg

SEQ ID NO: 1840 - DNA, 23045 bp, synthetic construct
  misc_feature 1..23045: note = Synthetic
  source 1..23045: mol_type = other DNA
ccggtttaagcccttcgcaggccaaacctgcgccaaacgtcaccgcgtgttgctcggcaataccaacatcgtgataacgctcggggaagcgcttgttgaactccaccatgcccgagccctcacgcatggcgggcgtgatgcctaccaacaaggggtcatgctcggccatgtcacacagccattggccaaacacttgggtaaaggtggttttagagggactggtggcaggcaccaagcccaccgcggggtcaaacttgcccggtccgtgataggccacagggtcggcctcagccagtttgtagccttggccttttttggtcaccacatgtaaaaactgtggaccttctaagtgcttgatgttttccagcgtgggaatgagtgactcaaggtcatgcccatcgatcgggccaatgtagttaaagccaaatttttcaaacaaggtggcaggcaccaccatgcctttggcatgctcttcaaaacgtttagctaactcgaacaaaggcggcgcgcctttgagcacttgcttacccacctctttggcagtcgcgtaaaacttgccgctaatcagctgcgccaaatagcggttgagcgcgcccacgggggggctgatcgacatgtcgttgtcattcaagatgaccagcagtttcgaggtggacacaccgccgttgttcaaagcttcaaaggccatgcctgcggtcatcgcaccgtcaccaatgacggcgatggcgtggcgttgttcgcctttttgctgggcggcaatggccatacccaaagcggccgaaatactggtggacgagtgagccgtgccaaaggcgtcgtactcgctttcgtcacggcgcggaaaaccgctcaggccgtggcgttggcgcagcgtgcccatttggtcgcggcggcccgtcagaattttgtgtgggtaggtttgatgacccacgtcccacacgatgcggtcgtgcggcgtgttgaacacatagtgcaaagccacggtcaactcgaccgtgccgaggttagagctgagatgcccgcctgttttcgccacgctattaagcacgaacgaacgcaactcatcggccagcgctggcaactggtggcgcggcagatcccgcagatcggcgggtgaattgatggtttgcaacaaattaggcatgtttcttcaagtgttccggttcaccacgcgctcagccaaagcggccagcgtgtgggtgtgcgtcaagcccgagctatgcaaggcatcgagggcctcgcgcaacaacgactgcgcatatgacttggcttcttccaaacccagtaacgacacgtaggtgggtttgtcgttcgcagcgtctttgcctgcggttttaccaagcgtggctgaatcggcgatgacatccaaaatatcgtctaccacctggaaagccaagcctaaggcttgaccatagcgcttcaagccattcagcgcttgtggtgtggtctctccacagactgcacccatcatgacgctgccttccagcaaagcacccgttttcaagcggtgcatgtggcgcagttgatcttcgttcagggccacgcccacactggccaaatcaatcgcttgaccaccggccatgcctgcatgacctgctgaggtggcgagcaaacggcacaaacgcgcttgcacgccatcaggaatggccgatgcgtctggggtgagaaattcaaaagccaaggcctgcaaagcatcgccggccaacaaagcttgggcttcgccaaactgcacatgcacggtgggcttgccacggcgcaatacgtcgttgtccatgcacggcatgtcgtcgtgcaccagcgagtaggcgtgaatcaattccaccgcacacgcagcacgcaaggcggcttcatccagcgcagggtcttttgtgccgtgggccacggcctcacgcgcggccaacaccaacaatgggcgcaaacgcttgccgccatcgagcactgcataccgcatggcatcacccaagcctgcaggggcttgtggactgatccagcttgacaaagcgtcttcaacgacagtcaaccaatggttgctccattggtcgagttcagtcgtcgtcatgacatgggtcatcgcagcgctcacgtcggtgtccaagtcttcaatgcgccgttgtcgagcaccttgatttgctgctccaccgcgtccaactgcgcacggcagtaacccaaaagttcggcaccacgctgataacccgataacaaatcggacaaaggcaattggcccgactccatttgttgcaccaaggcctctagctctttcaaagcagcctcatagctggcaggcgcagtatctgcgccgctgggggtagttttggccttgggcatggtgtgcggatatccgtgtttgagatgggtcaaatagcccgtcattttaggcctcatgcggggcatggttagcccccttgggtacaatgggcatccttcaatcgaccctcgggccgatttatttttttcacttctctccctgtggggagtctttaggtcaggtcacccatgtctgatttaagtcttcaactgcagcaggcgcatagccaactaccagttaccagttatttcgacgaggcgctttttcagcgcgaactggagaccatctttcagcaagggccccgttatgtgggccaccagcttgccgtgcccaatgtgggcgactactacgctttgccacacgaaggcgaagggcgtgcgcttgtgcgctcggccaacggcgtagaactggtatccaacgtgtgccgccaccgccaagcagtgatgctcaagggccgtggctctctcaacaaccaagcccctggctctgccggcggcaatatcgtgtgtcccttgcaccggtggacatatgcgccctctggtgaattgctgggtgcgccccacttctcgcacgacccttgcctcaacctcaacaactacaagttgcgtgagtggaacggcatgctgttcgaagacaacggccgcaacatcttggcagacctcgccggcatgggccccgccaaagatctgaactttgatggctacgccctcgaccacgtcgagctgcacgagtgcaattacaactggaagaccttcatcgaggtctacctagaggactaccacgtcggccccttccatccaggccttggcaacttcgtgacgtgtgacgacttgcaatgggaattcaaacccgagtactcggtgcaaaccgtgggcgtggccaacacctttggcaagcccggctctgacgtgtacaaaaaatggcacgacgtgctgctgaactatcgcagcggcgctctgcccgagcgcggtgcaatatggctcacctactacccccacatcatggtggagtggtacccacatgtgctgaccgtgtccaccctgcaccctgtcagccccaccaaaacgctcaacatggtggagttctattacccagaagaaatcgtcgccttcgagcgcgaattcgtggaagcccagcgcgcggcctacatggaaacctgcatcgaggacgacgaaatcgccgagcgcatggacgcaggccgcaaggctttgatggaccgtggcgacaacgaagtcggcccttaccaaagccccatggaagacggcatgcagcacttccacgagtggtaccgcggcaaactcaacttttcgcaaagctaagccaacgccatgcaagccctgtggatgctgctgggtgcagccttttttgcgaccatgggggtttgcgtcaagtttggttcggagcacttcaactcggctgaactggtgttctaccgaggtgtggtgggttttgtttttttagccgtcattgcgcgacaaaaaaatatttcgctgcgaaccgaatacttgggcatgcacgtgtggcgctccatcattggcgtaacctcgttgagtgcttggttttacgccatcgctaaattgcccttggcaaccgctatgacgctcaactacatgagcagcgtatggattgccgccttcatcgtgggtggctcgctcatcaactggaaacccagcgaagaccaaagcccttggtctcaaggccccttagcactcacggtcatggctggctttgcaggcgtcatcatggtgctgcgccccaccatggcacaagaccaaatttatgctggccttattggactcatgtctggtttttgcgctgcctttgcctacatgcaagtcatggcgctaggccgcatgggcgagcctgaaacccgcaccgtgttttactttgctatcggcacgatcttggcaggactggcaggcatggccttcatgggcatctccacttgggaatgggagcacgctgtgtggctcattcccgtgggcatttttgcttcactgggtcagctgtgcatgacccgcgcctacagccagggagccacactggtggtggccaacttgcaatactcaggcattgtgtttgcagccttatacagcttgctgttgtttggtgatgacatcccgctgattggctgggttggcatgaccctgatcaccgcaagtggcatggcagcgactttgctgcgtgcccgtgcggcgccacaaacacccgccgaagaacactgacgcgacatgtcatccgcttagctttgatatctcaaaggaaaccgctatgtacaccaccctcatttctgttgctcaactcaaagccttgcaaaccagtggtacacctttggctgtgttcgattgcaccttcgatttgatgaacccacctgcaggccactcacaatttgtagagcaacacatcgcaggcgcacaacacgccgacttagaccagcatctcgccacacacgatgctggcaaagccgtgaatggcggccgccaccccctgccacaacgcgaagtatttgcggcttggttgcaaagcatgggtcttaacaacaacacccaagtggtggtgtatgaccgcaatggcatgaactactgcggccgcttgtggtggatgctgaagtggtgtggacacgaagcagtagccgtgctcgatggtgggcttcaagcttggactacttcgggtggtgcgattgctagcggtgaacaacgcactactgagcgtggcaatttttctttgcgcgcgtcgttggtcacattcatcgacaccacccatgtggccaagcatttgaacgacggcacacaaaccatcgtcgacgcacgcggtgcaccccgttaccgtggggaagtggaaccactcgacccagtggctggccacattcctggcgcactcaacagacctttcaacaccaacctcaacgccgatggtttcttcaaaagcgcagatgaactgcgtgctgaatttaccgctctgctaggcagcgccaaacccgagagcgtggtgcatcactgcggcagtggcgtgagcgcggtgcccaatgtgttggccatggaagtggcgggcttaggccgcacagctctctatgcaggcagctggagcgagtggtgcaacacggccggcctgccctgcgaaaaatcttgaatgtagattagtgctgcgcccactcgcccaaagcggcgacgagggcaatgcctgcaaacaaccaagccacttgggccgccgtctctttgggtgagagacgtttttgcaattgcggaatcaaatcagccaacgccacatagataaagctgctggctgccaccaccaaaaagaacggcaagtattcgtgcagtgcgccgacgagcaagtagcccaccaaaccaccaatcgcggtcacgccacctgcaagcgtgagcttgaacaaagcagcgcgtgggttgctgagcgtttggcgcaacaccaccaagtcgcccacatggtgcggtacttcgtgggccatcactgccaacgctgcagcaatacccaaacgagggtctgccacaaaagcggccgcaatcaaaatgccatcgccaaaggcgtgcacgctgtcgcccagcaacactgcccaaccaccactgtggtggttgtggccatgatggtggtgatcatgatgagcatgccccgcgtgcgcgtgatggtcgtgagcatgtgagtggctatgcgcttcatgcgaatggtcatgcccgtgctcatgcccgtgatgccaaagctcagccttgtcgagcaaaaagaaaaacaccaaaccgaccaacaatgcaccaaacaaggcctgcgctgaaacacctgcactgacggacaactcaaacgcctctggcaacaaccgcgtgaacgccgtagctagcaaagcgccggctgcaagactcagcaaatgttgagtgaaacgcgacagcagtgcataagccaacaatgccgccagccacacactgcccatgccagcgactaaggtgccaacaagaattgaaatcaaggtcataggcgcattatcccgcgcgaaatgtcgaggttcaaaaccatgcctttgtcagggtagagggtgatcagcttcaccatgagatgagttagcgcaacaccccagcgaaataagcagtcaattcctcataaccatccagtggcaacacatgcgccacatactggtctgggcgcaccaccaccatgcagcccttgtcgcggttgatgccgcgcatgtcaaaaatatcgcccagacccttgtggtccacacaaaacactttggcgtggtcttgcaaacccagcttgcctgttttgggtttgagcaacgagggcatgtgttcgtatgcgagctggtcaaaggtttgttggaacacagcgcggcagtcaatcaccgcatcaatgtcttcgcccttgcgtgtgtgtttgacgatgggtgaattgacgttggtctctaaccagtcagacagcttgtgaatggctgagcctgagctagaggtatctgccttgccagcaaatgcataaatgcgccagcgtgcatcagcctgtgccacatggcccagttgcatttgcttggcgtctgacacgcgcaccacgggggctgagtggaaacgacgaccaatttcttcgcctgtggccaatgcttggtgtgcgctggctgcaaacaacgttgaggtgtcgtacttcaccgctgtgccgcctgtgaactctaagttgtctttgaactggcgaatgatgcgcggctcttgggtgccatcgcgctcggcctgcgaggtgggggctgacatgacgcgtgaccatttgtggtcggtctctaccaaacgcttggcttcggtcaatcgctctttggtgtagctgcgcagcaggctggggctggcacggccttgcagcacatgcaccattttccaacctaggttgaaggtgtcttgcatcgacacgttcatgccctgccctgctttgggtgaatgggtgtggcacgcgtcgcctgcgatgaacacgcgtggatcgcggtcctcgccctcgggcacatcatcaaagcggtcggtgatgctgtggccaatgtcatagatcgaccaccacaccacttctttcacatcaatcgcatacggtttgatgatgcggttggccgctgcaatcatgtcgtcttgtgtgaacttgcggtgcgcggctttttcgtcggggcggagcttgtcgagcgcaacgtacatgcgaaacacgtaaccgccttcgcggggcaaaattaataagttgccctcgctggctgaagagatcaaacacttctgtcgcacatcgggaaaatcggtgttggccaagatgtccatcacgccccaagcttggttcgcggcatcgccctgcaactccctgcctatcgccttacgcacggccgagtgcgcaccgtcgcagcccaccacgtagttggcgcgtacggtgcgtgtagcgccccagttcaagccactggcgtcgcgcagggtcacggtcacggggtggtcgtcggtggtctcgtcaatggtcagccccaccacctcccagctgtagtcaggttctaggcgtgagggtgagtttttcatcacctctaaaaacaactcgtgcaagcgcgcttggttgatcaagatgtgcggcatctcagagctgtcgtcggccacgtcttgcacgcggcctacgcgtttgatgtgatcgggggtttccgggtcgggcatccaaaacgcggtttggttcacccaatacgtttcacgcttgaccttgtcggcaaagccaaacgcttggaacatttccatcgtgcgcgtgttgatgccgtcggccttgcctttgatgatgttgctgggcatgcgttcagtgatcatcacctctatctctggaaactgcgccagctgcgcggccaaacaaagaccagcagggccagtacctgagatcaacacatctactttttcgggcaagggctcgttaatgccacggttgcggcggttgggcgcagctggcttgatgtctgggctgccaccgcgaaatccgtctttgtaaaactgcatgtcttgtctccgttattgatacctgtccgaaacctcggaatgagcaaatgataactatacttactaatagccgtcaagatggtatgtatgattaccatattggtatttctacggagacacaggcatggcgatgcacgacatggcggggcacttgatacgtcgcctgcaacagcaatccacccaaatctttgcgcagcgcacccaagccgcaggctatgacctgacctcggtgcaatacgccgcgctagacgccatcgccaacaacccgcatgtcgaccaagccaccgtggccgaaatcattggctacgaccgcgccaccattggcggagtgattgagcgtctagacactaaagggtgggtgcgccgtgtggtgagcgagcaagaccgccgatcgcgcgaactatcgctcactgccaagggcaacaaaatttacttggcgctgctgcccatcgtgcatgagctgcaagcagacattctttaccccttgagtgcggctgagcaagagcgctttatcaagctggctcgtcaggtggtgtggcacgacaagtcgacggacgtagcctagaccacatagcagccacccaagccaaccagcatgtcaaggttgcacatgagacgcaacttatgaaagcctgacttcacctcaaaacagttaaggcagccaaaaatcaacacggatttctgaatttaaatttgtaacttataattcacaaaacgtgtacgacatccaaacttatcgcaccgatgatgatgtacagccctacgttgcttggttgggtgcattgcctgatcgtcaagccaaggctcggattgtggttcgcgtcaaccgaatggctggcggcaatctgggcgatgtcaaacctgtgggtgacggtgtatgggaggcccgcattgactatggcccagggtatcgcctgtactacgcgcaagcaggtcgtcgcttgatcttgttgctgattggtggcgataaacgcacgcagcaatcagacattacaaaagcacaagactactggaacaactggcaaatgcagaggaaatccaaatgacagcaaaaactggacgctcacatgatgaagtggtggttgagatgctgagagcagaccccgaatttgcagatgcctacttggccgctgcactagaagagactgagcaaccaggtggccatcaagccatgctgaccgctttgcgccacattgccgaagcacaaggcatggctaatgtggccgagaaagcgggtatgcctagagagtcgctgtaccgtgcgcttgggccccgtggcaaccccaccatcaaaaccttgctcgctgttttaaacgcatcgggacttcacttgtctgtggctagacaacattaatgggttgctattaagaacgctaagaagccagaccgcatcaccagcgaactgctggaaaccgcacatgcactgagtaaacacaatgtgctgccagcacaagagctgaatcaaatcaaagcattgcgcactacaccccctgtgttcacagcagataaaagacgctcatccgaacgcgcacagccaaaatgagctgagccgcttttttgaacttataacgaagcagaaaagataaagggccgcatatagcggccctttcatttggtgcatctttctgcttgttagcgtccagagcgcatatcccaatcgttttatgcggggacaaatatagcacaataggattcattaatttcttaaaaagaaaccagaatgaacaaaatgcgctaccgccttgcacttgacttaggctccacatcacttggctgggccatggtcaggctaaatgcagaaaaccaaccctgcgccattatcaaatccggtgttcggattttcagcgatggtcgtaaccccaaagacgggtcatcacttgcagtgactcggcgcgaagcacgcgccatgcgccgccgccgcgataggttgctcaagcgcaaagcgcgcatgatgaaaacactcatcgcgcacggcttctttccgcaagacgaagaagatcgaaaactattagaacgttctgacccattcgcacttcgcgccaaaggacttgaccaagcactaaggcccgatgaatttgcgcgtgcgttatttcacatcaaccaaagacgcggttttaaaagcaaccgcaaaactgacaaaaaagaaaacgacagcggggcattaaaaacggccatcagccaactgcgtcaggccatgcaagccacccaatgccgcaccgtgggcgaatggctcaatatgcgtcaccagtcaggtctatctgtgcgcgcacgctatcgccaacacatggtgcagcgcgaagatggcaaaaccaaaacagaaatgcgttacgacctatacattgatcgcgcaatgatcgaaggcgagtttgatgcactttggcaaaagcaatccgaactcaaccccaatctgtttaccgaaacggcgcgtgcggaactcaaagactgcttgctgcaccaacgcccactcaaaccagttaagcctggccgatgcacgctcatgccggaagaagagcgcgcgccattggcactgcctagccaacaacgctttcgtatttaccaagaggtcaacaacctacgcttgttgaaagaagggctgaatgaagaagcactctcgttagaccaacgcaaccaaatcgttcaagcgcttgaaggcaacaccaaacgaaccttcacgcaaattaaaaaactcattggcttttcgggcgatttcaaccttgaagacgaaaagcgcgccgaactcaaaggcaacagcaccagtgcaatgctgtgcaagaaagatttgtttggccctgcatggtttgacctgagtgaagatcaacaagacagcatcgtgatgcagcttgtcaaagaagaaaacgaagccacactggtacgttggttacaagacaacacgggtatcgacgaggcaaacgcagaacgcgtggccaacaccaacttagccgaaggctacggcagcctttgcgctaaggcactgcaaaaaatattgccagcactcaaggtcgaggtcatcacctatgacaaagctgtgctggctgcaggctttgaccatcacagcaacatcagccatgccagcacaggcgaaatactacctagcctgccctactacggcgaatacttgcagcgccatgttggctttggcactggcaagcccgaagacacaccagagaagcgttacggcaagattgccaacccgaccgtacacattggcttgaaccaaattcgcacagtggtaaacgcactcatcaaacgctacggccaccctagtgaagtcatcattgaactcgctcgtgatttgaagcagagccaagagcaacgcaaagaagaacaacagcgccaagccaccaatcaaaaacgcaaccaacgtatgcgcgaagacattgcagcgctgctgcacatcagcgctgaccgtgtcaaaactgccgaccttcaaaaaatgattttgtgggaagagttgagtttcaatgtggccgaccgacgctgcccctacagcggtgtgcaaattagcgcgcaaatgctatttagcgatcaagtggagattgagcacatcttgcctttctctgaaaccttagatgacagcctgagcaacaaaacagtggccatgcgtcaagccaatcgcatcaaaggcaatcgcactccatggcaagcgaaagacgactttgccaaacaaggctgggctacagaagacatgctgggacgcgccgaactgatgcctagaaacaaacgctaccgctttagcgaaaccggctacgcacagtggttgcgtgatgacaaaggatttttagcgcgcgcactgaacgacacgcgccacttcagccgtgtagcgaaggaatacatgagcttgatctgcccgcaaaacacacgtgcagtgccaggccagttgaccgccatgctgcgtggcaagtttggactgaacaacattcttggtttagatggtgagaaaaaccgcaacgaccaccgacaccacgcagtggatgcatgcgtcattgccgtaacagaccaaggcatgctgcaacgctttgcacaagccagcgccaacgcacgtcagcaacagctgggtaaattggtggacaacatgcccatgccttggcccacctaccgcgagcatgtgcagcgtgccgtcgaaaacatttgggtcagtcataagcctgatcatggccatgaaggagccatgcataacgacacagcctatggtttgggcgcaaacggcaaagtgcgcgttcacaaaatggtggaaggcgttcgcacgctagaagaaagctcactcaaagtcattgcattcagtgaacccaaagcatcagcacgtcacggcgtattaccaactggcgacgccaaaccttacaaaggctacaaaggcgacagcaactactgcatcgaaattgtgcgcaatgaaaaaggcaagtgggaaggcgaagttgtttctaccttcgaggcatatcaaatagttcgaaagcatggtttttcgaaactacgtcatccaaccattagcgtgagcaataaacctctcgtcatgcgtttattgattgatgacattgtgaaattaaacacatctgacaacgactatgttggacgcatcgcaacgattagtggaaatggtcagatatttatggctccccacaatgaagctaatgtagatgcgcgaaatcgaagtaaagaagatgcattttcttatatttcgaaaatggctggttcactacaaaaagctcatggacgccgtgtcaccatttcacccattggcgaactaaaagacctaggctttcaaggctaagcatgcaaggccgcatcgttgaagttgccgatgaccgcagacatctgtcggtctatcgcggtttcatgctggtgcacagcacaggcgatgagcgtcaagagttaggacgcgtagcgctggacgatatggcggcactgatagccagcgcacacggcatcagctacaccaacaacttgttggtagcactggctgaacgcggtgtgccttttgtactgtgcgcggctaatcacaaacctgttggcatgttgtggcctttagatggccatcaccttcaagcccaccgatttgatgcacaaattgcctgcacattgcctactaaaaaacgtttgtgggccagccttgtcaaagccaagctattgcaacaagcagccgtactagaagccacaggcgtagcaactgcgcctttaaaaacactggccaaaaacgtacgcagtggtgaccctgacaaccttgaagcccaaggcgcacgcaaatattggggcctactgtttggctctttatttacgcgtgatcaagaagctgacgggctcaatgccctgctgaattatggctacaccgtgctgcgtgcggcgacggcccgtgcagttgtggccgcaggtttgcacccaagcattgggctgcaccatagccatgacaacaacgccatgcgattagtggatgacttgatggagccgttcagacctgtggtcgattggaccgtttggcaactgcaacacaaccagccatgtcacatcaacccagagactaaacgcgccttggtcaaaagcctgtaccttgaccttgccacgcccgcgggcaatacatctgtactggtggccatacaaaaactggctacatctttggcgcaagtactgaccaacgagtgcacagcacttgatctgccacacccatgtgtgcccgcagcacatgtgcaggacatgcgcgactgattcacaacatgctgagcggatatcgactgatgtggatgctggtgatgtttgatttacccgtggtgaccaagcccgaacgcaaagcagccaatgagtttcggctcaatttactagacatggggtttctgcgcagccagctgagtgtgtacatgcgcttttgcaccagccatacacaagtacaaacctattgccaacgtgtagaacaagcgctgccgctgggcggacaagtaaacattctgcaaatgaccgataagcagtacgaacgcatcattagctttcaaggccgcaaagccatgcctgcgaaaaagacgcctgatcagtttgatttgttttgaatgagctgttttttttgaacgtccaaaagcaaataaacccttgtaaaacaagaggttacgtgccgtgtagtctagacgattgggatatgcgctctagccggaactgcaggcctcaatccactccagcttttgtgagtctagacgattgggatatgcgctctagccggaacaacgactgcctgcatacgatgaattttcggagtctagacgattgggatatgcgctctagccggaacaacagggcgaagcattgaagaacaattccgagtctagacgattgggatatgcgctctagccggaacgatggcactacctttacggtggcagatgtgagtctagacgattgggatatgcgctctagccggaacacattgcgcaagttgtgcacagtgcgctttagtctagacgattgggatatgcgctctagccggaacccaccgcgaaccagttacgagcgtcacggccaagtctagacgattgggatatgcgctctagccggaacttgcgtggtgccgaacgtatgacaacaacaagtctagacgattgggatatgcgctctagccggaaccatcgctggcagcagccacgcatccatcagagtctagacgattgggatatgcgctctagccggaacctcatgctggcctttgccgaaggtgcagacagtctagacgattgggatatgcgctctagccggaactgaacacatgagcttgagactttgatgcacagtctagacgattgggatatgcgctctagccggaactacaaagacgcgcctcgccgcttgggccgcagtctagacgattgggatatgcgctcgaagtaataaaaaaacacggccctcaaaagagggccgttgaagcaagggtcgctaaaagtgaatcaatgcgccttatcccaattaggtcccacccccacctcagccaacaacggcactttcagctgcgccacttcagccatcaggcgtggcacttcggtgcggacccattccacttctgactcgggcacttcaaacaccagttcatcgtgcacttgcatgatgactttggtttggcgctgttgatcgtcaatggctttttgcacggccaccatgctcatcttgatgagatcggcagctgtgccttgcatgggcgcattgatggcagcgcgctctgcgcctgcgcggcgtgggccgttggggctgttgatttcgggcaagtacaagcggcggccaaacacggtttctacataaccttgtgctttggcttgttcgcgtgtgtcgtccatgtagcgcttcacgcccgcgaagcgttcaaagtaacgggtgatgtagttcttggccgcgctgttgtcgatgcccagcgctttggccaaaccaaacgcgctcatgccgtagatgaggccaaagttaatgaccttcgcatagcggcgctgctcggtactgactgcatccacacccacgccaaacacttcggcggctgtcgcgcggtgcacgtctaaaccatcatggaatgctttgaccaacgcctcatcaccactgatgtgcgccatgatgcgcagctcgatctggctgtagtcggcactggctatcacgcagcccgcaggggccacaaatgcttcgcgcactttgcggccttcggcggtgcgaattgggatgttctgcaagttggggtcgttgctagacaagcgtcccgtcaccgccacggcttgtgcgtagtgcgtgtgcacgcggcctgtgcggggcacggccatttgcgcgagcttgtcggtgtacgtacctttgagtttgctaaggctacggtgctccaaaattttggcaggcagtgggtagtcttcggccaatttctccagcacttcttcgtcggtgctgcgtgcgccggtggcggtttttttgataacgggcaagcccagtttgtcaaagaagatttcgcccaattgcttagggctggccaagttaaacggctggcctgctatttcatacgcttcagtttctagctgcacgatgcgttggcccagcgcgtggctttgtgcggcgagtgtgggtgcatcaatcaacacaccgttgcgttcgatgcgatacagcgcttcgctgctttgaatttcaaggtcgtagatgaagcgcagtttgtcgtcggcttgcaaacgcggccacagcacttggtgcacgtctagcgtcatgtcggagtcttcgcacgagtattcggtggcacgcgccacgtccacttgcgagaacggaatttggtgcgcgcctttgccgcacaggtcttcgtagttcaaacccttccggcccacatgacgctcggccaagctggctaacccgtgaggcttgtgcacttccagcacatagctttccagcatggtgtcgtgcgcgtagccctttacctcaatgccgtggttggccatcacatggcggtcatatttgatgtgttggcctagcttcttgatgccggcgttttcaaaccaaggcttgagtttggccagcacttcattgatgggcaactgcgtaggtgcatcaccatagctgtgcgccagcgggatgtagcaagcctcgcccggcttgaccgaaaaactcaggcccacaatctcggcgcgcatggcgtcgagcgatgtggtctcggtgtcaaacgccactagctcggctgcattgagtttagccagccatgtgtcaaacatggcccagtccagcacgcagtcgtaatgcttgtcagtcacggtagataccgtgggttcgggttcgtcaaacaggctgggattgggttcaaacttcggcttagcctctgatgctccagccgaatcaccaccttcgctgatggcgcgggccaaacctttgaagccataggtttcgtaaaaggttttgagtgcaggcttgtcaggctcagccaagtgcagcgcatcgagtgcgggcaagttgggcacgtaggcagataaatcgcaatcggttttcatggtcaccagctggcggcctgtgggcagccactcaacggcttgacgtaagttctcacccgccacgcctttgatggcgctggcgttttgcagcaagttatcaagcgagccgtattccatcagccacttagccgcggtcttggggcccaccttggccacaccgggcacgttatccaccgtgtcgcccaccaaggtttgatagtcgatcatcaaattcggcggcacgccaaactcggcggtcacgccggccacgtcgcgcttcttgccgttcatggtgtccatgatggtgatgtgttcgttcaccaactggctcaaatctttgtcaccgctcgacaccaccaccgtcacgccttgcttggcagcggtcacagcaagtgtggcaatcacgtcgtcagcctcaacgcccggcacatccagcaccgtccagcccaacatgcgcaccatggcgtggatgggttcgatttgcgagcgcaagtcatcgggcatgggcgagcggttggctttgtacgcggggtacatctcgtcgcggaaggtggggcctttggcgtcaaacacgcaagcagccaactgggtgggcacttctttgcgcaaggcctgcatcatgttgatcatgccgcgaatagcgcctgtggccgcgctcgttgggtcgcctggcacagcgcgcaggtcgggcatggcatggaaggcgcggtaaaggtagctggagccgtcgaccagcagcaatgttttggattcactcataactgttgattgtgccgtgggttgttgcgtggcctttgtgctttgttgctgggctcgctggacgcgactggtgggcgtcgctgcttcatgctggagtaccagaaatcatggcgacgcccaccagccacgcccagtctgcgacatatgttttggcacgcctgcaactcacaacaatgcttgtcgcagtcttgggggttgagggatgggcgggtgacgatttctggtaccccagcatgaggaacccgctcatccctcagcccccaagcgagcccagcaaaacaagccaaactgtcacctaagcgccaactacaatgtgcgaactttttaatcccttggcagtcatggcagtttttaccgaagtttcagagtcctccgcgcaagaactgctgacccaactcaagcttggcgagttggtggagctcaaaggcatccaaggcgggattgaaaacaccaattacttcctcaccagcagcaccggccaatacgtgctcacgctgtttgagcgcctcacgcacgcgcaactgccgttttatctgtacctgatgaaacacttggcacaaggcggtattcctgtgccagaccctatgtctaaccaagacggcgacattttgctcaccgttgaaggcaagcctgctgcggtggtcaaccgcctgcgcggcaaaagcgaactggcccccacagttgcacactgcgccgctgtgggtgacatgctggcccgcatgcacttggctggccgcgactacaaccgccaacagcccaacttgcgcggcctgccttggtggaacgagacagtgcctgtggtgctgccgtatttgaacgaatcacaagctgcactcattcaaaccgagctggcctatcaaaaccacactgcagcctcgtcggcctacaccgccctgccccgtggccctgtgcatgccgacttgttccgcgacaacgtgatgtttgatggcacaccagaagcgcccgagctgagtggtttcttcgacttttactttgcaggcgtagacacttggttgtttgatgtggctgtgtgtttgaacgactggtgcatcacccacgccgagggcacgcatgatgcggctaaggcgcaagcgttcatcgacgcttatcaagcagtgcgccccttcacaccggctgagcgccagctgctcaaccccatgttgcgtgcaggcgccttgcgtttttggacgtctcgcctgtgggacttctatctgccacgcgaagccagcatgttgcaaccccacgatccgacacactttgagcgtgtgttgcgccaacgtgtggcacaccctgtcacactctgagctatgaaactcaacgtcgtccccgcaaaaactggctcgctctgggtgcgccaaggcattcgcgctttttggaagcaaccactggcactcaccggtttgttcttcatgttcatggcaagcatgtccatactgtccatcgtgcctgtgttgggtggcttcttagctttgatgttgttaccagcgatgtcgctcggcttgatggccgccacacgcgaagtggagctaggcaagttcccgatgcccttcatcttggccgcaggttttagaacaggccaagaaggcaaacgcaacatgatcgtgttgggcctgatctacgcgttgtgctttgtgggcgtgatgggcttgtccaccttggtcgacggtggtgactttgcgaagttgtatttgatgggtggctcactcgagatggacaccttgatgaagcccgagtttcaaaacgcgatgtggctctcgctcatgttgtatttaccgttgtccattgtgttttggcactcgcctgccctcacacattggaacggcgtacctgtgaccaagagtttgttcttcagcacagtcgcatgcctgagcaactggcgtgcgtttttggtgtttggcttgatgtggtctttcatcttcttgggcaccacgtttggcatcacgctcattggcagcttgatcgacgacgccgactttgctgccatggccctgctgcccaccatgctgatgctggctgcgatgtttttttgctcgacgtactacagcttcgtagactgcttcacgtcggacacgatttacgcctaaaaggcatcgtgcttacacctgtgtgagctttgccacactcagcgccagccacttggtgccgtgacgcgggaagttcacttgcgcacgggcatcgtcacccacgccttcaatgctcaccaccgcaccctcgccaaacttggcgtggaacacctgcacaccgctgcgcacccatgcattcggcccactggtcacaggggctgcacgctgaggcacgggcttgggcgcaacggccgtagctgctccaccaccccatgcgttgttttgccaaccgttgttgttctgccaagcatcacgccgcgttggcatcgcatctgcaaacgctgaacgcgcaggcgtgatccacttcatggtgtgctctggcagctcttcgaagaaacggcttttcaggttgtagcgcgtttggccatgcagcatgcgggtttgcgaatggctgaggtacaaacgcttgcgcgcacgtgtgatggccacatacatgaggcgacgttcttcttcaaggccgtcaaagtcgttcatcgagttttcgtgggggaacaagccctcttccatacctgtgatgaacacgcaatcaaactccaagcctttggatgcatgcaccgtcatcagctgaatcgcgtcttgacccgcttgcgcttggttgtcgcccgactccaacgcagcatgcgtgagaaaggcggccaaaggcgacagggtttcgcccgtgtcggcgttgatcatggtttgcggtgtggctggtgtgttgccacctatagctacaggctcgccatgctcgtcaatgggcaaagccacggcatcgcggccaaagccttcttgcgtgacaaagctctcggcggcgttgaccaattcctgcaagttttctatgcggtcttggccttcgcgttcaccttggtaatgcgtgatgaggcctgagtggtcgagcaacagctcaataatttggcgcaagttttggccttgcgtttgctcacgcagcacatcaatcttggccacaaaggcgctgaggttggcgcctgctttgccagccacggcagccacggcatcgctcatggcgcagcccatggcgcgggatgcgtcttgcagctgctcgatgctgcgtgcaccaatgccacgcggcgggaagttgaccacgcgcatgaagctggtgtcgtcgcgtgggttttctagcaagcgcaaataggccaatgcgtgtttgatttcggcgcgttcgaagaagcgcaaaccgccgtacacacggtaaggcatggcagcgttgaacagcgcggtttcaatcacacggctttgtgcgttgctgcggtagagcacagcaatttcgctgcggtgttgaacgccatttgcgccatcgccattttggccatcgcgcaagagctgcttcatttcttccaccatccattgcgcttccgcaaagtcggtgggcgactcatacacacgcacgggctcgccagcgccctgcgtggtgtgcaggtttttacccaaacggcctttgttgtggctgatgaggtggttggcactgtccaagatgttgctgaagctgcggtagttttgctcgagcttgatttggtgcgtcacgttgtactcgcgcacaaagtcggccatgttgcccacgcgtgcgccacggaaggcgtaaatgctttggtcatcgtcgcccacagccaagatagccccgccgccttggtctacaggccctgcgagttgtttgagccatgcgtattgcagcttgttggtgtcttgaaactcgtctaccaagatgtgttgaaagcggcggcggtagtgttcgcgcagcggatcgttgtcgcgcagcagctcgtatgagcgcagcatgagttctccaaagtccaccacgccttcgcgttggcattgggcttcgtacagctcgtacagctccacgcgtttgcggtcgtcggggtcgcgggccacgacgtctttggggcgtaagccgtcttctttgcaaccggcgatgaagcgcatggtttctttgggtggaaaacgctcgtcatccacattgaactgtttgctcaggcgcttgatggcgctgagctggtcttgggtgtccaagatttgaaaagactggggcaagttggccagtttccagtgcgcgcgcaaaaagcggttgcacagcccgtgaaacgtgcccacccacatgccgcgcacactgactggcagcatggccgacaaacgcgtgagcatttctttggccgccttgttggtaaaggtcacggccaacaaaccgcctggcgacacctgccccgtttgcatgagccacgcaatgcgcgtggtcagcacccgcgtcttacccgaccctgcccccgccaagataagggcatgcgcctgcggcaacgtgactgcggcggcttgctcgttattgaggccttggagcaagggggatgtgtggggggtggaatgcatcgaaagattttaggtttagaatcagccaccgggcccaagattcttgcgctcggtttttttatgtctgctatttgcgcctaaaaaaaccggccaagccaagcgctcaatcttcgaacgttattttctggagcttgggaaatggaaatttttgattacgacaacatcttgttgctgccacgcaagtgccgcgtggaaagccgctctgaatgcgatgcaggtgttgaactcggtggccgcaagtttcgcttgcctgttgtccccgccaatatgaaaaccgtggtggatgaaagcatctgcttgtggatggcgcaaaacaattacttctacgtgatgcaccgcttcgatttggacaatgtccaattcgtgaaagacatgcacgccaagggtgtgtacgcctctatctctttgggcgtcaaaggcccagaccgcgccaccgtggacacgctggctgctgctggcttgacacctgagtacatcaccatcgacatcgcccacggccacgccgacagcgtgcgcgacatgattggctacatcaaggccaagttgcctaagagcttcatcatcgcgggtaacgtggcaacacctgaag

SEQ ID NO: 1841 - DNA, 23042 bp, synthetic construct
  misc_feature 1..23042: note = Synthetic
  source 1..23042: mol_type = other DNA
atcacccaacagacaggtaggtagcagggcgggcaacaagtacaatcgtactttcccgatcctgcattagtacctacgtacctgcctaactgccatctgtcatgaagaccgtcagcaacaccccgcccccatccctggtagcccacagtctgctggaagatgtgctggccattattaccggcaccgtgctggtatcactgggcgtggccctgtttaaccaggcaggcttgctgactggtggaacagccggactggcctttctgcttcattacagcaccgggctatcctttggtctggtgtttttcctcatcaatctgccgttttactggctggcctggcgacgcatgggctggcgtttcacgctcaagacattttgtgcagtagcgctggtatcggtgttttctggcctgcatcccaaactggtgcacctgaccagcatgacggcgcttacaccgttctatgttgcgctgatcggcggcttgatgatgggcgtgggttttattgtgctgttccgccaccaggccagccttggcggcatcaatatcctggccctgtacctgcaagaaaagcgtggcatacgtgccggcaagctgcaaatggcggtggatttttgtatcgtcatggcgtcactggcagtagtgacgccaatggcgctgctggcgtccgtcattggtgcctttgccctgaacctggcaatcagcctgaatcatcgtcctgatcgttatgtagcgatgtaaagctgtcgcgatattgtgtcggcgacaggtgcaggtgcttttgaaaaacccggcgcaaatgatcgtcactggcgaaaccgcaacgggctgcaatggtcttgaccggcatggcctgttccgacacatcggccaacaagcgttgagcaaattccagacgtgcagtttcgataaattctgaagtactggaacccacttcacgctgaaacagtcgggtgaaattgcgcaggctcataccggccatgtcggccagttgcgataccggcaggcgctgatgcaggttggataatatccactgctgcaattcgcggatattggtctgcgcggttttttggctcagcaagtgggtactgaactgcgattgcccaccgggacgtttcaggtagaccaccatgtcactggccacttccagcgccagttcatggccgcaatcatcttcgacaaaggccagggccaggtctatgcctgccgtcacacccgctgatgtccacaggttgccactgcgtatgaagatggcgtcagcatccacctgcactgccgggaaatcatcctgcaactggcgcgccacactccagtgcgtggtggcatgcttgccgtccagcagccctgtcttcgccaggaaaaaagcgccagaacacaaggctgccagacgctggattttgggggcgacatgtgccacccaatcgatgatcgcaccattttcttccagcgcatcgcggatatggcgcgagccgacgatgatcgcgtcatccggcaaagccagcgggttgatggccttggtcgcttccaggcacatcagggtgtctgaacgcaccggcccgatctgggccgcagcaattttgacatcataggcggcgggcttgccctggcgttgcaaatggatattcgcatactcaaacaccgacatcggccctatcgcttccagcgatttgaaaccggggtacacgataatatcgagcctgcggggaaagccacgtttgtctgcgcgtttgtccgtgcgtttatctatgggcttgtctacctgtttagccattttcaatgcctgaccttgtgcataagcaaaagcaggatgatagtccagaagtggtcgccccgtctttttaagccattcttcattcagaatcagccatatagctaaaaaacacccgcaatgtatctgctttctaagacaatcaccgaaccttaacattccataaaggatcagcatgaaaaccaaagccgccatcgcctggaaagcaggtgcacccttgacgatagaagaagtcgatctgcaaggcccgcaagccggtgaagtgctgatcgaggtcaaggccaccggcatttgccataccgattattacaccctctctggtgctgacccggaaggtctgttccctgccattctggggcatgaaggtgcaggcgtgattgtagataccggccccggcgtcagcttgcgcaaaggtgaccatgtcatcccgctgtacacgccagaatgccgccaatgcaagttctgcctgtcacgcaaaaccaatctgtgccaggccatccgttctacccagggacgcgggctgatgccggatgccacatcgcgcttctcgcttgatggcaaaccgctgttccattacatgggtacatcaaccttctccaactacatcgtggtgccggaaattgctgttgccaaagtgcgtgaagatgcccccttcgacaagatttgctatatcggttgcggcgtgactactggcgtgggtgccgtggttttcaccgccaaggtggaagctggcgcgaatgtggtcgtgtttggtctgggcggcataggcctgaacgtgatccaggctgccaaaatggtgggtgccgacaaaatcatcggtgtggacctgaacccggcacgtgaaagcatggcgcgcaaatttggcatgacccacttcatcaatccgtcgcaggtagaaaacgtggtcgaccacatcatccagctgacagacggcggtgctgactattcatttgagtgcataggcaataccaaggtcatgcgtcaggcgctggaatgctgccacaagggctggggcaaatccatcatcatcggtgtggctgaggctggtgcagaaatcagtacccgtccgttccagctggtgacggggcgcgaatggaaaggttctgcctttggtggtgcccgtggccgtactgacgtaccaaaaattgtcgactggtacatggaaggcaaactgaatatcgatgacctgatcacccacagactgccgctggaacgcatcaatgagggctttgacctcatgaaaagcggcgaatccatccgttctgtcgtgctgtattgatgaagccgctcctgcccctgccggatgagataaccctgttaagccagcatgcctgccatgctggtgtgcagcggttttatcagcatgcatccaaagaaattggcttgcctatgcggttttctgtctacctgccaccgcaggcactggcaggcgcgacttgcccggcagtgttttacctcgcagggctgacctgcaccgaggagaccttcatgatcaagggtggcgcgcaggccgttgccgcccgcgaaggcatcatcctcatcacgcctgacaccagcccacgcaacaccaacatccccggcgatagcgacagctgggattttggtgtcgccgccggtttttacctggacgccaccgaaacaccatggagccagcattaccgcatgcacagctatatcgtgcatgaactgcgcaacatcctgcttgatcacttgcccatggacaggcaacaggtaggcatcatgggacattccatgggtggccatggtgcgctcgtgctggccttgcgtcatccggaatattttcacagcgtatctgccttcgcgccgattgctgcccccacccaatgcccctggggcaacaaggctttcagcggatatctggggtcagatacgacaagctggcgcgcctacgacgccacccagctcatgctgaaccagcgccaggccccatttcccaaaggcatcctgatagaccaggggctggacgataaatttctggcagagcaattacaccccgaccagttcgccgctgcctgccagcaaatacaacagccgctgaacctgcgttaccacgctggctatgaccatggctattacttcatcaccagctttattgaagagcatttgctgcatcacaagcagcaattgactgcttaaaggcccaaaagcggccaatgctgtcatacaggcttgttccggttttaatagcacttacgcaaaccagctgcgctgctcatcaaaccaacgtaggtacgattagcgcagcgtaatcgtacgcatgtccatcacggctcgctttcttcaactgctgatttgctgataaaaatacaaaacaatgaattttctcttgtcggatagaagacaagaaaatgtgaaacgtcttggtcattgccagggacaacatacgtacgattacgctgcgctaatcgtacctacattcttcaaggtttgtcatacaggcttgttccagttttaatatgcaccaaactggaacaagcactctatttctgtgcgtttctcgctaagttgtcattaattttgtgtaaaatcgagcgacatcgtcgcgcattttttgcgcatcattcagaacgacataacaagaaagcaagagatgagtaaagtagtcatcagcggcaccggcctgtatacgccatcccagtccatttccaatgaagaactgattgccagcttcaatggttatgtccagcaacacaatgcacaaaacgctgcggccatcgccagcggcgacgtggtggcactggaagaatccagcgttgccttcatagaaaaagcatccggcattaaagcacgttatgtgatgaataaagatggtgtgctggatatcaaccgcatgaccccacgcatcccggaacgtagcgacgatgaaccatccgtcatgtgtgaaatggccgtggcagcagccacccaggcgctggaacgcgcaggccgcaccgccgcagatatcgacggtgtcatttgcgctgccagcaatatgcagcgtggctacccagccatggccgttgaaatccaggcagcgctgggcatagacggttatggttacgacatcaatgttgcctgttcatctgccacgtttggcatacaggctgctgtcacagcgatacaaagcggccaggcgcgcgccatcttggtggttaacccagaaatcaccagcggccacctgaactggcgtgaccgcgacagccacttcatttttggtgatgcctgtaccgccatcatcatagaacgcgctgacctggccacatcgcaacaccagtttgaaattgtcggcctgaaactgaaaacccaattctcgaacaatatccgcaacaacttcggctttttgaatcgcgccgatgaaagcggcataggcaagccagacaaactgttccgccagcaaggccgcaaagtattcaaggatgtctgccccatggccgcttcggtgatcacctcaacggtagaagcatcgggcatcagcatccccgatgtaaaacgcttttggctgcatcaggccaacctcaacatgaacctgttgattgcccgcatgattttgggacgtgacgccacacccgaagaatcgccaaccatactcgatacctacgccaatacgtcgtcagcgggttccatcatcgcctttcacaaataccaggaagacctgacacccggcaccataggcgtgatctgctcgtttggcgcaggttattccataggctgcgtggtcgtcaaaaaattgaactgaactgaattgtccgcacaaaacaaaaggccgcctaatgaaaattaaggcggccttttgcttctctgcatcttggttatatcttagctgcatcaagatctgtcttgatgcaaggtatgcaagttgacttacatccccaaagacttcaacagttcagcattgtcatcttctgatgcagcagccggtgctactgcatctgttttttgactggattgctgcatgtccagcaaggcatccggatcaggcacttcatgtgcatcaaaatcatgcagcttgatgaactctgtcctgtcgatggccagttccaggtaaaagatattattcttttcagtgaagaaggacacgcggcgcagttctggcctgtccagcggggtatccacactcagcatgacctgcttggtcagtaccagcatcttgggctggttctgggtgatattggtttgtagttcacgacgtatcttgccggtgaaatcaccgacgatctgattcatcagttcacccagaatattggcaacttcatccgaagtgaaagacgtggccagctcagacttgggcatacccatgttgagcatgtatttttcgtaaatctcaagcgcggtatcgccatcaaagttcaataccaccaaccctgaaaaaccaccatcaaacagcacgaagcaaccgatgtccggcttcaggcctatcttggtgatgcgctgcaccatggccgaataatgtaccttgctttgtgtcgccacgttcaacacccgtatgaccgagttgcacaaactggtcaacaagtcttccgtaccgtacaccacaccagtttcttccgaggccatggccaactcctaattttttacacaacaatttcaaaaatcacctgcgacaagccaccagcctgtcgcttcattccactacgccatcccctgtccggacagatggtggtgctgcatgcgcacgcccgtgttcatcagaaacagcaagcctgaacaagacaacccggcttagcaggtgagcaactttatctttccataccgggtcttgccgggcatcagcaggcatgacggcagacacatcccgcaagcgcttcacttccgcttccagcgcaagcacccgctgcacagcgacgagcgttgcatcatgaacggcgtgttctgcctgcaagctatcctcctgcgcgtcggttagcgatgtcaaatcggtgatcagcatggtttcatccttagcgtgccagatatgccggcaaaatgaaacggcacatcccccagagggcaggcgacgctgcccataggaataatgcaagaatactgaagcgtagggcctccgtccacttgtttcatgcagtccgcacgatttgtttattcgccagtacagcagggattatagtacgttgcccccatgcaaccaagacaaaagaggaagcatgtgcccgttgcagccattgccgcaacagctgattttgttcttttaacagcgggaaatgacaggggcaagcgaagttccgtcgtaccggaaacccatattttgatatggcccgaaggtagccccattggcagccccattggcaggcatgacacgcaacctggccgaaccgcacccttctgcacggctggcatgcagcctcagcaagctttgtcagtctaagtgatcaagcaaattgctcacacatatatccaaatcaataccaacagcctgcccgcattactagaactcatttcataaataggagtgagtgcgaacaagacgatttgggatgtagtgcaaggcgtgacgcgcagctaaggctggtgccttagcaagcggcacaacgctgcaatacgcccaaatcgtcagttcccgaagggtttgcctcataacgcgtgctggactgcgttggactcgttgtcaataggcccattgccagcccgcgttatgaggcaaacgcatctcgctcctatttatgaaatgagttctagctacctttggcgattgacggcaccagaacagccgacaccatcttgtcttcatgcctgggttggggccacaaacctgccggacgtttcagcatgatagtcaccatggccagacctatcagtagctgacgcaatatttcaggctcgaccagcacctgaccaaacaaatactgctgcaccggcaacacaatataacgtaaaacctctggcaacacggccagtgtcacagcgcccaaaataacaccggggatatgccctatgccgccaataatcaccatcgacaataccgtaatcgactcattgagcgagaacgattctggcgacacaaaaccctggaaagccgcaaacatcgcccctgccacaccgccaaacgacgcccccattgcaaatgccagcagcttgatattgcgggtgttgatacccatcgcctgcgcggcggtttcatcttcgcgtatcgccacaaaagcacgccccaggcgagaatcatgcaaacgtatcgtgacaaaaataattgccacgcataatgccagaaacagaaagtaatacgcattcacagaaggcatggaaaaaccacccacctgcaccgtcgcatgcgatcccacctcaccactgagtgacaccccgaacagacgtacagggtcaatcgcaatgatgccttttggcccatcggtaatattgaccggggcattcaggttgatgataaagatacgcacaatttcaccaaaccccagcgtcaccacagccagataatcaccacgcagttttaaagtaggagcacccagcaacacccccagtgcggcggccagtgcagccgccagcgggacaatcagccacaccgacaaatgtatgccatgcgcagccacatccggcccgcacaaccacaacaaggcattaccgaccaacgggaaagtgttgatgaaagattccagcacatatacaaactgcggcgacgccagcaaggccgtcatataagcacccatcgcataaaaagcgatataccccagatccagcagaccggcaaaaccaaccacgatattcaggcccagtgccagcatcacatacagcaaggcaaaatccatgatacgcacccatgaattgccaaactgcgcagcaaaaaatggaaaggcaatggcaaggcccaatagcaacaaaggagaataagcccggacaaaaccagcctttgccgtgaaataatgattcatggaaggtctacccaccgttggctacgtagaccaccacaggaagatgcaagaaacaagatggcaaacctggctttcatggaaaagtgcatggtgactttcgcgcttgatatttcagactagataaatgccatccatcttaactatcagaccagacagccgctaccataatcttgctcaacccatacctgacaaccttaatagatagccatacgctgacgtgactgagaaggcgtcaatccaaatagcgaccggaaactggacgtaaaatggctgtgactggcaaagccattcgcatgcgcgatggcggcaaagtccagctctgccgactgcattgcctccagcgctttgccaagacgtgtgcgtatcagatagcggtgcacaggcacacccacctgctcccggaatactctggccaaatgaaaaggcgacgtatgcgcatggcgcgccaggctggtcagcgtccagtcctgattggcatgaagagaaatcaattccttcacggtttcaacctgctggcgccggcgcgccatcgtcactgactgtttgccgcgatcagaaagacgaccacgcacactggctgcctgcaacgccccggtcagcatggcgagactgatctcttctaccgccagagagtcaacaacagcctgtcttaaatgtcgccataacagttcacgattcatcacgctggcaggcgaaagcagacaatgcggtgcaagagcagacgaaccaaaatcctcgccagcaacagcctcaaccagcacgcttgccaacacctctttcggaaaatccagcaccagggattcgtccccgacctgatcaagaaaactgatgcgatacggcctgcccgcacccagcaatattccgtgattagggttggcaataaaatgctgcctgggcccatcatgcttggcaaacacccccttgatcggcaacaaaatcaaatccgctgactcgcactcaatattgctcaccccatcaggcgatggccgcgcaatgccatggcgaatggataaaagctcgctgtgaaaaacggtattgagatcaagtagcataggccatcactatcaaaaataatccattcacgatgaccagatgcaccgctctactccccacaatcaagacatcgccattacactaataatccatacattagcttattctttgcgcaattaaatttcttaatttttgtgatggcagaaggatatgcaacgcgcaaaaagcaaaaggccgcatatagcggccttttcatttggtgcatctttcagcttgttagcgttcagagcacatatcccaatctgataatgcttgtatgttatgtcaatattattgtaaagtcaatgtattagtaaaataacatggagcggcacatgcttggaaaaatgatatatcgcctgtccttagacttgggatcaacttccttgggttgggcaatgatacgcctgaacgcacaaaacttgccctgcgccattattaaagcaggagttcgaatattttcaaatggccgaaatccgaaagatggttcttcactcgctgtaactcgtagagaagcgcgtgcaatgcgcagacggcgtgaccgactgcttaaacgtaaagcacgaatgatgcgctcattgattgaacatggttttttcccttctgacgaggaacaaagaaaagcattggaaactctgaacccctatcatttgagaggtaccggcctggatgaagaactgacacccggagagtttggcagagctttgttccacatcaatcaaaggcgtggctttaaaagtaaccgtaaaaccgataaaaaagacaatgatagcggggcattaaaaaccgctattagtaaactacgtactgcgatggtcgaggaaaattgtcgaaccgttggcgaatggctgtacaaacgtgacgcggcagggaaaaccgtccgcgccagatatcgcgaagccaaagtcaccaaagacgatggtaagacacgtcttgataagagctatgatctttacatagacagagcaatgatagaagcagagtttgatgcgctttggaaaaaacaagccgaattcaaacctcacctttacactgaagcagcatatcaagatctcaaagacgttctgctacatcaacgtccactcaaacctgtcaagcctggtcgttgtacttttttacccgatgaagaacgtgcacctctggcactgcctagcacacaaagatttcgcatctatcaggaagtgaataatttgcggatactcagggagtatatgcgcgaggaagcactgactttgacacaaagagatgcactggttaaggcactcgaagaaaacagcaagcgaacatttacccaaataaagaacttgcctggtattggcaacgtcaacttcaattttgaggacccgaaacgccaagaactcaaaggaaatattacgacagtaaaaatgagttccaatgaatgctttggaaaggactggttttcatttagcgaagaaaaacaagatgctatcgtgctgcaattaatcacagaagaaaatcttgcaaagctaatacgatggttgattgaagaaactggaataggcgaagagagagccgaaagcatagcaaatacagctttgccggaagggtatggcagcctttcaataaaagcactggcacgaattctccctgaactaaggcgtgatgtagtcacttatgacaaggcggttatcgctgcgggttttgaacatcacagcaatattagtctctccgcgagtggcgagatttttcctgaactgccgtactacggccaggctttgcaacgccacgtcggatttggaacaggaaaggcggacgacaccgatgaaagacgatatggccgcatcgccaacccaacagtacatataggattaaatcagattcgtctcgtcgtcaacgcactcataaagcaatatggtcatccaagagaggtcatagtcgaagtcgccagagaccttaaacaaagtaaagagcagcgtgacaatgaaagcaagcgtcaggcggaaaatcaaaaacgcaacagtcaaattaaaactgaaattgccggaattttgaacataagtgaagaaagagtaaggcacgctgatattcagaaaatgatactctggaaagaacttagtttcgaccctgccgatagacattgcccctattctggagcaagaatcaatgcgcacacgttacttagtgatgaagttgaagtagagcacatcctgccattttctttgacactggatgatagcctcaacaacaaaacagtagctatgagacaagcaaacagactcaaaggaaatcgcactccatgggatgcattcgggcagaatcagatcgccggatttgaatatgacaacatacttggtagagccgagcagatgcctaaagcaaagcgctatcgctttgcaaaagatggttatgagcgttggttaaaagacgatgcaggtttccttgctcgcgcactaaacgatacgaggtacatgagcagaatagcgcgtgaatacgtgcaattaatttgtccggatacacgcgttattccaggtcagatgacagccatgctaaggaaaaaatttggcttaaataacgtcctaggcttaaacggagaaaagaaccgcaacgaccatcggcaccatgctgtagatgcttgtgtaatagcagtaactgaccaaggcctgctacagcgctttgcacaggccagcgcaagtgcacgcgaacgacaacttaatcggctggttgaggacatgcctttgccatggccttcttattacgaccatgttgtacgagctgtgaataacatttgggttagccacaagcccgatcacagtcatgaaggtgctatgcacaatgacacagcctattcactgctaagcaacggcaaagtaagcgtacataaatttatcgatgggaaacgtacaaaaatcgaagaaagtctgaaagtcattccttttaccagcgtaaaagcattggacagacacggagtactagaaaatggagagccccggccttataagggatacaagggggacagtaactattgcattgagattgtgcgaaatgagaaaggtaaatgggaaagtgaagtaatttcaactttttttgcttatcaaattgtccgctccggaggagtaaagaaattacgaaacccagaaattagcttaagtggacaacctttagtcatgcgactaatgattgacgacaatgtgataatagaaaatggcagcggtaaacaaattcttcgcgttgccaagctgcaaggcgatggtaggacatggttaattgaacatagagaggcaaacgtacgtaagcgcgtggactccggtgaaataaaatacttgggcgcaccagctagcacacttcgcaaactccatgcacgaagaattaccatttcaccaattggtactcttcgtgaccctggattcaaggagtagttaccatgataggccgcattgtagaaatagctgacgaccgcagacatttatttctctctcgcggcttcatggtggtacaagataccgaagggcaacgcaaagaactaggccaggtgcctttagatgacattgctgcagtaattgcgaatgcacatggtctcagttataccaataatcttttaatcgccctggcagaacgctgcgcaccttttgtcctatgcgcagctaatcacaatgctgcaggcatgctattgccaatagaaggcaactaccagcaggccaagcgctttgatgcacaaattgcggcatcgcaacccaccattaagcgattgtgggcggacatcgttaaatccaagttacagcagcaagctgctgcgctagaagcggccagtgcgcctagcattccactttcatctctcgtacgtaaagtgcgctctggtgaccctgataattttgaggcgcaaggtgcaaggcgttattggactctattgtttggcgaaagcttcaggcgcgaccagcaaggcggcggactcaatgccatgctcaactatggctataccgtattacgtgccaccacggcgcgtgctgtggtttctgcagggctacacccaacgcttggattgcatcacagtaatcagggcaacgccatgcgcctggttgatgacttgatggaaccttttcgccccatggtggatttaaaagtgtggcaactacaaaaacagggggaagacatggttacgccagaaaccaaacgtgccttggtccgcaccatgtacgatgatatgcaaaccagtgcaggcgtcacccccatcattgtttgcactcaaaaattggcaacttccttggcccaaatatttattggcgaaaaagaaaaacttgatttgccgctacctggcctccctcttaatctggcttcgtctttgttagacgagtaatatgtcatgcttagcgggtatcgcatcatgtggatgatagtgatgtttgatttaccggtcatagagaaagccgagcgcaaagctgctacggagtttcgcaactcattgctggacatgggttttgagatgtcgcagttttcagtttatatgcgcttttgtactagccaaacgcaagttgagacctattgcaggcgcgttgaacaaaaactgcctagcggcggcaaggtaaatatcctacaatttactgataaacagtacgaacgtatcatcactttccgcggaaaagccaagcaagcagctccaaaaataccggatcagttcgatttattttgatgaatttagccatttttcttgcgtcaaaaaacaataaacccctgaataatcaggggtttattgcatttctagtctaacagattgggatatgtgctctgaccggaactgctggacggttgagcgcaccgatggtaaaagtctaacagattgggatatgtgctctgaccggaacggcgcgaggacggcaggcaacgccgccagcagtctaacagattgggatatgtgctctgaccggaacataagaaggtttctcttgggatgacgaacaagtctaacagattgggatatgtgctctgaccggaacaaaatacggcagcgctcgccatcttggctcagtctaacagattgggatatgtgctctgaccggaacttatgcactatcccaggatgtggcaagtgcagtctaacagattgggatatgtgctctgaccggaactacagaatttgcaacggctttgccgccgtcagtctaacagattgggatatgtgctctgaccggaacttgaccagcggcggcaactactacaactggagtctaacagattgggatatgtgctctgaccggaacttgctcaaaccatttacgcgcttccggctcagtctaacagattgggatatgtgctctgaccggaaccctgtggattaactacagacagagtactgaagtctaacagattgggatatgtgctctgaccggaaccgactaaccccggtactgttaaaaggaaaaagtctaacagattgggatatgtgctctgaccggaacgtaggtgttgctgttatccaccctatcactagtctaacagattgggatatgtgctctgaccggaaccaaactgagcgtgttgcgcatcgacctggcagtctaacagattgggatatgtgctctgaccggaactatgtcgatgtcgatcgcgcagcctggttgagtctaacagattgggatatgtgctctgaccggaacttttgctcgccattctcgtttacgcttgttagtctaacagattgggatatgtgctctgaccggaacgcaaagtttcagtggcatcggtcgcttcgaagtctaacagattgggatatgtgctctgaccggaacacttccataactgactgatgtcatgccgggagtctaacagattgggatatgtgctctgaccggaactgcgtcattggccttgttgatttcttgctgagtctaacagattgggatatgtgctctgaccggaacccatcttcatgccgcgtcacgcaagccgatagtctaacagattgggatatgtgctctgaccggaacattttagcgctggcggcgtgcctggaaggcagtctaacagattgggatatgtgctctgaccggaacacagcgcgctgtgcgcttcgtctttcgtcaagtctaacagattgggatatgtgctctgaccggaacctgactatgatgctggcgtcatctgttcagagtctaacagattgggatatgtgctctgaccggaacggtaacgtgcggcttgtccatgactgtccgagtctaacagattgggatatgtgctctgaccggaacttacatacatgcctttgagaaaaaacgaaaagtctaacagattgggatatgtgctctgaccggaacccaccacctgcatataagctagcgcctggtagtctaacagattgggatatgtgctctgaccggaacgcattcatagcattaatcaaagcctcaaagagtctaacagattgggatatgtgctctgaccggaactgtaaaacttgagttcataaaacaacgtagagtctaacagattgggatatgtgctctgaccggaacgggcggtatgcacaacgatgccattcacgtagtctaacagattgggatatgtgctctgaccggaacgtacagtcaaaactaccgccaggctgaccaagtctaacagattgggatatgtgctctgaccggaacattgaagaccaatgagtgatttgcatacaaagtctaacagattgggatatgtgctctgaccggaactttcagctttagcggccttcctggctggtaagtctaacagattgggatatgtgctctgaccggaacgagttcaaaagcattaaggagacacgtgagagtctaacagattgggatatgtgctctgaccggaacggcgcgatggtgctcatgcaaaattagacgagtctaacagattgggatatgtgctctgaccggaacgttggcagagcaatcgctgctaatggcacgagtctaacagattgggatatgtgctctgaccggaactttattacgtgctatttatacagtcaaacagtctaacagattgggatatgtgctctgaccggaaccttcgcagaccgcaaacaaagcgctggattagtctaacagattgggatatgtgctctgaccggaactggcttcagccagggtgattggctcttcggagtctaacagattgggatatgtgctctgaccggaacagaaccgttctccaggcccatgccgctgatagtctaacagattgggatatgtgctctgaccggaacttcattccgcctcagtccccggtcgtcggcagtctaacagattgggatatgtgctctgaccggaacttattcaatgcgcttgtggccgggatcaagagtctaacagattgggatatgtgctctgaccggaactgtggtgaagagacattgaccgtgaactccagtctaacagattgggatatgtgctctgaccggaactggcgcattgggtttcatagctttctacttagtctaacagattgggatatgtgctctgaccggaacctgagtggtgttggattgatttggttttttagtctaacagattgggatatgtgctctgaccggaaccatgctgaagggttctcacaacgtggtgctagtctaacagattgggatatgtgctctgaccggaacatgccgggctggtttgatgtggtcgcaccaagtctaacagattgggatatgtgctctgaccggaacggtattggtattggccccaccacgccctatagtctaacagattgggatatgtgctctgaccggaacgcacttcattcaacacgatgccgcgtgctgagtctaacagattgggatatgtgctctgaccggaacgcgacagccaaacgggtgccacagcagcgaagtctaacagattgggatatgtgctctgaccggaacgatagtgtctggcgtgtagcagtcagcaagagtctaacagattgggatatgtgctctgaccggaacctgattatggaacatatcgcgcagattattagtctaacagattgggatatgtgctctgaccggaacgccagcgccacgacgtcattgagtacatagagtctaacagattgggatatgtgctctgaccggaacgccaggtgacgtggtgctgttccggtttggagtctaacagattgggatatgtgctctgaccggaactggttctttttccatcagcgcgcgggcagcagtctaacagattgggatatgtgctctgaccggaacggtacagctacccagtaatcgcggaaccggagtctaacagattgggatatgtgctctgaccggaaccgcaagattgaattcagcatcagacttagcagtctaacagattgggatatgtgctctgaccggaaccatacggggtgtatgggaagtcaatggcgaagtctaacagattgggatatgtgctctgaccggaacgtgccaggctatgagcgtgaatactcagccagtctaacagattgggatatgtgctctgaccggaacgcaacagccgcattcgcgccaatctcactaagtctaacagattgggatatgtgctctgaccggaacgaaccaatgtcttacgtttgcgtttcggtaagtctaacagattgggatatgtgctctgaccggaacgtatcagcagcaataccaacaggcatcataagtctaacagattgggatatgtgctctgaccggaacgcatcgtacggcggtgccggttcagtgtcgagtctaacagattgggatatgtgctctgaccggaacaccggttttggtgagcatgcgcaaatggaagtctaacagattgggatatgtgctctgaccggaacttcaggtcgttattcagtgcacgcgctttgtagtctaacagattgggatatgtgctctgaccggaacaggacagcctatcttttgatctgtggttaaagtctaacagattgggatatgtgctctgaccggaactgacgccttccatacctaccgccagccagtagtctaacagattgggatatgtgctctgaccggaacgaagaactgcaacgccttggcgtgccagctagtctaacagattgggatatgtgctctgaccggaacaggtacaagaatcgaatgtttgtcttgcacagtctaacagattgggatatgtgctctgaccggaacgcgccggtcgtcacacccaataaataccagagtctaacagattgggatatgtgctctgaccggaactacgagcgtcagaatcattcatttgacgttagtctaacagattgggatatgtgctctgaccggaacgcatcttctgagatacgcctgtagaggctgagtctaacagattgggatatgtgctctgaccggaacgcaagcgatcaaacagttgcgcacccagttagtctaacagattgggatatgtgctctgaccggaactcagctgaagtattggccatgtttgataaaagtctaacagattgggatatgtgctctgaccggaacagcaaaccggactcaataccatcatcaattagtctaacagattgggatatgtgctctgaccggaactcaatcagaccagcgccgcagccgcattcgagtctaacagattgggatatgtgctctgaccggaacatgccgtcggcacatggatgatgatgcaatagtctaacagattgggatatgtgctctgaccggaaccaagaggcaagcgtaccattggtcgtgaggagtctaacagattgggatatgtgctctgaccggaacagcaacatcacgcttgcgacggcttcctcaagtctaacagattgggatatgtgctctgaccggaacagttgtagaacagttgcctgatgcttttcgagtctaacagattgggatatgtgctctgaccggaacgtaatagccattgcctgccggatcgcctcgagtctaacagattgggatatgtgctctgaccggaacctccgcgcatcaccaatgcgccgatattcgagtctaacagattgggatatgtgctctgaccggaactatcgtaaccttcactgaagcttgttttgtagtctaacagattgggatatgtgctctgaccggaaccagaacagtacacgaagcccaggcccacctagtctaacagattgggatatgtgctctgaccggaacatcgttcgccatgcccaataaatcgcaggaagtctaacagattgggatatgtgctctgaccggcccccccggtccattccccaatcgaagccgaagtctaacagattgggatatgtgctctgaccggaacgtggcacgaccccatagtatcgggctgcgtagtctaacagattgggatatgtgctctgaccggaacgtaaatcgctggctggtgatcgatgccaccagtctaacagattgggatagcgctgctcattccttcaatcaaactgcatcaccgctgcgctcaccctcaggtttttccttaccttggggcgagcgttacccatcctctacatgcgcagagagaaaacttgaactattacaaaaaaccgcttgctttaaggtcaattcagtcaatcccgtcagagattcacaaccccaattgcccaagaatttgctgcgctgctttaatccgcactgcactcggataattcttgttagccaggataacaatccccattttcttttcaggcacaaaggcgatgtatgcgccgaatccgttggtggcgccggtcttgtggatgaatacatttttgcctggaatcattggaggtgtaatttttgtgacgggtgtggcgtcgcgggccatgtggtctgtggagccttcgatgactgcggcgatatctgtcggataggggtatagctcccataccaggctttgggtcatgccgccggctttgaaatagccggtgtgggtgtttttcagggcgagtgtgaattctggtgtcagtttcatttcgccgatatttgccttgataaattgcactaggtcgctggcggtagttttgacgccgtaggcttctgcggacagcacatcttccttcaggcggactggggtgtcatcctgtttgtagccctgcgcatagtctgcccgtttgctgtctggtacgacgatatagctatttttcatatccaaggcggggaagatttgctcttgcatgatggtcacggttggctgttgcaggctctgtgcggcaataacgccgagcagacctatgctgacattgctataggtgcggtactggccctgaggatggtccggtttccagttttttaaataggtgatcagttgttcgttattcgatacgtcatccggcacctgttgcggcaggccgcctgtggtgtgtgtgccgaggctcagcagggtggtttcgccaaagctgctgcctttcaggctgggaagatggtcggcaactgtgtcggtcagtgcgagcttgcccctgccctgtgccagcgtggtcatggttgcgataaaggttttgctgatggagcctatctcaaacagggtggtatcggtgacgggcgtgccgtctgatctggatgccaagccatagttgaatacgtattgcttgccatcgacaaagataccgacggtcatgccggggactgcatgtgctttcatgactggaagtatggcttcatctgtgacgtgcttgatggcgtcagctttcgtatccacgtcggcactcatggctgtaatggtaagcatggagccaatggcaaggatgctgattcttaaaaattgcagtgctatggatttcattttattttccttaaattttgcagagatggtatttaaaagctgctctgttttggttctgttttgatgtagggctgtatttgatcaggtcacaaccgcaattcccacaccacacgccaggtgcgtgcggattgttcgcgtccggcgtctgtccagcgttctgtattttcagtgtagtcaccgctggccaggcggtcttgctgcaagacattggtgactgaaaagcgccactggctttgtttgctttgtttccagctcagataaatatccaggttgcgtttggggccggtgtgggtgctgatgttgtcggattcgcgtatctggtctgccgcctgaaaactgaaatctgcaccggtgcgccaggcagggttgatctggtagtcagccccggtgctgatcaacaggccggtctgatgtgccaggcgattgtttggccccggcacctgatccacgcttgaccagttacggttgagattggcgcgcagttctactggcggcaaagtgggcgacaattcctgcagcttggttttgatttcaacttccagccctatgactttggcacctccgctgttactcatgcttgtgagccaggtcgtgccatttttcgtcagccgttccagcatcacgtcttgtatgcggcgccagtaggtgttgacgctaatgaggctggattcggtcaagtaatgttcataggccacatccaggccccaggcacgttctggccgtagttggggattaccctgaaagtctgcgttcaggggtgtattgttgttgtcgatgcgaaagcgacgcggtatcaggttgaaaacggtgggcagtttgaagctgcggttcagggcaaagcgccattgtcgttttgcatccagtttccacacgctttgcagtatggggctaagcatggtggaccgatttgagaaatcaaattcacctgcctcgcgactattgctggtgatgcgttcccagcgcaaacccagataggcagaccaggcggtattgatggtccattcgtcctgtatgtaggcagccagtttgaccaggcttgcctggtagtgatggctgtctggcgttatgtcgccggttgcgatattgatgtcggcttcatcgcggccttcggtgcgggcgctgcgactgctgtcccatcccaggctgagtacatggttttctgaatacggtgccaggtattttccgctgaagcggtattcgttttcattggcgtcgccggtcacatagcgatgtgtggtctgtacgcctttgctgtcgttgccccagaattgaaatttggcgtcgcggtcaaaatggttccagccccagttgatgtttaatttggcgctgtcggccaggcgatgttcccagttgaggtcattgcggctggtaaggatatgggcagcccagatgctgcggttgtcaggaaaatctgtgctgctgccctccagggtggtttctttttcatgcttggcgttttctggcctggcatagttcaggtacgcttgccagttgaggctgttctgggcatcgattttccagttcaggcgcggtgtcaggctgatggcgtcgcggcggttttgctgtgtttgttgcagttgcctgtctgccagcgtttgccactgtcctgctttggacagtgtgtactggccttcgcgcagtatgccattcacatcgttggtattgctttcgatgctgccggcaaatacgtaattga

SEQ ID NO: 1842 - DNA, 23039 bp, synthetic construct
  misc_feature 1..23039: note = Synthetic
  source 1..23039: mol_type = other DNA
gcgtgctgggcaccccgcccgagaccaccatcgagctgaacctgcgcatccgcaacacggcgctgaccgaattcgtcttcacccccaagcggcacatgctgctgacctacaacaccttgccgcacctggacagcgacgcgcaccaaagctggatcactttcgcctgagccacccattacctcgcgcaaggtcatgcccacaggtacattccctaggcaataccacttcggtttgcaggcaaaatcgaaccatgaacagttcaactgcctggttggccctcaagtcattggagggcggcatccagctcaccaccacacatgccgctgaggcagaccggctgtcaagcgagctgacgtctttgttgaatgaatggggcctggcctcagcggtccaagccttgaccctgcccttgcatggcagacaagttgcactgatctgcacgctgcggcccgacttcagagcgcaatgcatgccgggccacgacactttggccttgcacgaaaaactggggcgccccactcagactgacgaagcatgggccctggagcgagaaatctgggtggccttgctgggttcaccccaccgctttcaatttgccagcctcgactcgctcacctcacacatccgggtgcggcgcaacatggccctggacgcccgaaaaaccgcgctggcgttcaaaaccgatgccgccgaacggcctcaaacctattggcgagacgggggtgacgaggctggtttcattttgcagccaggtcgctgcttggtcgatgcactgatagcggccacccaacccgatgcgacaggcagactctatgatttttcttgttacagggcgaccgagtacgtgattttgttgggcatcgcgcaagagctccaatccgaaaaccccgaactcttggcccagttgcaaagcctcaatgaaatccacgccgtgcgttcaggtcagtttcatgaggtctacctggtcgaatacggcagcattgaagcacccctgccgggacgcttttatgtgccaggcgaccgcttgtggtttcgcaacccggacgagcgctcttccgacgtcaccggctacgaaggctcttgggtcatctacatgggtggcggcttgttcagcaacttctggaagcgcgacacgccctacacgctcgagtccaaagccatcgaaatctttcactggaaagacggcgcatacaccgacgcccaaggtgcgttgcaaatggacgagacggtggtcgaggctctggtggcgcaaaccgaagccaacccttcagcccgagcccaggttttggagcgcatgctgcgcatgcgcgacccgcaaggcgtttatgccgaaggcggctgccttgacaccacccgcgaataccccaaaagcgtgagccgcgggcactgcgagttggtgctgcccaacttctgaagaccggctgttttcagcccaccgaatcgctcagggtgtcgggcggtaaacggtcaatttcacccaacaactgcgccagcgcccggcccgaggcgcccagcaaagcctggcctttttcagccgtagcggccaaggcattgcccgcagcgccgtggcggttgtagtcctgcatttgccagcccagcttggcacttttgccattgcccaaaatttcaaaacgctcggcgcggtcttgcgaggtggagcggaagttctgcgccttgtccatgcgcacagtgcctggccgcagcgccagcatcatcgaggtttcggtgtcacccgcatgcacgccaaaacggtgctcttcagggggaaacagcgcattcacgtccccgccttgtgcatcgtgcaagggcaaattgaaccagctcacgctgtaaaccagcatgcccagccgggcccgccaatcccgcgccacgatgtccatcacgctgacttgtccgccatgggcgttgagcagcaccagcttttttacgccactggccgccaccgattcaccgatgtcagtccacaaacggatcaaggtctcggccttgagcgtcaaggtgcccgcaaaacgcgcgtgctcagggctcaggcccacggcttgggtgggcaaaaacaaagccggcaagtcggcaggcaagtgcggcaagcaagccgccaccacgccattgaccaaatcggtgtccaccgacagcggcaggtgcgggccatgctgctcggtggcggcgacgggcaggacggcgatggcccgatcgatggcccggtctggtactaaggcctgaaaatcgagggtggtccagtcggcccaaaaacgcgaaggattttgcatggggggcatcttaatggagcccgggcgtgtacagtgccttgcgcactgtgatgccggggcaccccgcccgatcgatcaggggtcaaacgaaggattggcgtgcaagtttccgtgttttttcgtggccaggccaccgctttgtccaaatggaaggtgcagggctgggtcgctttgatcgccttggtgtgcctattggctgcgtggcccctgcccagcggggcacaaacgggctcgctcttttccagcaaaaacgccccttccaacttgcccgccaccagcgccttactggcaagcgctgccaacgtggtcaagaccgaccaagtgcgggccgaattgctggtgcacgcccccgagggcattcgcgccgggcaaacgttttggctgggcctgcagatcgagcaccagccgcattggcacacctattggcaaaaccccggcgactcgggcctgcccacgcgactgcaatggcagttgccagccggcttgcaagcgggggacatcgcctggccgctgcccaaaaaaatccccatcggcaccctggccaactatggttacgaaaaccgcttaatgctgaccgtgcccgtgacggtgggggctgacttccgctttccagacggtgggccattgacccttggcttgcaagccgaatggttggtgtgccgccaggaatgcatcccgcaagaaggccgcttcagcttgcagctgacctctgccgcgccgcaaaaacccaacgcggccgggtttgaaacggcgcaaaaactcagcccccaagccctgcctcagctgcagcaaggcggcacctggatcacgggcggccaagccaccttgtccgctgacgccaagcagatcaacctgcgcgtgcatggcctgcctgtgggctggcgtggccagaccttgagcgccttccctgtcacccccaacgtggtgcacaacgcggccgtgcagggcaaagactggacgcaaagctggcaaggcgcggtctggagcgctcagattccggtgtctgaagaacgtggcgacagcccgacatcgatgcgctgggtgatcgcggccgggccggagtctgcaccgaaagccccggcttttgaaatcgaaacgcctgtgcaaggcacttggcccgcgctggcccaagccgcgcccgctgagatttcgcccgcattggcgaaagctctggccgagaacgccagcgccgcacaaaaaccagcggcctccagcaccaccgctttgggcctgacgctggccgttttgggggctttggtgggcgggttcttgctcaacctcatgccttgcgtgttcccggtgctggccatcaaagtcatgggttttgcgcaagctgacacctctcaggcccaacaccgcacggcaggcatggcctacaccgtgggtgtggtgctgtcgttcatgctgctgggtggactgatgctgggcctgcgggctgcgggcgagcaattgggctggggctttcaattgcagtcgccccccgtcgtggcgggcctggcgcttttgttcaccctgctgggcctgaacctggcgggcgtttttgaatttgggcagatgctgcccagcagcctggccacgctgcaaagccgccaccccacggtgaacgccggtttgtcgggcgtgttggccgtggccgtggcctcgccctgcaccgcgcccttcatgggggcatctttgggcctggccgttgcgctgcccgtgtggcaagcgctgctggtgtttgccgccatgggcgtgggcatggctttgccgtatctcgctgccagctggtggccgggcatggcccgcgccctgccgcgccccggggcctggatggcgactttccgccaagccatggcgtttccgatgtttgccaccgtcatttggttgctgtgggtgctgggtcaacaaaccggcatcgacggagcgagcagcctgctggccttgctgctcacggtggcttggctggtgtgggcgctgagcttgagcggtcgcacgcgttgggtattgagcggcttggccctggccgccttgctgtggatgggcagcaactggttgccactggctttgcgtgaagcgccagtggagacgctgaccagcgccagcacccaaggctccagccaaaccacacccggcacctcgtctagcaccaacgcttccacttggcagccttggtctgaagccgcagtacaaacccagctggccgcaggccgtccggtgtttgtggacttcaccgccgcctggtgcgtgacttgccaatacaacaagaaaaccacgctggccgacgcccgtgtactggccgactttgcggcacggcaagtggtgctgatgcgggccgactggacgcggcgcgacccggccatcacgcaagcgctcacggcactgggccgcagcggcgtgccggtctacgcgctgtacgcccccggacgtgcgcccgtgttgctgtcggaattgccttccgtgggcgaggttcaggcggccctgtcatctctgtgaaaagggagaatttttcccctcacacccttggtggcactggcacagaccccatgtcggggctaaagccaccgacctgcgagtctgagccgtgtgttgcccgttgggagggttttgtgggagcttgccctgaaagcgaaaagcctgcggtccacaagattctgatcgccagcagggctagcgcccacaaagtacaagattgaagtcatcctgcaaacttcacagggcatgaacccgatcaaccaccgtgaagtccgcaccagaaggtcacctcgggctccaagcagcccctcactggctgcgacaatcagggcatgagctcattcgcacccctccaaaacgacagcttcttgcgcgcctgcctgcgccaagccactgaccacacccccgtctggctcatgcgccaggccggacgctatttgcccgagtactgcgccacccgcgccaaggccggcagcttcatgggcctggccaccaacgtcgacttcgccaccgaagtcacgctccagccgctggaccgttacccgctggatgcctccatcttgttcagcgacatcctcaccgtgcccgacgccatgggcctgggcttgtcgttcgcccaaggtgaaggcccgcgctttgccaaaaacgtgcgcgacgaagccgccgtggccgaattggccgtacccgacatgaacaagctgcgctatgtgttcgacgcggtcacgtccatccgcaaggcgctgaacggccgcgtgcctttgatcggcttttccggcagcccctggacgctggcttgctacatggttgaaggcgcggggtctgacgattaccgccatgtgaagaccctgatgtacagccgcccagatttgatgcaccgcatcctggaaatcaacgccgatgccgtggccctgtacctgaacacccagatcgaagccggtgcccaagcggtcatggtctttgacagctggggcggcgtgttggccgatggggctttccagcaattcagcttgacctacacggcccgcgtgcttgcccagctcaaaaccgagcacaacggccagcgcatccccagcatcgtcttcaccaaaggcgggggcctgtggctgcccgagatggcgggtctcaactgcgacgtgctgggtctggactggaccatgaacctgggccgcgcccgcgccctcgtgggcggtgaagtcggtggccccggcaaggcgctgcaaggcaacatcgacccgaacattttgtttgcaccccctgcgcagatcgcgaccgaggtgcaccgcgtgctcgacagctttggccagccgcacaccgacaccacacaaaccggccccacccacatcttcaacctgggccacggcatcagccaatacaccccgccagagcatgtgacggcgctggtggaggcggtgcacagccattcacgtcatctgcgaaccaaaggctgaaagcaggcggcggttagcacaaaaaacaagtgccgccgcctgtttttttgcaaaaaaattgccgccaagtgcttgacttatgcacaaattctaaaagtcacacttgtgaaaaagcctgccatcgtcaagccacacagcgcctgcctcgaattcgcaagtcattgatttcattgaactttttaaaattgcccaagagatgtgcaatctggcgaaaggcttgattttcaaggctttccgggcggtcctgatgagttttcaacaaagttatccacagatttcctggatcactttcaaagcactttgaaatcaacaacttacggccgattccaagaatttttctgttccctaaccgccccgattgactgaaaaccccaacatggatgtgagcaagcactactggatcgacgtcgccgtccagaccccggcacacagccagattggagggctgctgagttaccgatgcgcctttgaggtgcagccgggccacttggtgcgggtgcctttgggccagcgcgaactgctgggcgtggtctgggccatctcggacagtgcccccgctggcatgcccgaaaaagccgtgcgcgatgccgccggggtgctggagggactggccccgctggacagcgcctggcggcaattggtgcagttttcagcccagtattaccagcgctcgctgggcgaagtggccttgtccgccctgcccccgcagttgcgcgacctcagctcagagcaactggcccggcgcctgaaaaaacaaaacaccgagcgcacggtgcacacccaaactggccccgccctgtctgaggaacagcaggcggttttggcccaaatgacgtcggcacccggcccctttttgctgtttggcagcaccggcagcggcaagaccgaggtgtatttgcaggccgtggagcgcatgctgcaagccgacccgcaggcccaggccctgctcatggtgcccgagatcaacctcacgccccagctggaagaacgggtgcaagcccgctttggtgcagaggccgtggtctccatgcacagcggcatgacgcccgcacaacgcctcaagggttggctggccgcgcatgcaggccatgcccgcatcgtgctgggcacgcgcatggccatttttgcgtccatgccacacctcaaactcatcgtggtcgacgaagaacacgaccccagctacaagcagcaagaaggcgcgcgctattcggcccgcgatctggcggtgtaccggggcaagctgcaaaacgcccaggtgctgctggcctcggccacgccgtcgctggaaagctggcaccacagccgccccgcagcagagggtgggcgctacctgcgcctgcacatgccctcgcgcattggcaccggcctcttgcccaaggtgcgccgcgtggacatgaaccaccaggccaaaaaagccgtgctctcagccccgctggtggccgccctgcaagaacgcgtggagcgcggcgagcaatgcatgttgctgctcaacaggcgcggctacgccccggtgctgcactgcgccgattgcggctggaaaagcgagtgcaaacattgcagcgcctttcgcgtcttccacaaaattgaccgcacgctgcgctgccaccactgcggcatgaccgaacgcgtgccccgggcctgcccggcatgcggcaatgccgacatcgccccgattggccgcggcaccgaacagcttgaagaacatttgggtgagctgctggcgcatgtcaaacgacctgacggcacgcccatccgcattgcccgcatcgatgccgacaccacgcgcctcaaaggcgcactcgaaagccagctggcccaggtgcattcgggcgaggtggacatcctggtcggcacccagatgattgccaaggggcacgatttcagacgcatcaccctggtggccgccatcaacccggacacggcgctgttttccagcgactttcgggcacccgagcggctgtttgccctgctcatgcaggccgcaggccgggccggacgagacgcccgccaaagcgccagcagcgagatgtgggtgcaaaccttccaccccacgcatccgctgtttgaagccctcaaaaagcacgattaccccgcatttgccgccagcgaattggccgagcgcaccgcagccgacctgccccccatcagccaccaggcgctgctgcgcgccgacgcccgaagccaggacgtggcccagggcctgctgaacgccgcgcgcgaaaccctggaagcccagctcagcgccgaccccgccacggccgagctggtgatgcaagtgagcctgtaccccgccgtgcccatgagcatgcagcgcgtggccgatgtggagcgcgcccagatgctgcttgaaagcccccaccgcatggccctgcaaaaagtgctctggcatctgcacggcgtgctgcaccagttgcgcagcgcccctgaacacaagggcgtgatccgatggctggtggacgtggacccgcaggcgatttgaggcgggctgttgtcatggcgcgcatgtcggactcttcgagtgccgacctacaccagcgcctcatgtcgtcggcacttgcagagtccgacatcattcacggcaccctcaaggcttgagcaaagccaccgcgcctgagaaggtcaaaaatgcggccgaggtggtcaccataatgatgcgggctatgcgcccattgtcggcacccagacgttcggccagcagagacacattgctggcactgggcagcgcggccaccaacaccatcacctgcaaggcaaagggctcaatcggcacaccccactggatggccgtcaagccgaccatcaacaccagcaccgggtgcagcaccagcttgatcagcgcaatcggcaggtaatcggcgctgcgcaaaggcccatcagggcgctcgtgcgccagcatttgcgagcgggccagcaccgcaccgatggtgaacagcgccacaggcgaagccgcatcggccagcaggctcacggtcttgttcaccggaccgatcaattccaggttccagaatgaaaacgccgcgcccaggctgatggcccagggcatggggttgcgcagcaccccggccagcgccttgcgggcggccactgccgcgccgtgctgcccggccgcgtccatgcgcgacaaagccacgcacagcgacgaggtgatcaccagatcgaccacgatggtcacaatggccggacccaccgcctgcgccccgagcaaggccaccagcaagggcacccccatgaagccggtattgggaaaggccgccaccagcgcccccaaagacgcgtcgttccagcggatgcgcgcattcaggctgatggcaatgctgaacgccacaaccaccaaggcgcacaacaaatacgtgaaaaacactccggcatcgagcaactgcgcaatcggcgtgtcggctccaaagcggaacaacatgcacggcagcgcaaaaaacagcacaaagccattcaggcccggaatggcctccaggggcaagaaccgcaaccgagccgccgcatacccacacaagaccaaggcaaagaaggggaaggtgacacgcaatatttcaagcatgcgcggattgtcggggtaagagcgagggtcggcgggtcacggggccgacaaattggacgagacaggccagctcgagaagccttgaaaacttgacgcgccctgtacgagtggtttcctcgatgcgcttgcaaaagacgaaaggccgcatgtagcggcctttccatttggtgcatctttcggcttgttagcgtccagagcgcatttcccaatcgacgaaatgagttttgaatatagcacaatagttacaaataattggattattgaattggaactgagacatggcaaacatgcgctaccgactggcccttgatttgggctccacatccctgggctgggccatggtgcggctcgatgcccaaaacgaaacctgcgccgtgatcaaagcgggcgtgcgcattttcagtgacgggcgcaaccccaaagacggctcgtccttggcggtcagccgccgtgaagcccgcgccatgcgccgccgccgcgaccgcctgctcaagcgcaaaacccggatgatggccaccttgatgaagcacggcttttttccacaagacgaagcggcccgtcaggccttggtcaacaaagaaccgtttgcattgcgggccaaaggcctagaccacgctttgctgcccgaagagtttgcccgtgcgctgtttcacatcaaccagcgtcggggtttcaagagcaaccgcaaaaccgacaaaaaagaaaccgacagcagcgcactgaaaaaagccattgggcaattgcgtgaggccatgcaagcctcaggctgtcggacggtgggcgaatggctatgtgcccgtcaccagcagggcctgtcggtgcgggcgcgctaccgcgaaaaccgcatcaccaaagacgacggcaaaaccaaaatagaaaaaagctacgacctctacattgaccgcgccatgatcgaggccgagtttgatgctttgtgggccaagcaaagcgaactcaaccccgagctgttccatgagaccgcccgagcagaactgaaagactgcctgctgcaccagcgcccgctcaagcccgtcaagccgggccgctgcaccttgctgcccgacgaagaacgtgccccactggccctgcccagccagcaacgttttcgcatctaccaagaagtgaataacttgcgcctgttgcgcgagggtctgaacgaagagcctcttacgctgacgcagcgcgaccaactgatccaagcgcttgaaaccaaccccaaacgcagcttcacgcagattcaaaaactgctcgggttctctggccagttcaacctgcaagacgacaagcgcaccgaactcaaaggcaacagcaccagcgccatgctgtcgaagaaagaattttttggcagccaatggctcagctttgacgagacccaccaggatgagatcgtcatgcagttggtgtccgaagaaaacgaagcccgattgatcgcttggctgcaagccgaaaccggtgtggacgagatcactgccgaacgcatcgccaacacgccattggccgaaggctatggcagcttgagtgccaaggcgcttgaaaaaatcctgccagccttgcgcgctgacgtcatcacttatgacaaagccgtgctggcggctggctttgaccaccacagccacatcagccatgccgccacaggcgaaatcctgcccgatctgccctattacggccaatacctccagcgccatgtcggctttggcactggcaagcccgaagacccggctgaaaagcgttacggcaagatagccaaccccactgtgcacattggcctgaaccaggtgcgcaccgtggtcaacgcgctgatcaagcgctacggccaccccagcgaagtggtggtggagctggcccgcgacctcaagcaaagccaggagcagcgcaaagaggaacaagcgcagcaagccaaaaaccagcgccgcaacgaacgcatgcgccaagacattgcgggcttgctcaacaccagcaccgaacgcgtgcgtgcactcgatctgcaaaaaatgatcctctgggaagaactcagcttcaacgtcgccgaccgccgctgcccctacagcggcgtgcaaatcagcgcccaaatgctgttcagcgaccaagtagagatcgaacacatcctgccgttttcgcaaacgctggacgacagcctcaacaacaaaaccgtggccatgcgccaggccaaccgcatcaaaggcaaccgtacacctgccgaggcggccgccgactttgcggcccaaggctggccggtggaggacatgctgcaccgcgccagcctcatgcccaaaggcaagcgctaccgatttgcacaagacggcatggcgcaatggctgcgcgaagacaaaggctttttggcccgcgcactcaacgacacccggcacctgagccgtgtggcgcgggaatacctgagcctggtttgcccgcagggcacccgcgtgatccccggacgcatgaccgccatgctgcgggccaagttcgggttgaacgacatcctgggcctgaacggcgagaaaaaccgcaacgaccaccgccaccacgcggtggacgcctgcgtgatcgccgtgaccgaccaaagcatgttgcaaaagtttgccaaagccagtgccagcgcccgagaaaagcaactcaacaaactggtggagtccatgccgctgccctgggacagttaccgtgaccatgtgcaacgcgccgtcgagcgcatttgggtgagccacaagccggaccatgggcacgaaggggcgatgcacaacgacaccgcctacggcctcttgggcggtggtcatgtgcaggtgcgcaagcgcatggatggcgtgcgcactcgcgaaacagcggcgctcaaagtgatcgaatttgctgacaggcaagcccacccccgacacggcttgctgcccaatggcgagcccatgccctacaaaggctacaagggcgacagcaactactgcatggaaattgtgcgcaacgacaaaggcaagtgggaaggggaagtggtctccacgtttgaggcctaccaactggtgcgccagcatgggctggctcggctgcggcatccagcgctgagcgtgagtggcaggccgttggtgatgcgattgctgcgcaatgacaccctcagagtgatacacaacggtgagcaaagaactgttcgaatttgcaagatgacggccgagggagtcattgcgcttgccgacacaacagaatcaaatgtagatgcgagaactcgaacaaaggatctttcgtacatttttaagactgcgggttcacttcaaaagtcaaaaggacgacgtgtcgccatttcaccttcgggtgaaatgaaagatccaggcttctttgactgacccatagaagtatctagatggatacaatcaacccattccgccttgccgaaactgccgtcttcagtcgctggctgggtggtttgaaagaccatcgcgccaaagccgccatcgtttttcgcctccgtcaggtggcggcagggcactggggtgatgtcaaaagcgtgggcggtggcgtgtctgaactgcgttggcacatcggccccggctatcgggtctacttcacccgccgcggccagcagattgtgttgctgctcgcagggggtgataaatccagccagacccaagacatcgccaaagcccagaaacttgccaaggagcatcccaatgagcaaaaccactgaatttgacccggccagttacctggacagcgaagaggtgattgccgaatacctcaaccttgccctggccagcggcgacaccgacttgctgctggccgccatcggtgacgtggccaaagcccgtggaatggcccaaattgcacgcgataccgggctgggccgtgaaagcctctacaaagccctgagtgccggtgccaaaccccgctttgacaccgtattcaaagttttgcaggccctgggcgtgcaaatgcaggcgcaccctgtgccgcagcagccctgacctgcagcgtgcaccatgctgggccgcatcgtcgaagtctccaacgacaagcggcacttgtcggtttaccggggtttcatgctggtgcacagcacaggcgaagaccggcaagaagtggggcgtgtgccgcttgatgacatcgccgccctgatcgccaacgcgcacggactgagttacaccaacaacctcttggtggcgctggccgaaaggggtgccccctttgtgctgtgcgcggccaaccacaacgtggtgggcatgctctggcccatggaggggcaccaccagcaggcccatcggttcgaagcacaaattgcctgcaaagcgcccctgcgcaaacagttgtgggccgccatcgtcaaggccaagctgctcaaccaagcggcggtgttgcaagccatgggcgccacgcccgcgcccgtgcaggcactggccaagcaagtgcgcagcggtgaccccgacaacctggaagcccaaggtgcgcgcaaatactggggcttgctcatgggccctttgtttcgccgtgaccagcaagccgacggagccaacgccttgctcaactacggctacaccgttttgcgtgcggccactgcgcgtgcagtggtggctgctggcttgcaccccagcttgggtttgcaccacagccacgacaacaacgccatgcggctggtggacgacctgatggagccgtttcgcccggtgatcgatctgaccgtctggcagatgcagtttctggggccttgccatgtcaacgccgacaccaagcgcactttggtgcaatgcctttaccaagacctggccaccgacgcgggccgtacccccgttttggtcgcagtgcaaaaactggccacctcgctggcgcaagtcttgctgggtgagcgcaaaacccttgacttgcctgtgccgggtgtgcccctgcccaaggcatcagacccggatgattgaaaccccatgctcagcggataccgattgatgtggatgctggtgatgtttgacttgcccgtggtcgaagccgcagagcgtgccgcagctaatcgtttcaggctgagtttgctggacatggggttttcgcgggcacagctcagtgtctacatgcggttttgcaccagccatgcgcaggtgcaaacctactgcaaacaagtggaagctgctttacccaaaggtggccaggtcaatgtcttgcaactgaccgacaaacagtacgaacggatcatcagttttcagggcaggcgcaaagagcccgctaaaaaaacacccgatcagttcgatttgtttgggtagaacggcaattttgaagagactgaaatccaagaaagtctttgtgaaacaaggacttatcctggatcaagtctagtcgattgggaaatgcgctctgaccggaacatgttggcttggtctttggcctcagcaatcagtctagtcgattgggaaatgcgctctgaccggaactcgatgatggtggtgaatgcactgccccagagtctagtcgattgggaaatgcgctctgaccggaactctgatgaagggtgccccgtgtcgctggacagtctagtcgattgggaaatgcgctctgaccggaactgttgttccttagccagccgattgacctgcagtctagtcgattgggaaatgcgctctgaccggaactagtggtcggcaatcccgtgatgacgtttgagtctagtcgattgggaaatgcgctctgaccggaactgtcacgcgaaacggcatcacgctggcctcagtctagtcgattgggaaatgcgctctgaccggaacttgtttcgctgcactgcgatgacgggtaagagtctagtcgattgggaaatgcgctctgaccggaactctggcgcggtggggctgggtgcggtggctagtctagtcgattgggaaatgcgctctgaccggaactagttgccgctggcagggtctgtggtgccgagtctagtcgattgggaaatgcgctctgaccggaacagcatctgggtcagtgaccttgagcgagccagtctagtcgattgggaaatgcgctctgaccggaactcacgacgtgctcagcgtcatcgaagtcttagtctagtcgattgggaaatgcgctctgaccggaactgtatatagccgccatttccgaattgcttaagtctagtcgattgggaaatgcgctctgaccggaactcacgacgtgctcagcgtcatcgaagtcttagtctagtcgattgggaaatgcgctctgaccggaaccagttggaatagttgtcagacacgtagctgagtctagtcgattgggaaatgcgctctgaccggaacgtcttcaatccactcagccacggcggcttgagtctagtcgattgggaaatgcgctctgaccgaaattcagcttgaccgcatgaactagtctattgaactggtctataatcactttcccacttctccggaaaccgttcaccatgacgatccaaaccataggcgcttatgaggccaagacccacttgccgcagtttttgcgtcaggtgcaggccgggcaaacatttgacatctcggtgcggggtgtgaccgtcgcacggttaacgcccgtcgatgcgccggaccaacaacgcgccgaggcggtggccaaaatgcgcgcgttcacccgccagcaacaggacagtggtgcaggcaccgatttggatttggcctcactgattggcgaaggccgagcatgagcttcgtgctcgacaactcggtggccatgctgtggttgctgccccaaagcaaccctgcaggccttgaattggcgcagcaagtgctggaccgcttgcaagacactggggcccaggtgccttcactttggcacttggaggcggccaatgtgatggccaaaaccctgcgtctgggcaagatcacccaagcccaagcctcgacgtttgtggctttgctcgaagcattggacattggcaccgatggcgaaaccagccttcgggccttgcacgacaccctcgatttggcccgccgctacaacctgagcgcctacgatgcggcttacttggaactggccctgagaaaaggcctgccactggccaccttggacatgcaactgtgtgcggcggcacagcaagctggcgtccctctcctgtgctgatctgaccgcacttaaccactcgatagccatgtctgccggactcaacaaagcccaactcgaagccgtgaactacgtctctggcccttgcctggtgttggccggggcgggttcgggcaaaacgcgggtgatcacgcacaaaattgggcgcctgatcgatgccgggctggagcccaagcgcattgcggccatcaccttcaccaacaaggcagccgctgaaatgcgcgagcgcgccaaagagctgattggccgcccggccaaggatgtgacggtctgcaccttccacgcgcttggcgtgcgcatcatgcgcgaggacgggcaggtgctgggcctcaaaccacagttcagcatcatggatgcggacgatgtgaccagcatcttgaaggactgcggcggcaccaccgatgcggccactgcacggcagtggcaatggaccatcagcctctggaaaaacatgggcctgaacgcggagcaggccgcagcgcaagcgcccgacgacaacgcccgagtgatcgcccgcatcatggccatgtatgaagagcgtttgctcgcctaccaaagtgtggactttgacgacctgatcggcatgccactcaaactgctggccgagtttcccgaggtgcgcgagcgctggcaggccaagatgggccatgtgctggtggacgaataccaagacaccaacgccacccaatacgaggtgctcaagcacctggtgggcgagcgcggccgcttcacggcggtgggcgacgatgaccagtcgatttatggttggcgcggcgcgacgctggacaacctcaagcgtttgccggtggattttccgcagctcaaagtgatcaagctggagcaaaactaccgctccaccagcgccatcttgcgggcggccaacaatgtgatccagcccaaccccaagctgtttcccaaaaccctgttttcggaattgggtgaaggcgagccagtgcgcgtggtggacgccgtgaacgaagaacacgaagcggatcgggccattgcccgcatccagtcgatacgcggcggtcaggtcaacccgtctaagcaccgcgagttcaaggactttgccatcctctaccgcgccaaccacatggcccgaccgtttgagcaggcactgcgccgcgccaacattccctacaaggtgtcgggcgggcagagcttttttgacaaggccgaaatcaaggacctgtgcgcctggtttcgcctgtggatcaacaacgacgacgacccggcgtttttgcgttccatcaccagccccaaacgcggcattggccatcagaccttgggccagctgggcacctttgccacgcaatacaaactcagcctgttcgaggcgctgtttgcaggcagtctgcccagcgcagtgaatgcacgcgcggtggcgggactgcacgaatttggccgctacatcaatgacctggagcaccgcgcccgcctcaccttgggcaaaacggatgcactggcctttttgctcgaatggctcaaagagatcggctacgagcagcacctgtacgacggcgaggacaacgagaaagtggccgcagctcgctggaccaatgtgctggagttttgcgactggatggccgggcgctgcggcggcgagatcgaagacgccacgggtgcccaggccaaagaagtcaaaaacctgctggatgtggcgcagaccatctcgctgatctccaccttgagcgagcgcgagaaagaccagaacgtggtcaccctgtcaaccctgcacgcctccaagggcctggagtggccgcatgtgacgctggtgggcgtgaacgagggcctgctgcccttcaagctgggagacgacgacgaacattccggcaaggccgatggcccgatgagcgaaggcattttgctgcgcctgcaggaggagcgccgcctgatgtacgtgggcatcacccgcgcccagcgcagcctggccgtgagctggaccaagcggcgcaaaaaaggccgcgaaatggtggccgcactgcccagccgcttcattgccgaaatgaagctcgatgaaaacaccgtgcgcgaagacccccgcgaaaagctcaaggccctgcgcgccgaatttgccaaaagggccgccgatgcggccgcagaggccaagccatgaccctgtttcagaccgtccaaatcagcgccaccctgagtgccttgttttgcgcaggcgtcagcctggcggcgtccccttgccccgaaccacgcgccctgcaagccgaacacctgcacgggcaatggactgctcaggtcacagggcagccgcgcatctggtttttgcaattggggccacaccctgaacacacaggcagcttgcgcggcgaaatcaacaccggcagccaacgcttgcccgtggtggccgacttggacgacggcgacttcaccctcgaagaatcacaggacggccagcgcatctcggccacctggctgggcacagtccaagcaggcagctgcggccaaagcctgtccgggcaacgtcaaacggcacagggcgaagccacaccctttgtgatgcggcgcaatcagccgcgttgatgacgattgatacggccccgtgatgtttgattttttgtactgctggatgtcgagtttggggaagatgggtgggagcttgccctgcaagcgaatagcctgcgggccaccagcgtttgatcgccagcagggctggctcctacggtgcgctcctttggcacacacagtgcagacttcatcaggccgaatggatcggcaaacgcctctgtaaacggcagccctttacgcatcaaatgtcttgcacccaagaattggacacgatgcttcactacaattttgcaattgcgcaccctgcatgtgcgaatacccccccggagacccctgaccatggacgattacgccagtcggcaaagacagcccaccaagcacctgctgggtctgggactggtgctggtgctgcacttgctgctgttttgggccatcaatacaggcttggcccagtcatttgtgaagaaaatcaaagggcctgtgcaagccattttgctggaagaaaccaagccggacattcctccgccaccgccgcccccaccagcgcccccaccggcagcgccgccccaaaatttacccccgcctacacctcaggcctatgtgccacccgcagatgtgcccctggtcaatgccgcgcctgcggccaacgccattgcagccgtgtcggccacaccccagccgcccgcaccaccggccccgagtgcgcctgcggtcacgtcagcccctgtgcgcacatcggctgtggtcaattcggccaactgcgaaaaacccgattaccccagcgcctcgcgccgcatggaagaagaaggcactgtgagcctgcgctttctggtgggggtcgacggcaaagtggtgcagtcagaaatcgaaaaatcttcgggcttcaagcgcctggatgaagccgcgcgtgccggcttgtccaagtgcgctttcaaaccagccaccgtagacggcaagcccgagcaggcctgggccagcatgaaatacacctggcgcctggaatgaccccccaaaggccccagccgcatcacttgttcaaacctatttcccaggagcaaagcaatatgttcaaacgactcaaacaatttctctggtgcgcgggtcttgtagccagcgtgctgactgctgatctgagcctggccgctaaacctaaagaggcgtctgccgctgccccggccgccagcaccgcaccagccgacatggccccggctgcggccacaacggtgccgcccatcacgcccactgaatctgtcgttgaagaaaacccttacggcctagccgccttgtgggcgcaaggcgactttgtggccaaaagcacgctgctgatcctggtgatcatgagcatgggttcctggtatgtcatcttcaccaagttcgccgagcagtccaaactccacaagcaagcggctgcagcccaacaaacgttctggagcgccagcaccgtggcccaaggcaaggacaccttggcaccagactcggcgtttcgcttcattgcagaaaaaggcctggaaggcgcgtccaagcacacgggtttgctcggcgcagtcgacctcaacgagtggatcaccatgagcatccaacgcgccatgggccatgtgcaaaaccgcatgcaagatggtctggcggtgctggccacggtggggtcgaccgcacctttcgtaggcctgtttggcaccgtgtggggcatctaccacgcgctggtcaaaatcggcatgtcgggtcaggcgtcgatcgacaaggtcgcaggccccgtgggtgaagccctgatcatgaccgccatcggcttggccgtggccgtgcctgcggtgctgggttacaacttcctggtacgccgcaacaaggccgtgatggaacaagtcaacgcctttggcgctgacttgcacgctgtgctgctcggctcggccaagaagtaaatcccatcgctttggcagtggcagcaccggccaaggaatcacaggagaagccaacatggccatgaacgtaggcgaaaccgatgacgagatcatcagcaccatcaacaccaccccactggtggacgtgatgttggtgctgctcatcatctttttgatcacgatccccgtggtgaccacctccatcaaggtggacttgcccaaagaacagaacgtggtgcgcgagaccaagcccgaaaacgtgatcatctcggtggacaagacaggaggcatctacctctacgacaccaagatcaagaacagcacggacttgttcgaacgcatgagaaagttctcggccatgaagcctcaacccgaagtgcagatccggggcgacggccaaagtgatttcgagtcggtgggccgggtgatgtacgcggtgcaacgcgcaggcatcaccaaggtcggcttcatcaccgagccgtctggccactgacaggagcaagacatggcaatgaaggtaggaacgagttccagcgacgagccggaagtcatgatcgacatgaacaccacgccgctgattgacgtgatgctggtgctgctgatcatgttgatcatcaccatcccggcgcagttgcactcggtgaatctggacatgccagtgcccacgaatgcgcccaagaaggtcgacccagtggtgatcaagatcgatgtggacgcgggcagcgtgatccactggaacggaaaaccattgaccagtcgtgcagagctgcaagccaagttgactgaagcagccgcgcagcaacctcaaccggagctgcacatccgctcacacgccaaggcgaaatacgaagccactgccgccgtgatggccaacgcacagcgcatcgggctgagcaagctgggcatcgtggggactgagcagtttgcgaactgacaggcacaatccacgcacaacaaaaaagccgcatgaagcggcttttttgtgggtggaaaattgaccgcagatcagtcggcgtatttacccgctgcgtccaccgcagccttgatcttgatcatctcggcggccacaaacttcttgtgctcagccgggtcggaacgcttgtccgtcaccaccaaagcgcccaagctttcgttcttcttgatgaattcaggatctttcagggcttttttcagggcatcgttcagcgttttggtgatcgctgcgggcgtgcctttgggggcgtacaaaccgtgccaaatggtcagatcgaagttcttcatgcccatctcttgcaagctggggtagtacttgagcacagggtgagtggacaaaggcttggcggtggtgacagcaaaagccttgacacgaccgccttcaatctggctggtggtgttggtggtctggtcgcacatcacatcgacctggccgccgatcagggcggtcatggcgggggcggtgccgccaaacggtatggtggtcatcgcgtctttggactgcaggttggactgccacagcaggccgcaaatgtgtgaagcggaccccaaaccagcgtgcgcaatgttcagcttgcccgcgttggcgcggatgtagttttcaaagtcgcggtaggtgttggcgggcagctggggcttgccgatcagggtcatgggcacgtcgttgatcatgcccaggaactcgaagtcttccagcgttttgtaaccgagcttgcggtaaagcgcgggggtcgcagccatgccaatgtggtgcaacaacacggtgtgaccatcgggtgcggctttggccactttggtggcaccaatggtgccgcccgcgccagcagcgttttcaaccacaaaattgctgcccggaatttgcttgcgcatggcttcagccaag

SEQ ID NO: 1843 - DNA, 23025 bp, synthetic construct
  misc_feature 1..23025: note = Synthetic
  source 1..23025: mol_type = other DNA
cgcatgacggttgaaacgggcatggccttgttggcgcaactgggcattgatatgccgctgcccaaaaaatgcatcgtaccgaaacccggcgcgggcgcttgggtcgaggcgcagtttccggcgttgaagcatggttgctggatcggcctcggcatcagcagcggcaacaagctcaaggagctgggcaaggaaaagctgctggatctgatatcccgactgctagcgctggcgcccggcattcaggttgcactggtcggagcgccatcggatagcccgcttgccagcgaattgctggcagagttgtcggccgtatcacaagccgcgaacgcctccggcaatcgcgtgctcgacaccaccggccgggttccgcttgagcgactggccgcgttggtagacaggttccggctttacgtcggcgtcgattcgggcattacctatcttgccgacgcacgcggcattcccgtcattgacatcatggggcccgccgacccgcaagaccagcgcccgacaggcgcgcaagtcatcctccttcgccgcgacctgccctgcgcaccgtgctcacacgcttttcacgcgccatatacttgcgccaagggtacacgcgcctgcattctggagatagacaaccataccgtcaccgccgctatacgaaaggaactttttgatgaaactcgctgtttttagcgaccatggtattgggcgttatttcgcccagttgtttgacaatattccagaagctacttttttatctgagagagcaagcacgcattatgatgcccgcaaaaatagcgaagcattaagatcgtgtttattcacggtacacaaacaaactgtcggttgctaaggccataccgtgaaccgtcgtgattttttattgacacgccgtgacggcatcttttacggcgtcatcctttcactggtcttcgtctggtctgtgcctgggaccatcgcgctcagatatggcctgctgctcatcacgctggtaatggtgacatacaggattttcagcccccacaacggcgcgccagacaaagtacattgggatcttccacgcacacctctcatcgcactcaccgtattttccatttggctgctagttcaggcgttattcatttcccaggagacgaaatgggcactttctgaactcaaagggcagcttctgctcccactgatcgccggcgttattggcattctgggcgcacgcatcgacaagggcgcttccggcgagaacggctcattcctgtggtccggcatcgtactggtctttgcgctgcaatcggccattgccatcggccaatcagtctggcactggatcgagcacggcagcctgctgcgacatatcgtgccattaaccggcaccaagctggaattgagcttcatcgtaaacatcatgctcgccatcatcgccattgatcttttttttcgcaccaccacaggacaacgcttcctgcgtctatcggtaagtatcatgcttgcctgcctggcgcttggcgtcggcgccaattacacggccagcgcgcgcaatggcatgatcggcatggtattgctcgccttgacaacggttgcgctgtttctgttcagggcgcgcgtgcaactcgggctgcacaaagtcctgggaatcgccgcagcggtcattgtcagcatggggatattcgcaaccgccagctacaaagctgacccgcgttggcaggtgtttgccgaaacggcacgtatcgccatcgacattgacacgcatcggtcgtggtacgccccggatatttatcccctaccattacttgccaacggccagcctgttgacgaatcggcctatcagagaatcgcctggttgcgctctagcgcgcgcattgccacggcagtgccgttgggcgtcggttacggccgcaacgcctatcgtcgggcgcttgtgcgcatgggctacgaagcgcacctggggcattcacacagcgggttcgttgatctccttgccgggggtggcattcccgccgtgatcctgtggctggtttttttcggtgcgctgttcgtaaccggttggcgcgctttcatccgctgtaacctcccggccggcttattgttggcgatcctggttgctggattcgccagccgcatggtacttgaaagcatcggccgcgatcacatgctgcaaatcttctttttcttaaacggcgcactgcttaccgccattgcgcataatgcgggtcgcgacctacacatggcaccctcaccagcagcctctgatcaaggcgcctgaccactatcgacgccggcatttttctacgcacactccacgccgtaagccaagcgcactacagttttgcgtcggccctttgtacataccacggcattgccagcgcaattccgtcggcaagccgatgtgtcggggcataaccgagtaaacgctgcgctttgccgatgtcggcaagactgtgacgcacatcgcccgcacggaagtcgcggtattcgggcatcgaagaagacaccacgccaagtctggcaagattctcgcgcaataggccgaacaaggcgttgagcgtcgtgcgctctccaacggcaacgttatatacctgattcagtgcctcggcctgcttcgtagtcgccgccaacagattggcttgcacgacattagcgataaagcagaagtcgcggctggtttcgccgtcaccattgataaacacggtttcgtcgtgcacaagcgcggccgcccatttgggaataaccgccgcataggcgccatcagggtcctgacgcgggccaaagacgttgaaataacgcaggccaattgtctgcatcccataggcacgcgcaaaaacgtctgcatacaactcattgacgtacttggtcaccgcgtagggactcagcggcttgccaattttgtcctcgacctttggcaaacccgggtgatcgccatacgtgctgctactggctgcataggtaaaactggcaacctttgcgtcgcgcgcggcaacgagcatattgaggaagccggaaatattgaccgcgttggtcgtcacgggatcggccaggctacggggaacgctgcccaacgccgcctggtgcaagacatgatcgacgccagcgcatacgtcgcggcaaatatcagggttgcggatatctccctcgacgaaccggaagtttacccaacgatcctcgccaaccagcctgcgcacctcgtcaagattgcgcgcgaacccggtagaaaaattatccagcccgacaaccttctgattaagcatcagcaaggtttccagcaggttgctaccgataaagccggcgacgccggtgaccagccagacttctggaaacgcggacaggcgggttttcaattcgctaaaagcatggggctcaggcatcatcatggcaatctttacggggattgaaaggcggttacaggcgcagatccgatgcgtctggcgggagcaaatacttcaggtcatagagcacatggttttcccgccccagttgccgaatcgcggctgcccccatttccacaaactgatggtgcgcgacggccagcacgatggcgtcaaacacgcccgcttcaggctcggcaaccatctcgataccgtattcgcggcgcgcctcctcgggagaaacccagggatcgtaaacctccacccggcagccgtattcacgcagatcattgacgatgtcgacaacgcgggtattgcgcaaatccgggcagttttccttgaacgtcagccccatgatcaaaatgcgcgcgccattgacctggatacgtcggcagaccatggccttgaccagttgcgcgacgacatacgcgcccatgccatcgttcaggcgacgcccggcaaggatgatttcggggtgatagccaatgctttgcgccttgtgcgtcaggtaatagggatcgacgccaatgcaatggccacccaccaagccggggcgaaatggcagaaaattccatttgctgcccgccgccaacaacacggcctcggtgtcgatgcccatccggttgaaaatcaaggccagctcattaaccagtgcgatattcaggtcgcgctgggtgttttcgatgactttggccgcctcggccaccttgatgctgggtgcgggatgcgtgccaacggaaataatctcgttatacagagcgtcaacctgcgcggcaatttccggcgtcgaccccgaagtcactttacgaatcgttgtcagccgatgcgccttgtcgcccggattgatccgctccggactatagccgacaaagaaatcccgattgaatttcaagccagacaccttttccagaacgggcacgcagtcctcttcggtacatcccggatagaccgtcgattcgtagataacgatgtctcccgccttgaggaccgaaccaacaatttcactggcccgcagcagtggcgtcagatcaggccgcttgtggcagtcaatcggcgtcggcacggtgacgataaagcagttgcacgcgcgcaattcatcgacctgcgtcgtaaaactcaggcccttggcagcggcaagcgcgtcctccgccgtttccagcgtatggtcatggccggcgctcagttccgcgatccgtgatttgctgatatcgaatccgacaacacgccgcgttttgccaaactcgacggccagcggcaaaccgacgtagcccagtccgataactgccagtttgatttcagaaggtttcattcgctcgttcgcgtccgattatggttccatgttcaagacatcgccgcatatccgcgcagagtccaggattttgtgcggaacgcatcaagatggcgagccatccatgcaaaaaatatgggctgaattttacagacatccatgatgggcagccatagtgacgaggcctttgctccgctttgcccatgccgatccggctgcaaacaaggcgtatgggcttgccggaaattccggcgcgctttgccatttatctctgacgatgaatggcaagcaacagacggcaaagcttatttaatagggcggaacctgcatggattacaaatttcatcggctgtagaatccgcccatgctcaaagacgccattcctctcgaccagatacggcgcgccctcgtcatcaagctacgccaccacggcgacgtactgctcagctcgcccgtcctttcggtattgaaatctcatgtcccgcacgcggaaattgatgcgctggtctacgccgaaacggcggaaatgctttccttgcatccggctctcgcccaattgcacgtcattgaccggaactggaaaaaactcggcgcgttgcagtatctggctgccgaatggcgtttactgaaagccctgcgcgatcgccattacgacctcatcgttcatctcaccgaccacccgcgcggcgcctggatcacatatatgtgcaatgcacgctgggcggtgacgcgacgcattggtggacgcgggcgctggtggcgaaaagccttcagtcacacgtatccgacgccggcaaatgcccggcgccacaccgttgagcagcatctcgacgctttgcgccgcatcggtatccaacccacgccgcaagagcggcgtcttgtcctggttcccggccatgcggcggaagcgcgcgtcaccacgctgctgacagaggccgggctgaacgagcggcctttcattcacatccacccggcttcgcgctggtttttcaaatgttgggacagccaccgaatggcgcacttgatcaatcgtcttcaggcgggcggccataccgtcgtcttgacggccgcgcccgacacgacagagcgcaaaatgatcgatgagatccagtcgaaaacccgtacgccggccgtcagttttgccggacagctttcgctcaaggagctggcagccttgaccgcgcgcgcgcgactcttcattggcgtcgactccgcgccaatgcatattgccgcggccatgaacacgccggttgttgcactatttggcccatccggcgataaggaatgggggccttgggatgggcctctgggttcgtcgcaccgtatcgtcaccagcctcgcccacccctgccgcccctgtggcatggacggctgcgcgggcagcaaaatcagcgactgcctcgcttctttgccgcttgaaccagtatggcacgccgtccaggaactgttggcccaatgaatctgcaaacacattcccaaacgcagccgctgcgcatcgcctttatccgtcagctctacaacccatacggcggcgcagagcgcttcatcgaacgggcgctcggcaaactcgtgcgcaaaggcgccgaaatcacgctgatcacgcgcaactgggatggcgccccgcctcaagactaccggcaaatcatttgcgacccgcactattcgcgccatttcggcggccgttccgcgcgtgaccgcagtttcgccgccagcgcacaacgcgcgatgcgtgaaggcaattacgacatcacgcaagcgcacgagcgtattcccggatgcatgattttccgcgccggcgacggcgtacatgccgcctggctggatcatcgcggccgcaaccagtcgccgctggcgcgcatggcaacacgcatctccgctttccaccgcttcattctccaccaagaagcggccatgcttgccgcgcccgaactgcgcgcggtcatttgcaattcagacatggtgcgtgaagagatgcgccgttattatgccgtgccggatgaaaagctcgtcgtcattgaaaacggcgtggatctcgatcattttcatcccgcgctggccgatgaatggcggacacgccagcgtcaggcgctcggcatcgacgccgacgtgccggtgtttctctatgtcggcggcggcttcatgcgcaaaggcgtgccgcaactcattgccgcgctggcccgctgtacaagccggcatggccgcaacagccgcctggttattgtcggcgaagaccggcatctgaagacctatcaacgacaagcggaaaaagcagggctatcggcgcgcgtgttatttaccgggccgcgacgcgacgtacacgcgctctatggcatggccgacgcctttgttttgcctacgcgctatgaccccatgccgaatgccgcgctcgaagccctggcctgcggtctgccggtgctgacctcgcccacctgcggcatcgcctcacgaatcgtcgaaggcgaaaacgggtttgtcgtcgatgccctggatgtcgacacgttggcgcggcgcatcgacacgctggccgcgcctggcaaagccgagaggatgcgcgcggcggcgcgcgcctcggtcattgacctcgatctcgacactctggccgggaaactgcttagcctctatgaacgcctgcgctagaattcggcgatttcacccccattgcacacaaactcccgggctttgatgacctatgaaaatcaccctgattggcgccggttatgtcggcctcgtcaccggaacctgcctcgccgaagtcggcaacaacgtgctgtgcctcgacgttgacccgcacaagatcaccacgctcaaatccggcggcatccccatctacgaaccggggctggaagacatggtgcgccgtaacgtcgctgccggacggctggatttcactacggatatcgccgccgccgtgcagtttggcgacatccagttcatcgccgtcggaacgccgccggatgaggacggctcggccgatttgcaatacgtcctcgaggctgcacgcaacatcgggcggcatatgaacggcttcaagctggtcgtcgacaaatccacggtgcccgtcggcaccgccgaccgcgtgcgcgccaccatcgcagaaatactggcttctcgcgggctggaggtcgatttctgcgtcgcttccaatccggaatttctcaaggaaggcgcggccatcaacgatttcatgagtcctgaccgcatcgtcatcggcacggacagcgagcgcgccacgcaattgctgcgccgcctctatgcgccgtttcagcgcaaccacgagcggctggtcgtgatggatgtgcgttcggccgagctgaccaaatatgcggccaacgccatgctggcaacgcgtatttcattcatgaacgaactggccttgctcgccgaaaaactgggggccgacatcgaacgggtccgtcagggaatcggctccgacccgcgcatcggctaccactttctctacgccggctgcggctacggcggttcctgctttcccaaggacgtacaggcgctgcgccgcacggcacgggagtacggcgcgccgctgcgcatcctcgacgccgtcgaggccgccaacgaagcgcaaaaacggatactggtcgaaaagctcaaatcccgcttcggcgcgcagctcgacggccgccgctttgcgctctggggactggctttcaagcccaataccgacgatatgcgcgaagcgccaagccgcatgatcatggaagcgctctgggcgatgggcgctacagtcgccgcctacgacccggtagccatgcccgaaacacggcgtctttacggcgagcgtcccgacctgatgctggcatcgcacccgatggacgcgctgcggggcgccgatgcgctgcttatcgtcaccgaatggaaagccttccgcagccccgatttcgcggcgatgaaagccttgctcagacaaccggtgatttttgacggccgcaacctctacgacccggcggcgatgcgccgcgaaggtttcgaatacttcccgatcgggcggcaagcatgaaagtcctcgtcaccggcgttgccggcttcatcggcatgcacgttgcacagcgcctgctcgcccgcggcgatgaagtggtcggtctcgataacctcaacgactattacgacccgcagctcaaacaggcgcggcttgatgcgctggcgcaaaatacggcgcgcgccgcctttcgttttgaaaaactcgatctgggcgacaccgccggcatcatggcgctgttcgccgcccggcgcttcgagcgcgtcatccacctcgcggcgcaggccggcgtgcgctattcactgatcaatccgcatgcctacgcgcacagcaatctggccggtttcctcaacatcctcgaagcctgccggcaatacggcatcgaacacctcgtttatgccagcagttccagcgtgtacggcgccaatgccaaaacccccttttcggtccatgatgccgtcgatcacccggtcagtctttatgccgccacaaaaaaagccaacgagctgatggcgcacagctacagccacctctacggcctgcccaccaccggtttgcgctactttaccgtctatggcccgtggggacgcccggacatgtcgccctggctgttttccgacgccatccttgccggcaggcccatccagattttcaaccacggcaaaatgcgccgcgatttcacctacatcgacgatatcgccgaaggcaccatccgcgtcatggacgccatcgcccagcccgaccccggcttcgatgcggaacaccccgacccgagccgaagccgcgcgccctaccggatttacaacatcggcaaccaccagccggtcgagctgatgagcttcatcgaaaccctcgaaaacgcactgggtaaaaccgcacgcaaagaattcctgcccatgcaggccggcgacgtgctggagacctatgccgacaccgaggatctgcgccgcgacatcgacttcgcaccgcgcaccccgctggctgagggacttgcccgctgggcggattggttccgcacctacatccacccttgacaaatccgattcatacgaaagtttgctgcggttttacgccattctttctagaaatcacgtatcggataagcactgaaaaactgccgtcaaaaaatgaaagccggatccccttacgggttaccagctttccattttttgcatctagcttaaaagcaatctgcttgttagcggctagagcacatttcccagtgaaatagtaatttcgattatatcatgctgcgccaaccggaacatccacgtaaaactcctgccaatagtaggatgtaatatatttatccatctgcccgccattctaggctgttttcagggaagcgtgttcttcctttttattttttgcatggatctgcaaaaaatagagcatagtttcatgtcaaaacaaaactacctcatgcgttataggttagccatcgatttgggaacgacatcgttgggatggtccattcttcatttgaatcaacaggatgcgccaacagccatcattaaggcaggcgtacgcatcttcagcgatggacgcaacccgaaagatggctcttcgctagccgtgactcgccgcgctgcacgcgccatgcgtcgtcggcgcgaccgcctgctcaagcgcaaggcccgtatgttgaacatgctcatcaagcatggcttcttcccgcaagatgcagctgcgcgcaaggcgctcgaatcgctcaacccctaccagctacgcgccaaggggctggacaaagcactgacaccaggcgagtttgcccgcgctctttttcacatcaatcagcgccgcggcttcaagagcaatcgcaagaccgacaaaaaagacaatgaaggcggtgcgctcaaaaccgctatcaaccagttgcgccaacaactgcaagatgagaacgcccgcactgtaggtgagtggttatggcggcgcttgcaagccggacaaggcacccgcgcccgctaccatgaaacacgctttaccaccgaagagggaaagaacaagatcgacaaaagctacgatctttacgttgatcgccagatggtggccgatgagttcgatgcgctatgggctgcacaagctgcctttaacccctcgctgttccacgagcaggcgcgtgccgaattgcgcgatacattgctgcaccagcgcccgctgcgcccggtcaaaccggggcgctgtactctgctaccagaagaagaacgcgccccgctggcgctgcccagcacccagcgttttcgcattttgcaagaagtaaatcacctgcgcatcttgcacccggatttgcacgaggagccactgacacttgcacaacgcgatgccatcgtgaatatgctggagagcaaaaccaaagtcacattcgccgccatgcgcaaaaaactcaagctgggcgattcggtgcaattcaatctggaaaacgccaaacgcgctgaactcaagggcaatgccaccacggcggtgctgtcgaaaaaagagttttttggcaccgcatggcaaaactttgacgaaaccttgcaagacgaaattgtgctgcgcctggtcacagaagaaagcgaagccgccttggtgcaatggctgatcgaaaacaccggcgtggatgaagatcgcgctaccgctattgccagcaccagcctgccagaaggctacggcagcctaagccgcaaggcactggcgcgcatcgtgcctgcgctgcgcgccgaggtcatcacgtacgacaaagccgtacaagccgccggctttgcccaccacagtgatttggggtttgactttgagcatggcgatgatgaggtggagcaaattggcgaacgcgtcatcgcttctacaggcgaaatcaaacctgtgcttgctttcaaacaactgccttattacggcaaagctcttcagcgccatgtggcctttggcagcggcaacccaaaagaccctgaggaaaaacgctacggaaaaatcgccaaccccacggtgcatatcggcctgaaccaggtgtgcaaagtcgtcaatgcgctgatgagccgctatggtcggccaaccgagatcgtggtggagctagcgcgtgacttgaagcaaagccgcgaacaaaagcaggaaacgcagcgcaaacaagcagaaaaccaaaaacgcaatgcgcgcattcgccaagaaattgcctcgctgctcggatgcagcgaagagcgcgtgaagcatgccgacatccagaagtggatcttgtgggaagagctgagttttgatgtagcagaccgccgctgcccttacagcggcgtgcaaatcagcgcagccatgctgctgtcagaccaagtggaaatcgagcacattctgcccttttcgcaaacgctggatgacagcctgaacaacaaaaccgtttccatgcggcaagccaaccgtatcaaaggcaaccgcgcgccttggcaagcccgtgaggactttgaaacacagggctgggcttatgacagcattttgctacgcgccgatcgcatgcccaaggccaaacgctatcgcttcgcgcccgatggctacgaacgctggctgaaagaggacaaggactttctggcccgtgcattgaacgacacgcgctacctctcgcgcatcgccaaagcttatatgcagttggtgtgtccgcaaggcacacgcgtcatccctggacaaatgacggcattgctgcgcgccaaattcggtttgaacgacatattggggctggatggcgagaaaaaccgcaacgatcatcgccaccatgccgtggatgcctgcgtgattggcgttaccgatcaaggcatgttgcaacgctttgtgcaggccagcgccgcagcacgccagcaaggtctgcaaaaactcgttgacgatatgcctctaccctggcccacttatcgcacgcatgtagaacgcgctgtgcaaaacatctgggtcagccacaagcctgatcatgggcatgaaggcggcatgatggaagacactgcccacggcatcagcaaagaaggcgccatccgaccgagccgcctaagtaagaaagacgaagtcaaaaacctcattcctattagcgatcctacgcaacccaagcgtcatggcgtggatgccgatggccagcccttgccgtacaaaggctatatcggcggcagcaactattgcatcgaaatcacgcgcaatgacaaaggcaaatgggagggcgaagtgatatcgactttccgcgcttatcagatcgtgcgcaagcatggcgtggcacgcttgcggcatccaggactggctcaaaacgaaaaaacgctagtgatgcgcttgatgattgacgactccgtgcgcctggagttggatgggcagaaagagacaatgcgcgtcgtgaatatcggtagcaatggacaagtcttcatggcaccagtgcacgaagccaatgtggatgcccgcaatcgcgataaggcaaatccgttttcctatacatcgaaatacgcaggatcactgcaaaaagccaaagcccgccgcgtcaccatttcacccattggtgaactacgcgaccacggcttcaagaactgagcaaggggcgcagcatgatcggtcgcattgtcgaaatcgcagacgaccggcggcacctcttcgtcaaccgtggcttcatggtcgtgcgcgatacagaaggcgagcgcaaggaactgggccaggtgccactggacgacattgccgccgtcatcgccaacgcacatggcatcacttataccaacaatctgttggtggcactggctgagcgcggcgcgccctttgtactctgcgccgccaaccacaacgccgtaggcatgctgctcacactcgatggccaccacgttcaggccaaacgcatcgaagcacaaatcgcggccagcttacctactcacaaacgcttgtgggccgccatcgtcaagtccaaactggagcagcaagccgccgcactggaggccacgggcgcgcctacggcgcccctgaccgcactggtgcgcaaggtcagaagcggcgatccggaaaacatcgaaggccaaggtgcacgtcgctattggggtttattgtttggcagcgattttcggcgtgatcaagatggcagcggcatcaatgccctgctgaattacggttacaccatcatccgttcggccactgcgcgcgccgtggtggctgctggtctacatcccagcattggcctgcaccacagcaacgatggcaacgccatgcgtctggtcgatgatttgatggaaccctttcgccccatcatcgacttgaaagtgtggcaactgcaacgcgcgggcgaaagccacataacatccgataccaaacgcgccctggtacgcacactgtatgacgacatgcaaagcatcgcaggtgccacgcccgtcatggtttgcatgcaaaaactggctgtttcgctggcgcaggtttacttgggcgaacgagacaagttggaactgcccttgcctagcctgcccttggcgctgatcaacagccttgatcgcgactagacggtgcttgagtacatgccatgctttcgggatacagactcatgtggatgctggtgatgttcgatctgcccgtgttggaaaaagccgaacgcaaggccgctaccgactttcgcaaggccctgctcgacatgggcttcgagatgagccagctcagcgtctacatgcgtttttgcaccagccagacccagcttgacacatacgccaaatacgttgaggctgtactaccgcccggtggtaaagtgaacgtgatgcagttcaccgacaagcagtacgaacgcatcatcaccttccacggcaagtccaagcaacccgccctgaaaacacccgaccaattcgatcttttttaaggaaaaccatgctttttcttgagcccagaaacggaaaaccccttgaagatcaatggggtaccgcaatgcgattttatatcactgggaaatgagctctagccggaactcacctcgaaattcagaatcgcaggcatacattttatatcactgggaaatgagctctagccggaactattcgtaggtctgtccgctttgcctgctgattttatatcactgggaaatgagctctagccggaacatgacgccggagtggaaggttaaaagcaaaattttatatcactgggaaatgagctctagccggaacagtatatttgctctaatgcaggaatctccggattttatatcactgggaaatgagctctagccggaactcaacagctgacgatatgccgtcgatggccattttatatcactgggaaatgagctctagccggaaggggcaatacttccgttgcgtatcaacagcagaatccagaatctacgcgcaaataacggaaactggcggtggttcggcgccggcggggtgtttatagcggttgtagccccacaggtattgctgcgggcattggcgaatcagcgcttcgatttcgtggttgatctgctgggcgcgttccacgatatcaccactgatcggctgcgtcggcgcttgcagatggaaatggtagcccgccccgcccggcaggcgttccgcccagaccatgatcaccgccgcgccgctctccgtcagccgtgccgccagcgtcatcgtgtaagccggcttgccgaaatagtcgagccagcgtccctcgcccttcttgggcgcctggtcaggcagcagccccaccgcctcgccctttttcaacgccttgagcagcgtgcgcacacctgccaggtcggcggcggcaatatgcaactgcgcgcgctggcgcccggtttcgatcaatgactgcatccaggcgcgcttgggcggacgatagagaacagtgatcggcgcttgcgtcgacagatattgcgcggtgatttcaaagcaacccaaatgcggcgtcagatagacgatgcccttgccggcgcgcacggccgcttcgacatgcgcccagccggaaatgcggacaacgcgggcagccgcttcctccaagggacgcagccagattttaggcagttcaatgaactgccgcccggcgtgggcgatggcggcgttgcggatgcgccgcgcacccgcttcacccagcgccaaaaccatgttctcgcgcatatgccgccggtaggttggcgaacccatccagaccagccagcccagcgccgcgcccaggacgtgcagccaggccagcggcaggcggctaagaaagcggaaaaatgcaatcatgcgatgacttatgctttatcgattcagggaaatttgacggagggagctttctttctataattatcgcatccgccgagttaatgaggacaacttgcagggcggacacaagaaaagtgccacgagtcgtcataaagcatgtttcgcgctcgccggccgcttgtgaaaatactgctaaagcgtcgtctgctcaaaccccggagccggccacgcagcctgaccggggtttttatttggagcagaaacaagatgtcacgcgaatttcttttcacttcggaatcagtgtccgaaggccatcctgataaagtcgccgaccagatttcggacaccgtgctcgacgcagtgctggccgaagatccccacggccgcgtcgcctgcgaaacgctggtgtctactggcctcgtcgtcatctccggcgaaatcaccaccaaggcgcacatcaactaccgcgagatcgcgcaaaacaccatacgccgcatcggctacaacgactcggacatcggctttgattacaagagctgcgccatcctgacggcgatcaaccgccagtcgccggatatcgcgcagggtgtcaacgagggcgaaggcattgacctcgaccagggtgcgggcgaccaagggctgatgttcggctatgcctgcaacgaaacgccggcgctgatgccgctgccgatctactatgcgcaccgcatcatgcagcggcaggccgaagtccggcgcgacgggcgcctgccctggctgcgccccgatgccaagagccagctcaccgtccgctacgtggacggcaagccagtcgagatcgacgccatcgtcgtctccacccagcacaatccggacgtctcgcatgcacaactgtccgaagcggtcatcgaggaaattatcaagccggtgctgcccaaggaactgctcggcggcaacatccgctacctgatcaacccgaccgggcgcttcgtcgtcggcggcccgcacggcgactgcggcctgaccgggcgcaaaatcatcgtcgacacctatggcggcaccgcgcggcacggcggcggcgccttctccggcaaagacccgtccaaggtcgaccggtcggccgcctacgccgcccggcacgtggccaagaacatcgtcgccgccggcctggctgaccgctgcgaagttcagatcgcctacgccattggtgtcgccaagccggtgtcgttgatggtcgacaccttcggcacgggcaagattcccgaggagaaaattgtcaagctgatcgaaaagcatttcgacctgcgtccaaaaggcatcatccagacgctcaacctgctgcgcccgatctacacaaagaccgcggcctacggccattttggccgcgacgaaccggaattcacctgggaagcgctcgacaaggttcaggcactgaaggcagacgccgggcgataagccccctcccaaggctcgcaacagcccagcaaagcgccggctccccgccggcgtttttattgcccggcgttttttattgcccgacgctttggccgccgccactgcctgatgccgccgcgccggcgcattacggatgcgttccccatcagccatcccgcccaggatgccgcaacgcaccacggcgcaggccaggtaaatcaagggctagcgcggccctgtagcccgcgtggattgggcgtttgcgggcagcgccctttagactcccgtccatacggacgaccgcgtacagtgcgaaaagtccgcagcgaacacggcaaggccgggcgagttcatgttatggggcaagcgcggttatcgactataatccgccctatccgaggagcgctgcaaaactgccggcagaccttgcaaatcctgcaaagcccacagtttcaggctcggaatcaccaacggcgctcacctgaccaacccgcgccggcgcgggtaccgtggaacgggtggcgggtgacaaggcagccgccgccaaacgatggcgccgacccgcaacagccattctccgccgttttcctcattctgcgctccgcgccggccactgttccaaggagaactgctgtggcacgctttaccgactacaccgtcgccgacctgtcgctggccgactgggggcgcaaggaaatccgcatcgccgaaaccgaaatgccggggctgatggccatccgcgaagaatacgcggccagccagccgctgcgcggcgcgcgcatcgccggctcgctgcacatgacaatccagaccgccgtgctgatcgagacgctgactgcgctgggcgcgcaagtccgctgggcttcatgcaacattttctcgacgcaggatcacgctgccgccgccattgctgcgagcggcgtgcccgttttcgccatcaagggcgaaacgctcgccgattattgggaatacacgcaccgcatttttgaatggtcggacggcacgcccgccaacatgatcctcgatgatggcggcgacgcaacgctgctgctgcatctgggcgcacgcgcggaacaggatatttctgtgctcgcccatcccgaatcggaagaagaaaccgttctctttgccgcgatcaaggcgcatctggcgaccgacccggcctggtattcgagccgcctggcgcacatccgcggcgtgaccgaggaaacgacgaccggcgtacaccgcctctaccagatgcacgcgcgcggcgatctgaagattccggccatcaacgtcaatgactcggtgaccaaatcgaagttcgacaacctctacggctgccgcgaatcgctggttgacggcatcaagcgcgcaaccgatgtgatggtcgccggcaagatcgccgtcgtctgcggttatggcgatgtcggcaaaggctgctcgcaggcgctacgcgcgctttcggcgcaggtctggatcacggaaatcgacccgatctgcgcgctgcaggcggcgatggaaggctaccgcgtcgtgaccatggaacaagccgcgccacttgcggacatctttgtcaccaccaccggcaactatcacgtcatcacccacgaccacatggcggcgatgaaggatcaggccatcgtctgcaatatcggccacttcgacaacgagatcgacgtcgcttcgctggccaactatcagtgggaagaaatcaagccgcaggtcgaccatgtcatctttccgccgatgaacggcaagcctgagaagcgcatcatcctgctggccaagggacggctggtcaatctgggctgcgccaccggccatcccagctacgtcatgtcctcatccttcgccaatcagacgatcgcgcagatcgaactgtttacgcgcacgcaggattatccggtcggcgtctatacgctgcccaagcagctcgacgaaaaggtcgcccgtctgcaactgaaaaaatttgacgcgccgctcaccgtcctgaccgcacagcaggccgcctacatcggcgtgccggtcgaaggcccgtacaagacggaacattaccgctactaggcaatctcagcgaaagtaagccgatcaaccataaaccatggcggtttaactttgccaaaagacaaggcaaaccaacgccgtattttggcaaaggaagccgccataaccgaaaggagtgtgtgccatgcgtcttattctgctctggatactcaacgccgttgccctgctcgccgtcgcctacctgatgccatcgatcaggatcggatcgttcagcgcagccatgctggccgcactccttctcggcttggtcaatgccgtcatccgcccgctgctggtcgttctcaccctgcccgtcacgctgctgacgctcggcctgttcatcttcgtcatcaacgggctgatgttctggctggccggctccattttccagggcttcacggtcaacggcttctggccggcggtcttcggctccatcatctacagcatcgtctcctgggtgctgaccggcgccctgctcggcagccgctgatttttccccgactcctctgactctcccgatccacatcacgcccatgcaactttccatcgaatttttccctccgcaaaccggcgagggacttgaaaaactgcgcgtcgtgcggagccaactggcggcgctccagcccgatttcttctccgtcaccttcggcgccggcggctcgacgcgcgaacgcaccttcgccgtctgccgggacattgccgaagctggccagcccgttgccccgcatctttcctgcatcggctcgacgcgcgaaaacatccgcgaaatcctcgccgattaccaggcgcgcggcatccgccgcctcgtcgcactgcgcggcgacctgccctccggcatggccgaagccggggaattccgctacgccagcgaactcgtcgaattcatccgcgccgaaaccggcgacaccttccgcctcgccgtcgccgcctacccggaatggcacccacaggcgcgctccccgcgcgaggacctcgacgcctttgcccgcaaagccaaagccggcgccaatctggcgatcacccaatatttctataacgccgacgcctatttccacttcgtcgacgaaattcgcgcgcgcggcgtcgacatccccgtcatccccggcatcatgccgatcgtcagcttcttcaagctggcgcgcttttccgacgcctgcggcgccgaactgccgcgctggatgcggcggaccttcgaaagcctcggcgacgacacggcgtccattcgcgcattcggcctcgacctcgtcacccgcctgtgcgaacgcctgctcgccggcggcgcccccggcctgcacttctactcgatgaaccaggccgaactcaccctggaaatctgccggcggctcgggcggggataacaacccaagtcaggccagggcgcacccatcgcgggcagcgggaaacgggaaacgggaaacgggaaacgggtagaataccctttacaatcaatggtctgtagccctagagtactgggcatgtgcgggccgtttgccctgaacggcgcatggttgctgggttgtaaaacagggcgcggcggacatcaatccgcccatcgttgatcgcaatcccaaaatagcctgcccggaagcccgtgtatttagggcgtttgcggataggtgccgctacagcccgcgtcaacactgggctggcgggcaggcatcgctacatcgccctattcatgcgggtttcagggcagcctacccggagatcctttatccacgcgggttccagaggcgtgccccgaaagcttaatagcggctggactttgcctgtaaaaaaacggttaccctcagcccttcaggcactacctctttaaaagggggcgcgagaagcagacaaacattttggcagatggaaccgccatgttcagagcgggcactggattaggcagatagattcccggcataatcgccccatgctcattcttcctgttagccgtggcctggattggcgcattccgccgctggtcacgctgcttctaattctggtcaacacactgatttatttcggcgcgcagcacgatgagaatacgcgcgcgttacgcgcttactactattacgcagagtcaacgttgccgcagatcgaattgccgcgctacgtcaaacatctcgaagcgcacgggcacgtgcgcgaggccatagacgccgaacaggcgcttgcccaaatggaccaaaacgacaagtggtttccggtgctccagaaaatggaaacggacgaggtcttcatgcagcagttgcgcgcagacaaaatcatcacccccagcgaggtcaaatacgccgaatggcgggaagcacgcaacgaatacgagcggcggcaaaacaagcgccccccactgaccgaccgcttcggctttaaaaccgccgcgcccacgttggcgtcgctattcgggcacatgttcctgcacggcgatttctcccacctgctcggcaacatggcgattctgttcatcatcggctgcctggtcgaaaagacgctgggctggcgacgttatctctgtttctacctgttgtctggcctgggtgcagtggcttttttctggctgttcagcagtgcgaacatgaatacggtcatcggcgcatcgggggcgatttccggcgtaatggcgatgttcgtggcgctgtacggctttcagaaaatccgctttttctactgggcgctcgtctattttggtttctttaccgcgccggcaatcatcgtgctgccgtactggctgattggggagctgtatcagcattttttcgcccgcggcagcggggtcgcctacatggcgcactttggcggcctggtgacgggcgcagcgctgattgccgcgctgcgtgtgtacgaaaaaatccttggccggccgcgcgccgccgcgccgacaaacgaagcgcccaccgcccctttgccgcctttgctgcctgggcaactggcgaaaattgatgcgctgctgggcgagctgcgcatcgacgaagcgcgccaggcgctcgctcgccttgcccgcaaacacccgcgcgacatcgcggtgctggaacgttattaccaggtggcgcgctacgcgccggcgagcgaggattatcaccgcgcagcggcgctgatttttacgctgcccgaaaacgcgcccgacagcgaacgcctggtgcacgagtgcttttttgattacctcaagcgggcgcagccgacggtgcgtttgagcgccgacctgctggtttcgctgatccgccatctggcgcgcgcgggctacaccgccgacgccgagcggctgacgcaggcgctggcgcgccgcgcgccgaaagatgcgcgagcatcgccgcattgtccgcgctctgatacatcgcggcatattcttcgacatgcgtcttcatgtcgtcgacgcccgcctgcgtcatgaagctcagttccatgcgcccacctcctcgcgctgcgccagatcctccaactcatgcacggcgcggttcagcggatcgcgcaggaggcgctgggcgacggtgagaggctctgcgtccttcgccgcgacatcgatcttctcttcttccaagaggtgcacgagcaccctctgccagcgcgtcctcggctcttcgcccgcacgcagcgcaccctgcagcttttcgagcgccgcagtgagagccggctggacgacgcacgaaaggaacgtcgcgctgtagactcccttcgcgtagcggcgataagcgtcgtacatgccttgcggcagacgggcaacgatgtagtccgagccgcagtcgacgcgaagcgccgcctcgcccgcctcgcgccccaaaggctcgacgcgcacgatggaaggaagcgtctcgcgttcgtcgtgcgcctgcaacagaaattccgccgtct

SEQ ID NO: 1844 - DNA, 23009 bp, synthetic construct
  misc_feature 1..23009: note = Synthetic
  source 1..23009: mol_type = other DNA
acggagacgttcactaaagccatgcaagaggatatgctcgccttagggtgcttggctcccacatacgagccgcgtgcaacgcaatttatcccccaaatgctcggtcttatcgaaatcctggaaaaaaagggcttggcgtatcaagcatctgacggcgatgtggactacgccgtccgcaaatttaaagattacgggaaactctcgggtaaaagcatcgatgatttgcgctcgggcgcacgcgtcggtgttgccgacaccaagcgcgatcccttggattttgtcctttggaagcacgccaaaccgggcgaaccccactgggcctctaagtggggcgaggggaggccgggctggcacatcgagtgctcggccatgagttgcttttacctcggggaacactttgatattcacgggggcggtccggatttgattttcccgcaccacgaaaacgagattgcccaaagcgagggggcgcacggaccgggctttgccaatatctggatgcattcgggccccctgcgtgttcgaagtgccgacggcagcgaagaaaaaatgagtaaatcgctcggaaacttctggacaatccgcgacgccttaaaggaaacaaacggtaagtacggagaaggaaacggcaacgagacgttgcgctttttcttacttcgcagtcactacagaagcccgattagttttaatccgagcctaatcgaagatgcgcataagggactaacgcgcctttacagtgctttgaacgaaacaccggcacgggaaggggtaccgattgattggaacaggccctttgccgcacgctttaaggcggcgatggacgatgacttcaataccccgcaggccgtgggcgtgctctttgagcttgccgctgaagtcaatcgcaccaaggatacggcgctttcttccgaacttctttcgctcggaaagatttttaatattctcacgaaagacccggccgcgttcatcaagggtgccacgacagggctaaacgaagccgccattgaagaaaaaattgccgagcgcgccgcggcgaaggctgcaaaagactgggccaaggccgatgccattcgtcaggaacttaccgaagccggtatcgtcctagaagacagggcgggagttacgacgtggagacgcgcctgacggtcgtttcttggtgggaggcggctcttgaccatttaaagagcgattcgaccttatcccccttgatcgaaaacgctcggggcgacggtctcatgtcgtgtacggatttattttctgccatggtacgggccgtgtgcggccaacaggtgagtaacgacgccgccgtcaaagccaaagaccgggttttaaaggccgctcatgaggccagcccgggcaattgccccttgggaattcgcacgctcggccttaaaggcttaaaagggctcggcctttcgggcaccaaacaaagcgcgctttcgggccttgcccgaggttttttagccgggactctcacgcaatcggcgctgagccccataacggacgaggaggttctcgcgcgcttgacggccattaagggcgtaggtccctggaccggtcacatgattttaattttcggactcaatcgccccgatgtcttccctctcggcgactacggactgaaggcagccggactcaaacttttcggcaatctcgatacaatgttaaacgtcagtgacacgtggcgtccgtatcgcacggctgccacgtggctcctttggcgtgaccgcacgggatttgccgtgcgttattaaagacaacgaggacgttgagggcgatggtaaaaaagatttcctattttgattttgaggaagatttagaagtcatccacaataaaatcgaagagctcgaactcgatacctccgtaagcgacaccgatcgcgcctcgcgcctttctcagcttaaacgcagttatgccaaacgcctctcggagatttactcgaacctgacggattggcaaattacgcaattagcacgccacccggcacgtccctatacgcttgactacattcaggctatcttcagcgactttacggaactccacggcgatcggatgtttgccgacgatgcctcgattgtcgcgggacttgcgcacctcggcaaacacgccgtagccgtcatcggccatcaaaaagggcgcgataccaaagagcgcaccaagcgcaacttcggcatgaccaagcccgaggggtttcgcaaagcccttcgcgtcatgaagcttgccgaaaaattcgggctacccgtgattacctttgtcgataccccgggggcataccccggaatcgatgccgaagaacgcaatcaggccgaggcaatcgggcggtcgattttcgaattaacgcacctaaaagttcccgtcatcagtgtgattatcggggaaggaggctcgggaggcgcactcgcgcttgccgttgccgacacggtgatgattttgcagtacgccgtctactcggtcatcagccccgaaggctgcgcctcgattctctggaaagatgccagcaaagccccggaagcggccgaatctctttcgcttacggccgccaaactctttaatctcggccttgtggataagattatttccgagcccctcggaggagcgcaccgcgatccggcccttatggccttaacgcttcgaaaggcccttgccgaccaattgggagcgcttttgacgttttcaaccgaagatctgttagcgcgtcgaagcacgcgccttgcgctttacggcaaatacctcgaagaaaaaagcgtgatttcaacgcaaccggtaactcaggatgcccctcaagaacggaaagaccttgcgcaaacccttaaagagcaatcggcaacgcctaacgtcgagaaaaagcccgtcaagcctcggaaagttgcagtaaagaaagccgcaccccgaaaaaaagcggcaaagacaacccaagccgccgcaggaaaaagcgccgataaaaagcgcaccgccactcggaaagtgaaaaaagaaacaagtgagacgtcatgaaaaaagacgggaaagcgacccgcgccagagggtcgaacaaaatgacgctgattgacgccttcatggcctcggtgcgcgatgtgtcacaagcgcgaatgaaaaccgaagcctccgagttttcgctatcgaccgtcagtcccgttcgcctcgtgattgcctactcgggcggacgcgattcggctgcgctcctgtcgattgccgcggcctcactcaagcaagcgcatcaaagcgaaatttcttcgattacggccgtatacatcaaccacggactttcggaaaatgccgacctttggggaaaaatctgcgccgagcaatgtaaaaaactcgggattcctttcgaggagattcgtgtctttgtctctcgggcttctcgactaggtctggaagcggcggctcgcgaggcgcgataccgggcgctttacaaaagggcagtcgcacttaaggccgatgctgtcatgacggcccatcacttagacgatcaactcgaaacgtttctgatttcttggatgcgcggagcaggtcttgaggggctttcgtccctgccttgcacgcgagatctttcgttcggaaaagggcaacccgtgacgctcgcccgtccttttttacagattgagcgtgaaacgattactgcctacgtcaaatctcagcacttacgctttgtcgaagacgagagcaacaccgacacgcgttatctgcggaacctcattcgaaacaaggtctttccggttcttgccgaggcacgcacgggctggaaagaagccgccgaccgctcgattcgaaatatcgctaccgcatcggagatactcaaggacttagcccttgaagatacccgacattgtttaaatgcgagtgacaattcactttcgattaaagccctaagagagctctccgaagaccgtcaggcgcttgtcgtacgcacttggctcaagcaaaacaagattcgttatccgagcaaggcaaaaatgacggaaacactgcgtcagatttgcgaatcggatacggacaccaaactggcgatacgctttgaaggaaaagagctgaggcgctggggcatgaaacttattttgaccgatgccgtcggtaagcgtccgattgcagcgctcgatcaagactttgtctggaaaggggaggcgtccgtcagttttccgctctggggcggatcgctttgctttatcccgtgccgagaaggccaagaaggctttgatgccgatatcctaaaaaaagggcctctccgcttacgcgcgcggcgcgggggtgaaaagattaagctttatgccttacgcccgagtcgcaacctcaagctccagtaccaggttgcgaagattccgcccttcgagcgcatcaaattgccgcttgtctggctcaatgacaccctcatttttgccgccggtctcgggagcgatataagatattttgctgagaccgatttgatacacaatcgcgtacgcctagtctgggtacctcataaaaacttgctcgattaagtcactttctgaaacaattgccgccgtggccctgattcgtgaaaggtttccgggttcgtccttaattctttttgatgaaaggaggaaacctatgcacgagttaactgcatttgtttctaacttaaacagtgttctttgggggccgttctgcctgattcctttgcttgtcggcaccggcatttatttttcctttaagttgcgcttcgtgcaggttcgctgtttcggtcgagccgcgtcctacgttctgcgtcacgtcaaatttttcggcaataaagccgacggctcgggcatgagttccttccagtccctggctacagccattgccgcacaggtcgggaccggaaatcttgccggtgtcgccacggccctggcaatggggggcccgggtgcaatcttttggatgtggcttgccgcctttttcggcatggcaaccatcttcgtcgaagccgtcctggcgcagcactttaaaaacaaggacgcaaacgggcacgtgacggggggaccggcgtactacattacaaacggcttacactgcaagcccctggcgatgtttttttccgtagccatcatcattgctctgggctttatcggcaatatggtgcaggccaattccattgcgcttgcctttgactttgccttcggtatcaggccttggctcgtcggcatcgttgttgccctcattgccgcgtttattttcatcggcggaattcgccgcattgcctcgaccacggaaaaaatcgttccgatcatggcgcttttctacctcgcaggcggcttgattgtgttaatcgagtattacgaccgaattattccggccttcgagatgattttcgtcggagcctttaacccgacggcggcaaccgggggcgtaatcggtgcaagcgtcaaggaagcaattcgatacggcgtggctcgcggcctatttagtaacgaagccggtatgggttcgaccccgcatgcgcacgccgtagccaaggtcgaccacccggccaaacaaggtcttgtggccatcatgggcgtctttttcgatacgttcgtggtccttaatatgacggcgctcgtgattttaagtaccggagttttggacggaaagaccacgggcattgccttaacgcagcacgccttccaattgggtttaggctcgttcggttacggatttgtggcgatctgtcttcttttctttgccttctcgacgattatcggctggtacttttttgccgagcaaaacgtcaagttcctcttcggtccgcgctacgtgcgtccgtaccagtacatcgtcgttctctttatctttttgggctcgctcttgcaagtgaacctggtgtgggaactggcggacttatttaacggcctgatggtcatcccgaacctcatcgccttaatcggactcgggaagattgcctccgaggctttgaacgattacgaatttcggtacatcccggaaaaaacgaaagccgaaaaggatgcttcttaaggcaagtgccgtcggacaaaaaggcaaccttcgggttgcttttttgtacccggggcgttcaaaataagggactcgtttttctacttcgacaccgatgaaagaccgcgccacgctcgatttgtttgaaaccgactctcaagacgacatgcgacttcccgccggcatcgacgaagcagggcggggaccgcttgccggtcccgtctatgcggcagccgtgatattaaatcccttaaatccgatcgaaggccttaaagatagtaagaaactcacaccttccgaacgaaacgccttagccccgattattcaagaaaggtctcttgcctggtccgtggcctttgccaccgtcgaagaaatcgattcgatgaacatccttgaggccacactccttgcgatgaaacgagccgttttagggctttcgatccgaccgaccatacttttaatcgacggcaaccgcatgccgcacatgccgtatcggattcggacgattatcaagggcgatgaccgcattccggaaatctccgccgcctcgattttggccaaaacggcgcacgacgcgctttttgagcgctatgccaaggagtatccgggatacgcattcgagcaccacatggggtacggcacggccgagcacatggcagctatcgagcgtctgggtgttctcccgattcatcgaaagacctttgagccgattgcaacacgcctgaaaggtgtcaagcacacaaaataatcggtcctattgacttacacgcatcgactctgttcgatgacctgagcttttcgggcaaaagcatcgactacagtcgatgatgacaaggaaaaaatgcgaaaccatcgaacagagtcgatagtttcccctcatgacaggtaactcggttcctcggcggcccgagtatgatattgagaaacctcagtgacttgagatacggacaaatctctttcgttaaaatctcagttcactcttttgtgaaagacactaaatggcacctggcgacacccccattctcgtcattatcccggccgcgggcaccggaacccgcatggcttcggccgttccgaagcaatacctatcgctcggagaaaaagcgggttctgtccttgaagtctcggtcaaagccatgcagcaagcacttcccgaggcaatcgttgtcgtcgccgttcaggccggcgattcggtgattgcttctcagaatctttcgaaaactcaagttctgacaaccggcggagcgagccgcgaagaaacggtctaccggacgcttttagccttaaaagacgatttttcggagaacactctcgtttttgtgcacgatgcggcacgcgctctcgtgtcccccgatgacgtacggcacctgaaagacgttgccctgcagtctgtaaaagagggtaaagccggtgccgttcttgccatgcgacttcccgatacggtcaaacgcatcgacgaaaacggcctcattgctcaggaccttgaaagaaacggcctagtgcgtatggcaacgccccaggtctttcccctgaaaacgctcataaccgcattatcgaataacctcaatgccacggacgaatcgagtgccgtacgcgcatgcggcggcacggttcgtgtcgtcttcggctcaccgattaactttaaaatcacggaaccggcagatttacgcctggcgcgactcattttaggaaaccgtatgcccaagacccgaatcggactcggatatgactcacaccgctttgcagacgatcgaaaactcattctcggaggcgttgaaattgcccatgaaaaagggcttgccggtcacagcgatgcggatgttcttacacacgccgtcattgacgcgcttttgggggcagcacatttgggcaatatcgggctcttgtttcccgatacggatgcggcttacctcggcgcgaactcccttcagttgctcaaagacgttgtccggcgcgtccgtaagatcggctggcgcatcggaaatctcgatgcggttctgattaccgaagctccgaaaatcaatccccatgtcgcaaaaatcgaagcgactttggctgcgaccttaggagtcaatcctgcagacgtcagtgtcaaacccaaaaccaacgaaaaactcggattcgaagggcgaggcgaggggatatcggctcaagcaaccgttttgctcgaaaggacagaggcatgattgataataaaaagcattttcgaaagcgtctgaccgagttaaaagctctgtccgaccaagcgcttcttgacctgtacggcaaagaacacaccgacaccgatgataaggcaatcaagcacatccttgccgagcgcggcgtagcgctcccggaaagtcagggcaccgtcacggaagacgagagcgccacacgcatcatcgagatttcagaactcgcaggagctaagaccgaagagccgaagacaacgggactgacgtggatggaaggggttcctatggtcgccggcatcctcgtgatttaccttctttattcgtactcgttctggctttcggttatcggggggctattgacagccggggctcttttctggctctttcgtttcgtgcggcggcactggagacgcttgggcgtaaaagatacctacgcgaaagatctttaatcggatttctttatcacgcggttttccggcgtacaccctttgcgccgtttcggggcgtgactttgctgaagcgaagtttttctaaaagtcgtagagacttgtgcacaaaaggagaggaaaacctatcttgttcgtgctgttttgccgacagacgttaagacgcgagcatctgcgcgagaatctttcgcgtcacaagaatcggatcgccgggtcggaaatccgctgcaagcgcctgcgtaaaaagcgtctttttcccaatcggcgcgtgaacaatccgaacacctcggttattcggcattcgaatgcgcacatcgctaccgtcgacggcgaactttccgttcagtttcacggcgcattcatgcacaccccaggctttgtaaaaggccgtcaccttttcttccggcgggaaataggataaaaataccggaccgaaacagcgctcggcaatcgcctcaagcgggcgatcggcacgtaaaacttctaaatcaatcgccacgggagcggtcgcaagagccgctccgacaaacgttgccgtgtgagaaatcgtggaataaagggggctgtcggataaaacaatcggcgagtagggcgggttttctcgaaactgcaccgcaagacctcgcaccttggccaaggctaccagcaaaagccgcgtccagagaaagtccgattgtcgcttcggacttaaaaacctctcggcgcggtcaatcacgtccggcaaaagatacgtgagcaacccggcatcgggtttggcatcgattcgttcgagataaatgcaatcgcaaaaggggcgaagcgtcataacgcagatatgttctttcaaggcaacgcggcatgatatccgcatttgtcattttccgacaggggaaagggaccgattccagagtcaaaactaagatttcgtgacaaacaaccctttcaaacagggttatttcgtgacaaaagaccgatttttacccgtatattacgtgacagccacttggttttcccatttaaaatcaagcaaattcgactcgctaaagtcgacttgtcaaaaaggtctatgagtacacaaggactcctattcccaaaagttatccaaattttggaattacaagaactcatcgacttacgtcgcctaaaagcgcagagccactttggcgtaagcgttatcctagtttcgaaacacacaatgatttgaaactgaaaattatcctgtattgcaaaaaaaccgagacaactgtatcttcttccaatatagtgcattgtcaggaaaaggaccgttatctcgaattttccgattcagtatttagcgtatgggaatcgtggttcgctctccgaaaaccaagatgctttggatacgaaaaagggtcgcatatagcgaccccgcatcttgtgcatctctcagcttgttagtggagaaagcccatttcctaactgactgcgaaaattttatctagaggacgatgaaaatgcaagactctgtctcaaaaatgaaatacagactcggaatcgaccttggaaccacttccttgggttgggctatgttgcggcttgacgaacaaaacgaaccttacgccgtaattcgaaccggggttcgtatctttaataacggtcgagacccgaaaacggaagcctctttggccgtagcgcgccgtcttgcacgtcaacaaagaaggactcgtgacagaaaaatcaggcgtaaagagcgccttatcggggagttagtggccatggggttcttcccgaaagatcccgataaacgccgtcaactcgcctcgttagatccttttgaacttcgaactgaggccttagatagggctctgtctccggaagaatttgccagagcgcttttccatttagccaaacgacgcggattcaaaagcaaccgaaaaacagatttcggcgataccgaatcgggcaagatgaaagaggctatcaaacgcactttaaatgaactacaaaacaagggttttcggaccgtcggtgagtggctcaatatgcgccatcaacaacgcctcggcacacgttcgcgcattaaaaacgtccccaccggcgccggtaagcaaaccaccgcatacgacttctacttaaatcgattcatgattgagcatgaatttgattgtatttgggaaaagcagtcccaaatgaatcccagcttttttactaatgaacgcaaagccatcctaaaagacattatcttttaccaaagaccccttcgtcctgtggaacccggacgttgcaccttgatgccggacaatccacgagcaccgctggctcttcctcaacaacaagactttcgtatttatcaagaagttaacaacttgaggaaaattgatccgaccaccttacttgaagttaatctcacgctgcatgaaagagatcaaatcgttgagttgcttcaacgaaaacctgctctgacctttgatgccgtcagaaagactctttgctttaacggaacgtttaatttggaaggagaaaatcgttccgaattaaaaggcaatctcacaaattgtgcgctcgccaacaaaaaactatttggagaaagttggtattccttcgatgcccataaacgatttgaaatcgtcgaacatcttttgcaagaggaatccgaagaaaaactcgtttcctggttgcaaagggaatgcaatctttctgaagagagtgcaaagaatacggcttccgtgcgacttcctgccggatacggagccttgtgtcgagaggctttagatttaatccttccatatctgaaagctgaagtcatcacatacgacaaagcagtcctaaaagccgggacgaaccacagcgaactggcgttagcgaatgaaaccggtgaaatccttccagaacttccttactacgggcagtatctcaaacgtcacgtgggtttcgggaccgggaaacccgaggattccgtcgagaagcgctacggaaaaattcccaacccgacggtacacatcgccctcaatcaattgaggaccgttgtcaatgctttaatccgcagatatggaaaaccgacacagattgttatcgagcttgctcgagaactcaaacaaaacaaaaaggcaaaagatcaatatcgaatcgagatgaatcacaaccaaattcggaataagaggattcgcactgatatttcgaaggttctcggaatcaatccagaaaatgtgaaacggaaagatattgaaaaacagattttatgggaggaacttaatctgaaggacgcaacggctcgttgttgtccttatagcggaaagcaaatcagcgcagaaatgctttttaccgatgaagttgaaatcgaccatattctcccgttttcaaggactttggacgattcaaagaataataaagtcgtttgtatccgagaagccaaccgcattaaagggaatcgaaccccttgggaagcacgagaggattttgagaagcgaggatggtcgatagaggcgatgacggcacgcgcccaagcaatgccgaaagccaagcgatttcgcttcgccgaggacggatataaagtttggttaaaagatttcgatggcttcgaggcacgcgcgttgacagacacacaatacatgagtcgagtcgctcgcgaatatcttcagttaatttgccctagtcaaacctggtcggttcccggacagctcaccggaatgttaagaagatttttaggtctaaatgacattttgggtgttaatggtgagaaaaatcgcgatgaccaccgccaccatgccgttgatgcctgcgtgattgccctcacggatcgttccatgttacaaaggatttcgacagcaagtgcgagggctgaaaataaacatcttactcgtctgttggaatctttcccgcctccatgggctacgttttatgagcatgttacccgtgccgtgaaatcgatttgtgtcagtcacaaaccggagcacgcctatcaaggggccatgaacgaacaaacagcctacggcttaagaccggacggatatgtcaaatacagacaaaacggaaaagttgaacataagaagttaaatgttatccctcaggtatcggtcaagggaacctggagacatggtcttaactctgacggatcattaaaagcgtacaagggactaaagggagggagcaatttttgtattgaaatcgtaatgggagagggcggtcactgggaaggcgacgttattacaacatacgaggcctaccaaatcgtacgggcgaaaggagaagctgcgctttatgggagtgtgagtcgctccggaaaaccgcttgtaatgcgcttgatgcaaaaagatgttgttgaaatgactcttgaggacggccgatgcaaaatgcttctttataaaatcagccaaaacaaacaaatgttcttttaccgtatcgaaaatgccggcggtgggaaagaagatgtttccaagaaaccgggatccttacaaaaagcacttgcgaaaaaagtcataatctccccgataggagatttccgtagggaaagattatgattgggcggatagtcgaaatatcaaacaacaacagatatctttctgtgtatcgggggtttcttctcgtgaaatcactcggggaagaagcttccgaactcggaagaattccgctggacgacattctggccgtgatcacgaatgctcacggcttatctttctcaaacaatcttctcgtctctttacttgaaagggatattcctcttgttattacctcggataaatacgttccgatgggcattctttggcctgttgaaagccatcaccttcaggctaaacgaatggatgctcaaattggggccagtcttcctctaaaaaaatcgctatgggctcaagttgttcgagaaaagattcgtcaacaatctctgttgcttcatcatctgggattacctttttctcgattagacagactggccaaagaagtaaaaagtggcgacccagacaacaaagaagcaattgcggcgcggatttattggacttcggttttcggtagcagtttcctacgaaacagagaggcccccggcattaatgctttactcaactacggatacacggttattcgatccgcgactgcacgcgccgtcatagccgctggcttacatccgagtttaggaatccaccataaaaatgcatctgacgctatgcgcctggtggatgatttgatggaacctttccgaccgttagtcgacttgatggtgtttagcctgacaaaagagaacccgagcgccgaatggtctatatccactgaaataaaaagaaaactcgtcagcattttattttggaatgttctttttgaggaagatcagtgtcctgtgatggttgcgatgcaaagactggcactgtcgctttcgcaagtgtatttgaaagaaagagtccgtcttgcattcccgaagttatttgaatatgggaaagacatggctaaagatgatttcgggatatagacttatgtgggcacttgttatgtttgaccttcctgtcattacaaaacaagaacgtcaggcagcaacagtgtttcggaagaggcttttagacatgggcttctttatgtgtcagtacagcgtctacattcgtttttgtaccagttctgcggacgttgcctcctatacaagaaaagttaagatgttccttcccgcctcaggtcatgtttccattcttgtaatcactgatgcgcaatacaagcgcattctaaacttcttttctaggaaaagagccattgcaaaaaacataccgaaccagttggaattgttctagtttaatcaagtttttaaagtcgaaccgctcaaaaatctctttcaaatcaagtcgttggagcagttcggattgtatcagttaggaaatgagcttaggccagaacattgcttcgggtttgcgaaacgcgccttcgattgtatcagttaggaaatgagcttaggccagaacctcttgctgtccgtggtcagacttcagaaagattgtatcagttaggaaatgagcttaggccagaacagcatcatcaaccgcattgctaccagtaacgattgtatcagttaggaaatgagcttaggccagaactaaaagcagtttttcttacaccttcaagagattgtatcagttaggaaatgagcttaggccagaacatccctcgacgttcttgcatcatttttgatgattgtatcagttaggaaatgagcttaggccggtatttgtcaagatacttcaaaaaaatgggttaggagtctttttacctctgaagaacctcagcaggggctttgcccctacgcttcgctaccccagaatattttttaaacatgaataggaggttccttgtcctgtgcttcgtgtactatgcccgtgcggtacagggagggatcccgatgaccgcaaacgtgaatagggaaggctctgtgcgcttgcgcggggccatttctctaagtggctgaatccgttgccaacacctgcctatcaggattcaaccactgactgcctgcgggctcatagtttctcatccggccacaaatccatcattccgggtgttgttgccgagcctttgccatcacttgacggcgtgctttgcagatagctacatccgcgccattgaagcgcgccaaaggcgttacgttgttgatgccgctgtccccccagatcgcctgcgctttttttgtcaacaccaacaaagccgcggcttccgccagggccttttccttgcgttgcaactcgcggttctgctgcttttgttcttcgcttagcgccgttaccttgttgatgagttcttgctcgcgagcacgcgcactggccgagagtacaacatcatcgtcatgctgtgcaagccaggtgctgaagcgcttgatttcgtccaggatgacgcctttggtgcggcagaacttgccggccgccggggactcaaagccgacttcttggcaatacccttcggcgacaagcgcggcacgaaagttcatgccttgaggtaaggggatggcctgagtgccttgcccgctagaccgactatccgctttgagctgccgcaaccaacgatacacgcagcttgtcgcgatactatatgcgcggtgcgcctgttcaaccgtaatctccttggaaaggattctcccgaggatttgatttttcttttcgagcggatatggggtgcctatttattttctccgtgccctcctgattagcgattaggaagtattttgacagagaggggcatcctgcggcattcaatagtttctgataacgattggactttcgtgccagatcgttcttggctttttggaatagcctggccaacaagcgcatttcacgaaaaatagacttgggaacaaacgatttccgtattcgccccattcgtgcgaattcggccaatcgaattgcgtcctctctatcggtcttgcgtcccattgcagccttgacatctctggcattgaccagggccaggcgatcgctggtgaagccgtgagcttccagggcggcgtatggcgactgccacaagacaccggtggactccatgagaacgatctccggctgcttctccgcgcaccaactggcgaaggattcgagctgactgtatgacgcaccgaattctcgaacttcggtgatgatctctcctttggtgctggcttgatacgcgcagacgagaaggtccagatgaacgtctatgccaatggcggagacgtgagcaacgttgataatgcgctgagttgcctcttgctttacaactatgctttggttagcccgtgctttagaatgacccatagtccctcctgcgaaatgaaaaaggggcttttgatgggacccggacgtaacaccggtgaagagaaaattgatgatgctcttgataggacaggagcactcattttttcacgcccctacaccgcggctgacaacgaagttgtctgccgcgggagagccatatggggtgcgaaaaacctagccgcaatttattgacgctcttagcatacaaacgtttttgcaaaaaacgtacgcggtctggatgcgtaccgggccccgtccttttcatcatagagggtgaggacggaattgtcctcatatccatttttacccctcaaaccgagtacaatcgaacgttggagtcaagttattcagaaaggggagcacatggcacaaatcttatacggtgtctggaacggtcgcatcttcgataaccgaaaatccgaaagcccaaccgaggggtttcccgttgatgcgattgccgaattcgacccgaacaaccccatgcgcgccctagttgcgcacgcaggctttttggttctcgataaaaccgtttctcttgcacgcgttctttccgattactacaagaccgtgcgagccaattcctgcggacgctgtacaccgtgccgtaatgcctccgtcattatcgatgaagcgctcacaagccttgcggtcggtcaaggagctaccgttgactgggatgccgtcttaagtgccgcccgtgaaatggatcaaacaagcctttgcggcatcggacgcacaagcgccaagccgttgattgcggctttgacacactttaaagacgaactctttaaaaccgtcacggacactcgagtgctttcttcttacggtgttgtcaccgcaagttgcatcgaagggtgccccgaccacgtcaatattccgcgttatatggattttgtgcgtgacggacaaaacgctctggcgcgtgccgtcattctcgagcgctatccgatggttgcaacctgcggacgcgtgtgcgtcagaccctgcgaaaaagcctgcagaagaaatgccctcgaaggcccccttgccattaaagaagtcaaacgctacattgccgaagcgacccaaggcaccattgcttcgctctttaagaagacggttccggagggcgcccgagctcaggttgccgttgtcggtgtgggtcctgccgggattaactgcgcataccacctcttacaaaagggcgttgccgtcgatatctacgatgcggacaccgaatcgggcggcatggcccttcgcggtattcctccgtatcgactccccaaagacattctgaaaaacgaaaccgatgccgttaaatccctagggggagcattcttttacggcaaaaagctcggccgcgacatgtcgcttgccgatttgaaggctcgctacaaagccgttttcctcggtatcggatgtgccaagggagcgtatttgggcctacccgatgaggatacgacccttaagggttaccgaaacggtatcgattttctccttgagattgaaaaagaagttatcgcaggacgccaacccaagatggacggcgacattgccgtcgtcggatgcggaaatgtggctatggactgctgccgcacggcgcggcgagtgacgacaggtcgtgtgcacctcatttatcgccgtacactcaaagaagcgccggccgataaagaagagattcgagaagcccgagaggagggcgttgaatttcacttcctcacaaaccccgttgccttggaaagccgcgacggcgtcttaacgggcgtacgcctcacgaagatgcacaccaccgaacccgatgcccggggacgcatgggtgttgagccggttcccggtagtgagttcacactcgcttgtcaaacactcgttgccgccatcgggcagaaaatcgagacacaagccctggaaaattcggggctgacactcggccggcgcggcaatattcagaccgacgccacacagatgaccgatgtagacggcgtttttgccggcggcgactgcgccacgggtccgaccagtcttgtcgaggccctcgcgcagggtgacagggctgcaaaatcgattgtcgcctaccttaagggtcaatcgcgctttagcccccgtgaccgcgcaagtgacctgattatgcgattaaaactcgtttgggatacggtcgagccctgtaagcctaaaaagcgcatgaccatccaccgtgtcgatccggccgttcgctctaaaaactttcaaccggccgatacgggatttaccgatgccgaggcctgtgaagaagcgtcccgctgcatgcgttgctatcgcgtcatccgcttttacactgataaaccggtcgccaatgccgactgatcgggaggaaactgactatgctggcttacattaacgaccgacctgttgaatttaacgaaggcgagacgattcttgctactgccaaacgcgccggtatctttattccgaccctgtgcgcgttgcttccgatcgaccatactccgggaacctgccgcgtgtgtctcgtggaaattcgcgacggcgcctcatcgcgcatcacgacggcatgcacgacgccgattgccgaaggcatgcatgtttacacccgtaccgacacggtccgggctatgcaaaagcagcaggtcaaatggcttttttccgaccacgaccagaactgcgccgcctgtccgagacacggagactgcgaattgcaggatgcggccgtctacgtcggcctcacgcaaaaccccgataacggaaaccgcaaagcgccgcgtccctttgacgactcggctacggctcttgtgcgcgatgcgagtaagtgcatccgttgcatgcgttgcgtcgaagtgtgtcgcaaagtacaggggctttctgcgttaacactcgaaggcttcggaacccgggccggtgtcggcattgccggcacagacaagtggggtcaaagctcccgctgcgtgcaatgcgggcagtgtacgctcgtgtgcccggtcggggccttagcggaaaaagaccaactcgatacggcgctcgcttggtttaataacccggaaatcaaaaccgtcgtggcttttgccccggccgtgcgcgtcacgctcggagaagccttcgggatgccgctcggagaaaattccgaaaaacgtatcgtgacggcgttaaaacaaatcggtgccgattttgtctgcgacattaactgggccgccgacgtcacgattatggaagagggcacggaacttatcgaccggattgagcacggcggaaaacttccgatgatgacaagttgctgcccgggctggattaattttgtggaaaaggttaatcccgaagtcatcgaaaacctttcgactacgcgctcgccgcagggaattttcggcgccttagccaagacctactttgctaagaaaaaggacgtcaatcccaagaagttgcgctttatctccgtcatgccctgcacggccaagaaagacgaagccgttcgcgagcagctgcggcaaaacggcatgcccgatacggacttggtcctgacggtccgagagtttgcgcgtctgctgcagatgtacggcgtagacctggctaaaacccctgagtcggaattcgattcccccgtcatgagtgaaaacaccggggccggcgtaattttcggggccacaggcggcgtgatggaagcggcgattcgtaccgtgcactttattctcaccggaaaggaattgggtccggtagagtacgaacccgtgcgcggcatggaatggattaaagaagcctcgctcacactcggcaaggcaggaaccgtgcgcattgccgtggtccacggccttgtgaatgcccagaaacttgttaatcagattaaagccggaacgtgtccgtatcacttcatcgaagtgatggcgtgcccgggcggctgcattgacggcggcggaaccccgcgtgttaagcgcgaatatctgacgcgggcgcaaaagcgtatcgccggcatttatgctattgattccaaacgtcaattgcgccagagccacaataaccccgatgtgcagattctgtacacggaattcttaaaagaaccgtgctcggaaacctcgcaccggctgctccatacgcactacacggatcgaagagaagccgaagccgtcatggacctcacgcaattgagaaaaaagctttcttaagcgttcagaccggttgattccggagtcataaagccgcgacacgtcgtttgataacgtcgcggttttcttatcttaaacgtcgaaaagaccttaaagcgttccgtcacccgttcctttgcgggaaccatacgaaacaaacggcatatccaagtgccaacacaccaggcgcagaccggcaatgaacaccgccgaagcaataaacgccgtatcaacggacatgtcgagatacacaagtcccagatacacccaatttccggcaaaagcggcaaaggcgtagggctgcttatccgacaggaccatcggtacgcggcataaaaagacgtcccgcagcaggcccccgaaaacaccggtgcacacccccaagattacagcgggcagtgccgggacccccgctgccgtcgacatggccgtaccgccgacggaaaagacggcaaggccgatggcatcggaccagataaagatggcatacaggtgcgtttccgtgaatttgcggacaatacgcggagcaatcagggtcataaagagcacgacccaaacgtactcctgatgggcaatccaataaaagggacggttatcgatgatgatgtcgcgaatcagtccgccgccgaaggccgttgtaaaggccatgacgaaaacaccgaccggatcgactttgcgtcctcgggcggcaaggattccggctaaagcgaatgcaacaatgccgatgaaatcggtaatttgatagaagttcataagagtttagggcgaaaaaactccaccgacgcgaatgctacaggtttttaacgcgtttcgtatcattcgacggaagtaggaggcgaacaccacccaagtgtctttcatacgttcccgaggaaaaaacgcttgtcgcttaccgtctcgccgcgcccagacccacgattgagaagccgattccagaaaaagcgtctaagtaagtaatcgcttacatattgtttttcatttagaaatcaaggcttcttagctgaactcaaagccctcctaccgggcgctaccgttactgagcgcccggacgcttgcttcgctcatcacgagctccaatcgcaccgaagcgcgcgtcatcgccaagtacaagagggcccgaacggaacgagtgagctcttcgaaatccaattccgtcacaatcacacagggactttgcagccccttgaatcgccgaacggtatcggcaaagagcacaccgtcggtaaaaatcatgtcaccgttctggttaaagcgtccggtcggtctcttcagcacgtacccgcccaaactctccttttgtaacagtttggaggaggaaagcccttttgcacttaaaagggctatctgttcgggagaaaacccggcggcaacggcattttcaagagctttttccgtaatccggcgaacggactcactcggcgcatacgaaacaatcgtattctcgccgacaaaatccgggttcccggtaaattcggggctcaccagttcgagggcgatcatctcggaagcacgcgtctgagagacacgggccgattcggtcgaacgaacgactatatgatcgagcggagcaaactccggatgtgatttcgcgtcccgagcaaaaagatcgcgcaacgtataaagatgtccgcccggattcaacgcgttggcaagcgcatcaatccagtcgaactcaaagtcttcggcgccgtcgaccacaatcaaatcgtagggtagggccgtagttttcagtgtttgacacagtgcctcggaaagcgaatcaaaccaggcgactctttcttcgggcataagctcgtcgggatctgttgcatcgcgagttaactcgcgcgccaattcgtgccaggttccgataaaagcgatgcgagaggccaccggagtttttctgagtcgctcgacattatttcgatgaaatcccacataaagcgcacgcagccctcggtcgcaggcatctttcaggagtgtgacggccagttgcgtttttccgcctcccgccggtgcttcgacctcaataacaggcgaggcggtctgaattcgcggaatccattcggaaagaccccgagcccgcgtgttttgcaacgactcaatgccgggaaccagggccgagacatccggtgtcagagcgatttgtcccttgaaaaactcaacgatttcatcatccgtaagcacatcttccggaccgatgtactcggcattaaagtcctggacgatttcggccagaaagggcactttcttcgaatcgattatgcaagtactgacgtcattgaaggcgggagtctctgcaatctgcccgtagggaatcaccaaaaagtgcttaaaccgcagatgtttacccggaaaacgactctttaaacgcgtcaaaatcaatcgatgctgagtggcaatctgctcggaaatatcgagaatgccttccttgcggtctcgaatgagattgccggtcttgtcgaccgaaagctgtcccgttttaacttccagaaccaaaatggcgcccgtcggcgtcacgacaacatcgtcaaattcgcttaaaacgcgaccgccgtggctcatcgcctcgtagtttaaaaagacagtgtagtcatcgggcaggacttcgagctggcgtctgacggccgcttccccgaaatcaccgcttcgcgcaggttcggaaaaacggcgtggattttcaatgaactttg

SEQ ID NO: 1845 - DNA, 22628 bp, synthetic construct
  misc_feature 1..22628: note = Synthetic
  source 1..22628: mol_type = other DNA
taaatgcttatcatgacgttcatgatcccccgctctgtcttgagcatcgatatcccgtaccttatccctggagtcgtctggcctatctcgcagatctgaatcggactttcttggactttcgggtttatccggtttatcgattttatgatccgacttgctttgatcccgcatatcagagggtttctctgcatgatctcgccctgaggaattggaatgatccagtcgcttatcatcatctttacttcgtgaatcttctctacgaaaatctctatcggatgactgactcttgcctgaaccgctatgatcaagttcttttcttaaattttcctggttcgaaccactaccgccatgcccgctgcggtctggattattcttgtcacttcgggggaggctaatttccgattcattatccgaattatttctcttatctttgccattgttatcgttaataactctatcatttctatcctgtatttgaacagatggtaaattccttaattcaatacgttcggaactgattcgctgatctgcgcccagctttccactaatcagtacacgctgatccaacctgagatcatctctggctgttcccgttaacagagtattgggatcaatggtaacgatccggttgcttacgtttaattccttgtcaccaagggcatggatatacccttcaatcataagatgctcaacattcccaatgctatttaatgtcgggtcaatctggatatgccgggcgtgtatatgaacgccatcccagtgtcccgtaacctggatttccatgccttgagaaacacccgttggcaataatttttcatcatgttgaacgcgcgtgccattgacaacaaagccttgtccgtcaatttgtgtaacatagccatttatcttggcttgcgcctgcgccggcatagtttcaattcgcgatgccataattgcaccattggataacctgtggccactgacttgtacccaatcgcctgttttcatatttgaggcatggctcagatcagcagttttctcaatatgcacagcttgatttagtacccgtatttccccagtttcaggattaagatggccaatcggaccaattgctgcatgcatgactgtaatatttcgagccataagttcatgccccatgcctagcgtacgggctgcaataacctgtcctaccgcaagatcacgtactgaagtgggtcgaccatcaatcgaaacgggggtgttgctgtcatagtgaacttcgatgccattgacgcaaatgcttgcaaatccagtgatgacgccaataattcctgtcccaccgatgccgccatcgtcagcaacgtgcccactccctcccgttcctccaccgagcacacctgtaccacctatacctgagtcagccaatggcatgccagtcccaccaattccacctttcgaaataccagtaccgcccattcctccatcgtgcacgccggtgccgcccacgcccgattcgactgatggcgcacccgttccaccgattcctgattgagcatgcagtaaaggattgattagcgaggggctggcatcacaattatttttggcgaatacactgacagaatagcaaatcatcaacgcaatggccgccgacatgtaagtaacgtaacgttgtaggcttaccaatgaaattgtcatttcgctttaccaatatcttgagtgacgagctgcgcggaatattgtcatttattattctttcgattctttcgattctttcgattcagcaggttcactataaaaataaatcccgaatgtcattcggtaatatggttcatttttccctgcgtcacttttctcgaactccatcgcgtctttattaatggcaagtagggattccattccaagatgcttggttttctcggccaattcctgcactgaagcaacggttaattcgtcgtaagaaacacttcgttcaaaaaatggttgatgctctcctaataaattgttggtcgcggcagcggcatgatcatgcaagttgtgaccaaagtaatacactttctcatcaaatccgtttgccggaacaaatgcagatgtgttaagacatactcgcttttgctcatcgaaatgtgctataccgagtctcaaccattcatcgagcactacccgcgaacgtatgtcacagcttacattggcaaccagtttctcaaaagaaatttcaccgccttccttgataaatctaggcaagggcttaggttgattgttttcatcgagataacgtgcatcactggtccaaagacttactagtcgagcacccattgaaacagcttgaggaattgcttcggcatcagaatgattttcatgacgtaatcgcttgatatctttgcgatgaatacccgttagcaaacttaaatgactatcagtcgaagattttccctcaatcttaaaatctttatctgcaatttctacgaataattccttcagtaattccaataaaaaaggataagtaatcccttttgacaacattaacttgattatcggacgaagcatgcgtcgaagtgcagcaacgagagagggtggtaacgttgagtcaggtgtttgaatactgtgcataaagcttattcacgggttaaattagtcaagaggttgatggatacaaaatattttaccatatcgtgggaaataatcacacaatatgttgacatggaaaattttcccacgtatagttgattttgcgtgggagaaaatctcatgcgcacatcaggacacttactgatgttgcatcaatccaaatcaaggagaagtatcatgaaaaaactctcaattatcacactcctaatgttcagcatggggtttgcatctacatctttctctacaggaaaaacggttgatgactatctcggctactccgacagaatgaataatccggccgatcaaattcggcatgggcgcgatgcggatgattctagcagaactgcacatccaaggaataatcaagataccgctgtagtcactccacgtggtgaacaaaatacggatgaccgtgaatccagacgaattggaaagttattatggaagcatgatcatgtacaaggaggtcatgggaacgttaaataacaaaaattaatattacccagtacacctcccaaaggtgagtctgggtaaaatacacaataaaagaatcaataaattgttaactgtccccaaggagaaaatgagatgtttaataaaatatttttaaagaagattatcagtttaggggtttgttcctcaacactgctaatattatcaacaggcagtgtttttgcaggtgataacgaggtcagatttgaactgacggataatcccggacgttggtttgatactggaacatcagttgcaggcaatcgttcgattgctattgcagcgccaggtgtgcgcgttaagttttccggcaactccaataccgtgcatacgcgaaccagtctgatctaccctacgggtgccgctaacatgcctttcaataccaagccaagaaagggaggcgatgatgtaacgctgacaacgccaggtttgtatgtattcacctgtagcgttcatccctacatgtttggcgcagtgattgtcgatgatcctaaaactactggattggatctgggttcttcaatcagcttggtcaacggtatcactgttccatccagcagtgatttggcgacacggcttttgcggactttctttattgccaccaacccggcaaactggcaaaactatgccagtaataaaccgtggcatgttacctatccggatgttgacgtgcgtgtagacattggtgttgttaatttgccggatgtgctgaatgcgcgttatggaaacgatatcacactatcggcactgaaaaatcctaaaactcctgcagtcggagaaatctgggttgccacgcaatttgaaactacgcgtaacaaagaaaaacccggtacggtatcagccatcgacggatcatcctggcaagtgacacgtaaagtagcgttaccttctatcgacatgaacaatccacataatatgtggacagataagaatcaacgcgtgatttatgttactcaatggtttgattcaaaactgacagtttatgatcgtaaaaccggtaagcttatacgcaacgtatccgtaggcgaatcccctgcgcatgtgatgacgctcactgactccgatcgcattcacgttacgaataatggcgatacgcgcacggattcagtaatggaattggcaccactggcaacccaggtgctgcgtagagtggatattgggcgcggaaacgcacatgcgcactggatgagtcatgacggtaaaaccatggtgacgcccaatgtcttctcgggagattccacgcaatacaattttcataccgatgatattgaagccattctgccagtcagcagtccgttcggccatcctctggcgacaggcatgatgccggatgcgagcaaatactatgtggctaatctgcttgatagcacgatcgctgttgtgaacatggatacccacaaggtaatgaaacatatcaacttaatcaaaaactatgacccagtcgctggaaccattaccggtccgataggggcattgccgattcagacgccggtttcccctgacggcaaaaacatggtaaccgccaatacactttcagggacgatcactatcctcaatacaaataccgacaaagtggttgcgatgctgccctgtgatccgggttgccacggtgtgcaatatggcgctaaacagggaggcggttactatgcgtatgtctccagcaaattctccaataggatgctgattgtggatcctgatccaaacaatgatggtgatccatcggatgcaaaaattgtaggtgcggtaggattgtttgctgcaagtaccacacagaaggatgacgctataaaagggaatccgggcatgggtgggcagggcatattgccgattccggtcgtgtataacggctgggtgcagaacttacccgcggcttggagtagtcaactgaccccagcgcaacgcaatccgattgattaattatattttaagatataatataattgagtcaatggagaaatgagaaatataaatagcgtttgatatcgcatcatcatattcagacgctatttactacattgacttacctaactttcaggagaactaaaatgagttcaggacatgatgattcatccggtagtaacaaacattttacattcaccattgaaaatggtgctgtaacgggttattttgaagttgaaaatggaataacccagcaggaatcgatcgacaacagagactcgtttgtgatcgatggcactcaaatcacccacaccaaacaaacttctaacgggcccgaaatcactgttttctcagatccagaaggtgacggatcttacacagtcatctctgatagtacagatgatgatcgcccgggcagtggtgaccgcaaaggttatcaattcaccatcaacgataataatgaagtcgttgaagtatttgaaattaagaatggtgtgccggagcttgatcccatcgatgatgatggtacggagacttatgcggttaatgaaaatggtgaagtggtgagaactgatgatgagcctggtattggcacggaaataaccgtttacgctgatgcagatggtgatggtacttattttcgtgtttcggaacaatgggcttccaattcaccgggatctggtcggtttaagtttgaagacagactcgtttattccccaactgacggcgacgatcatgtgggtgtacgtgggggggaagactgccatggcggacaaggcgcggatgattttgtgattcgtgaggctgcacatttgcgcattggagacttcaactcgagcgaagataatttcattatatttgatactggtttgggccttctttcaagagaacatctggagagctttgttactggtattcaccgcagtgatgatgatcaagatttcatagtggattttggttcaaccgcatcagtcacgctggttggcgtcgcatcggaccaaatcagttgggatgatgttagtgtattgagttaggtaatttacgattcaatacgatagcaagctcatgacgaacgataaaatttaatcccgctctgattgagcttgccgatctgataacgttgtcaactgattgaagaatattttctaagcgttaagctgaagaaacattcatccttgcagggcctacttcctgctttccggttaaagcccccttgaatacctatttaaataccgcattttttgcggcaggggatctgcatctctttttccagaccttcaatatgttgatcagatttcgttatcaaatattaaatggctgatatgtaagaatattgaaggacttttaatttcgagtcacagaaaattctttattaccgagcattataaaagggagtatatatgaactacctatcacaaaagaaatggggcctcaaacttataatttgcgcatgtttaagtgttttgatgctaatgaccgctgcacaagtttttgcgcaagatacagcagctcaacgcatcaagcaattggaaaataccctgctagaaattcagaatgagttaaacagaatcaaagcggaatcgtcgcaaaccacaaggaaggttgagcagattcaggaaacatcggtacaaaccactaaaaaagttgagcagattcagcaaaccagcattccagctgaaaagaaaagttttgatttcaatggcatgagtcagaaaaaaatcatgctgtttttccgtggtggctatggtcggagcgatgaacatcgtaatggcgtttcactggaaagtcgtgttgcacctgtcggagcacaagaccaagctgatcgacatgcctggtataccggtgctggatttgattttcaactgaccaaggatacttggggttttatacccaaaaccgaaatccatgcggaactgatgtttgaatataagcagtatggtcacggcgtacaaggtaatgtgtttgcaaacgaacctacgcaattggcgggtggggcatacaatccacggggtgtaacggttaatcaattcactttaactgctgcaccgaaaatcaagtttaatcattttgccgaatataaaatcagaccttggattatcccggccggtctggcgatacatgtcgtcagcccgccaaccgaatccatcactgtactggagcctggcattatgtttgcagggggtctggaatataacatttggagagatttcttcatcggtgcggatgcgcgctatcagttgactgctgggtcattggatggcacgaagattggtggcatgactgtcggcggttatatcggtataggattctaatcctcaccgaaagcagttttgcttttcggagacaaagcattccaatgggtggggctgttatgaacgttaataaagcgactgtagtaaccactctaaaagatttctgtataactttggaaatttccctgtagtaacgagggaaatttcccgatgacatttctaagtgcttgttagcaagaattaaagtttcttaatccttttagggaagcttgtcttttttccttcgacttcctgtcttcttgtgaaccaaatggcaacccagaatcaatatgttgtgcttccatacaggagattcccggttgactcaacgcgtatgatccaatcctgacgatacaaagttcatccacatttttgttaaattaccgttacctatcaatatcttagtttcttgttctggctaacttaggagcttgtgcaggaaatacaagtttttccggattatcctgccatcggcgtacccggcatctcaattatctacgcgttcatccgacctgtcgtactaaacatatataggtaatgtccatccgcaaagattcttttgacggtattacgttcggagaatatctgaatctgtatggagataagaatttatccttacttgctcatgtaacttgcaataaacaagttacatgattacacttatatcacttgcttattgcaagttattaggaataaatatctgaatagatctttttataggagaaacatcatgcctttgtggaaaatttatcatcctgcggaagcattcagcattgcagacaaaaaaattctgtccgaacggattacaagtttgtatgcgggtattcccattccaaaattttatgtggtcatcctttttgaagccctagcccaggactcctgctttgtcagtggcgagccgcataatcgatttatcaggttcaaagtcgatcagattgccagaacgttgcccggaccggtcattcgggaatggtggatcagaacaattgatgaaatcatcgctcctttcgtaaaagacagggggtatgactgggagatttcaattgacgagaccccttttgatctctggtctttgcagggcgaaattccaccgccatttgaatctgccgctgagaaacgatgggtcaaggaaaacaaagcgagcccttataccttggcggaaaagcttccagtcaatctcatccttactccaggaatttcggatcgttagattccggcttggctaacccgaccgacccgatcgggttagccagggcaagaggatttcagccttcaatttcacgctaaaggacaacaatgacttatcaaacaatcaatccggcaacagggcaactgattaaaacttacgcggacatgcccaatcaggatttggagagcgcaattgcaaaggctcattgggttttcgagaccgactactggcgccatcgcccgatagctgagcggagcaaaatcgtttctgcggcagccactattcttcgccaaaagagtgaagaatatgctcgtcatttaacattcgagatgggaaaactcatcaacgaagcgcgtgcggaagtcgctctttctgccgatatactggactactacgcccgaaaagccgcgcactatctggaaccgagaaaacttcccgaaacctctgcagcggaactgcatatcgaaccactcggtgttttactcggcatcgaaccatggaattttccctattaccaaatcgcaagagtggcggggccgcaattaatggttggcaaggtattgctgctcaaacatgcggaaaacgtcccgcaatcggcgctggcgtttgcccgcttgtttgaagaagcgggagcgcctacaggtgtttatacgaatatatttgccagtattccgcagatcagcgcaataatcggagatccgcgtgtttgtggtgtcaccataaccggtagtaagcatgcaggtgcggcggttgcggagcatactggccgccacctcaagagagcagtgttagaaatgggtggaagtgatccgttgatagtgctcgaagatgcgccgctggagtcaacgctcaatagcgctttattcgggaggatgttcaataccggtcaatgttgcgtcggatcgaagcgcatcattgtcgtcggcaaagagcgcggaaaagaatttctctatggttttatccaccggatggcggcattgaaagccggggacccggaaaatccggaaactactctggggccattatcttccgagaaaacattgaacaccctgctgcatcagattgcacgggccaaacaagacggtggaaagattgttttggcggcagaagaattgatcggcctggtttttacctggagccgacaatacttaccggcatcaatcaggataacgcaatccatgcacaggaattgtttggcccagtggcttcattccaagttgtggaaaatgaggaagcagcgattcagttggcaaacgcgacgccatttggtctcggtgcttcgatctttaccgccgatgtcgggcgcgggcgcaaaatcgcaactaaaattgactgcggcatggtttttatcaaccaaccggtatgaacagcgctgatcaaaaaataaaggccgcatgtagcggccttctcatttggtgcatctttctgcttgttagcgttcagagcacaaatcccaataaactatttcgttgcatattctactcgaggtaactagaataatcaataaaatcatatagaaaccttacttgcaaccggagaatacaccatgctgcataagatgcgttatcgcctggcacttgatttaggatcaacttcactgggttgggcaatggttagattgaatgccaaccagcaaccttgtgcagttatccaagcaggggtgcgtattttctcaaatggacgtaatcccaaggacggttcttctttggctgtaacacgacgtgaagcccgcagcatgcgccgccgccgtgaccgcttgctcaaacgcaaggcacgcatgatgcgcacactcatcgaatatggttttttccccgctgatgaaacacagcgcaaagcgctggaaaacctgaatccctatgcgttacgtgccaaagggttggatgaagcgctgatcccttctgaatttgcccgcgcattgtttcatattaatcagcggcgcggcttcaaaagcaatcgcaaaaccgataaaaaagatagtgatagtggcgcattgaaaactgcaatcaaacaattacattcagttctcgatccgcagggaaatgacggcaaacctcgaacagtcggcgaattactttacaagcgttttaccgacctcagtaaactgccgaaggatcgcacagtgcgtgcccgctatcgtcaagacaaaaccgtcaaagatgacggtaagaccaagatcgataaatattatgatctctatatcgatcgtgccatgatcgagcaggaattcgatgcgttatggaagaaacaatctgaactgaatccaatcttgtttacagaaaatgctcgagccgatctgaaagatgttttgctataccaacgttcgctcaaaccggtcaaaccgggacgctgcactttcatgcccgaagaggaacgcgcaccactggctttgcccagcacgcaacgcttccgtatgtatcaggaagtgaataatctgcgcatcttgcgtgaagggttgaaagaagaatcattgacattgcaacagcgcgatgatctgatcaatctgctggaaaaaaacaataggcgtacttttacgcaaatcaagaaattgcttggcgtgggtggttcagtccagtttaattttgaagaccccaaacgtgaagaacttaaaggcaataccaccagcgccattctcggcaaatcggaacattttggcgaagcctggtttgcattcaatgaagccaagcaagatgccatcgtactgcaattgatcaaggaagaaaatgaagccaaacttgttcgatggctgcaagatgagacaggtatcgatgaaaaacgcgctgaagttattgccaataccggactgccggaagggtacggcagcttatgtatcgaagcgttggcacgtattttgccggagctgcgtcgtgatgtgatgacatacgataaagcggtgcaagttgccggcttcgagcatcatagcaagctcaatcggaatgaagaaattcccgatattactttcaaaattgaaagtatcgatcggaactccggtgaaatcaaggaattccaccttcataaggaactgccttattacggcgaatatctgcaacgtcatgtcggctttggcagcggcaaaccggaagattccattgaaaagcgttacggcaaaatcgccaaccccacggtgcatatcggactcaatcaagttcgcgttgtagtaaatgcgttgatcaaacgctacggacaccccagtgaaataattgttgaagtggcacgcgacctgaagcaaagcaaagatcgacgggatgaagaaaacaagcggcaagccgagaatcagaaacgtaacgaacggctgcgtaaagatattgcggacattctgggaatcagtgaagaacgtgtacgtcgggatgacattgagaaaatgattctgtgggaggaacttagtttcgatcccgcggatcgccgctgcccttattccggcgttcaagtgagtaccgtcatgttgttaagtgatgaagtggaagtcgaacacatcctgcctttctcgcaaacactggatgacagtctcaataataaaaccgtggcacttcgccaagccaatcgcatcaagggcaatcgtacaccttgggaagctttcggtatatcagatatcttggggtttgactatgcagggattctaaccagagctgaattaatgcccaaagcaaagcgttaccgcttcgccgaagacggttatcaacgctggctaaaagacgatgcgggctttctggcgcgcgcactgaacgatacgcgccacttaagcaagattgcacgtgaatatatgagcttgatttgtcccaatacgcgcgtcattcccgggcaaatgaccgctatgttacgccgcaattttggcctgaatgatgtactcggattaaatggtgagaaaaaccgcaacgatcaccgtcatcatgcagtggatgcctgcgtaatcgcggtaacggatcagggcttgttacagcgttttgcagcagccagcgccagtgcgcgtgagcggcagcttaatcgccttgtggaaaatatgccattaccgtgggagagttacagggaacatgtccagcgcgccattgatgggatttgggttagccatagaccggatcacagccatgaaggggccatgcataacgatacagcctatggtttacgaggtaatggcagagtcagtttctataaagtagtggatggtgcgcgaatatgttgaagagaatctgaaagttattgaaattgccgatgcaaaagccgcaaaacggcatggtctgcttcccaccggcaaaccaaaaccctacaaaggctacaaaggtgatagcaattattgtattgaaattgtccgtaatgaaaaaggccgctgggaaggtgtagtgatttcaacctttgaggcttatcagttggtgcgtaagcacggtgcggcacagcttcagcactccggtttgagcattagcggaaaaccattggtaatgcggttgataatcgacgatacagttcgattaaatgttgatggacaatctcgcacaatgcgaatagcgaaattaagtggtaacggacagatcttcatgtctaacataaacgaagcaaacgttgatgcaaggaatcgaaataaggaagatccttttgtctacatttccaaaatggcaggttctttacaaacagccaaagcgcgtcgaataaccatttcacccatcggcgagctccgtgatccgggcttcaaggaataacccaaatgatcggccgtatcgttgaagtagcggatgaccggcggcatctgtttctctctcgcggtttcatggtggtcaaagataccgagggggaacgcaaggaattagggcaaatacccctggatgacattgcggcggttatcgccaatgcgcatggcctgagttataccaacaacctgctggtggcgctggccgagcgttgcgcgccgtttgtgctgtgtgctgcgaatcataatgcagtgggtatggtgctgacgatcgacggtaattatcagcaagcaaaacggtttgatgcgtagcttgctgccagtcagccgctcaaaaagcggctttgggcagacattgtcaaatcgaaacttcagcagcagtctgacgcgcttgaggctgcgggagcaccatttattccgctgcaagctttggtgcgcaaagtacgttccggcgatccggataacttcgaggcgcaaggggcgcggcgctactggggacttctatttggcgatgatttccgccgcgatcagcagagtgatggccttaacgctatgctcaactatggttacaccgttttgcgcgctactaccgcacgtgccgtggtagcagcaggattgcatccgacaatcggattgcatcacagtaatgaaagcaatgcgatgcggctagtggacgatttaatggagccttttcgtcctgttattgatttgaaagtctggcagttgcatcaacatggcgaatcccaggtgacacccgacagtaaacgtgagttagtcagaacgttatatgacgatatgcaaactagtttgggagccacgccgttgatggtctgtacgcaaaaacttgccatctcgctggcgcaagtttttatgggggaaagaaataaaatggacttgcctttgccagggctgccgctcgaccttgctgcatcatttctggaggattaacgtgctatgctttcgggatatcgcttaatgtgggttattgtcatgttcgatttacctgtcgttgaaaaagctgagcgcaaagccgcgacagattttcgcaatactctgttggatatgggttttgaaatgtcgcaattttctgtctacatgcgtttctgcagcagtcaaagtcagatcgatacatattgcacgcaagtagaaaaaagcttgcctacaggcggcaaagtcaatatcttgcaatttaccgacaagcaatacgaacgcatcattacttttcgcggaaaaagcaaacaagcaagcaaaaaatcacccgaacaatatgaacttttctgacaaatatcatgatttcttcactggcatgcacattaactcctctaataatcatggagttaatgtgcagctagtttagcatattgggatttgtgctctgaccggaacctggaaataagtgggttctatcagtgacagtacgagcattcaaaatatgactgaatcaagcgagcagagtgagtttaatatgagttattcagatttatttgagaatgataataagaatcgtttgcaattataaaaattattgtgtaatatgcgaactgtccatcagttagggattggcataccgcagcaaccagcgcattccctcgcgtagtcggatggtagcaaattacatttcttgttcttccttgctgcgtgaacataagccctcacgcatcacttgcccggcacattttcctctcttccttttaatgtgccgggttcctttttggtatccgtgtggtgttttcagtaactcgatcatgatcttccctgctctccggttggtttcgtttttcgcagatagcccagtccgcttaagatagttccgggttgttgcttaaagaggagtggttgtcgagtggttcgtggaagtggtgattgagtacaagctatgcagtcctacgcgcgccgattggcgtcctgggtcattcgtcattcgtcatctatgtaagtagttggtcagaggatcgataatatatggcccggatctattcgaagccaatccggatttacccatgttgctagctgagggcaaaggatgcgccgatatcggcaacgagtatctgctgaaaaacgtactaaaaaagtatatgggtgtttgcttggccaagtgctacccaggcagtcatcagcgttctgaccggaaccaccgtcgattttaatcgacggtggttggttgattccattatttaggtacctccggagctgcttccggcgctggttgcgtttctgtcacgaaaatttccacgcggcgattttccgctctattttcaggtgtgtcattctcagccataggttcacgggagccgcggccatcaatttgaacgcggttaatcgatacccctcggcttgccagataatcgcgcgtgctggcagctcgattaacggataatggattgttgattgcatcgctgccggtattgtctgtgtgaccgatgattttgacgactgtgccttcattactaatcagggtagttgcgaaattatcaagaatgggtctgaagccgggtttgatgtccgcccggccggtgtcgaaggagatatcgctgggaatatttaacttgaggcgattgtcttcggtttgcgtgacttgcacgcctgtgcctgcggtggctgtttccatttcccttttttgttcttccatccgctgtgaccacatataaccggcgccagcaccaaccagagcaccagatcctgcgccaatggcagcccctttcttgcctccaatcagtgcaccgatcgcagctcccgtacctgcgccaatcgcggttccctgtgctgtgccgcgttgcgtgtccgtcatggttgcgcagccggtcaatgtcagaattatggttggaatgattaaaattgaaagagttttcattgatatctccttattgcgttatttcgttgtgcaatagctgaaacagatttcagattactattgcgataggatttagagaatacaaccaccccctggatatttcataggcagtgatgaatatcgtatcagtaaataccataagattttacattgaaacacaaataagctctcaaatcgcaccctatgcgaatacatatcttttatgccggatatgccgcacttgagcaatttttatgtctttgagatttaattctctgcagcttgctgcgatcaggaaagccgatgtggtgcgcgatacgcaaacggatacgctacagggctttgaaaagttttcaggcaagttcactagagtatgagctgattggcaggggttccggactgggatactcttatcactcaataagtttgcaagaaaacttaaagaggaaaatcaaatcacgatgggctacaatcccatctcacaggtcgagatactctcggttcagtgaaaaactgtctgtcataataggataactccagattgtttgttgcccgagaaccctgcaccgattcagatcataaacatacctaaatccgtgtcggtactacacaagggcaaggcttaaattccaactatgttcagctcaaggttcaatttttaatggttacttctaaagtaaaaaataaagatacctctaccatattgggtaacaaggaattggtatccaggaaagtaagaaagccagctgttaaattcctcaagccagaggatttgccgcttcttttgcataataatcaaggtaaactggttgcaggcatcaaattagatgcgcaggaattcgcaaatgatgaatttcgactaaccgggtggagcttgggttcacctgccattaggttaattcgggatggtaaggaagttgatgcaaaactcctccatattccacgtgacgatgttttacaagcttattctgttacctcttattttaatccgggttttgagtttattgttaaaaatcctgagcaaggaacatatgggttgcgttgggaacttacggcagaaggaaaaaaaataccaattgattttcaattgacgatacagattccattaaatgcagggagcgtttcaaaagtgattcaggcagaaggtgcaaacattaacagcctggtaaagatgcaatccggattagggcgaagtatcaggtactacattgactgtgcggtatccatcaaaaatgggattctgttgttaggctggttggatgatcgtttgatggcggttccaaagatttatgtacaaacgaaacagaatttaccaaaaggcttcttgcttgtagataatcagcaaggggtgcagtacattcgtacgtttcgcccggatgtttcgagagtgtttaatagccagcgcaatataggtattgctgtatggctgcctttcgaagttactgaagaaaaagaagtaacagtttcgtttgataaggaattaagatcaaagcaatcggtgccattgactgcattaaccggtgataccgctgcgttggaaaaaacacttattttttcaagttctgcactgcatgatatcgcaaggcagcagaatgtttccgagttattgacctggctggatgataatgaattccgatttttcgagaaaaagattgaaaaaatcgctggagtcgatttggctcttatgatctttggtaaggcattgttgctgtggggttgggttgctgcggaagataccgaagtttctcaaatcgaattagtagccggagatatcaggattgatatcaaagaacgaatggtaagggtgagtcgatcagatttgttttcaatatatccgtggctgaaaaaacatgccttaggtttcatggtattaattgatgagtctgattttcttaattcttctcaagttaagttacaaattcaggttggtatacaacggatcaagcttccgatagaaccagaaatcgctgattggtcaatgttcctggatgtgatgaatagtaatccggttttaatggaaccgattacccaattgcttctggcttgtcccggtatccgtgcattgcccagattcgatgaacagctttctgcattattgcgcaccgttttcctggcgcatcataaggttttgccaagctttgtggataatcctgaaatcattagcgttgcaattgattatgtattttcattaaacgaagggggtatgctgctttttgggtggcgttatgagcctgcggtttcaccgtgcagcgtaaccgtacatggtcccgaagggcaatgctgtgatgtaacccgtgattttttttctctggcacgttcggatatatcggaaaatcttaaagagcgttatccggaaataactgatatgtgcggttttgtttgccatgtccctttatttaccaaggcaggtgaactgcgcatgatttgtttccgttttggcgagcgcggtaacgtttggttaaagttgcaagtaaaaactgaagaacccgatgctcttcaactgatcaagaatattctgggtattatcccggctcctgacagaatccgtggttctctctatgagctattcgataggactatagggcaatctattgagttattcagcgcattgcatcgcaaaaaaatagatgacatttttgagcgtcaatttggagaaccacctgcatcaccggcgatatcaatcattattcccctatatgggcgttatgatttcatacgtcatcagcttgctcattttgttgacgatcccgattttgattgcgtcgatcttatctatgttgtagatgatccttccattttgacgcctgcgcttgatatggcggtggcatatcatcaattattttgcaaaccttttcgtgttatatggtatggaaaaaatctcggctttgctggagcgaacaatgttggcgcaaaagtagctcgtgcagatactctgcttttgcttaattccgatattttacctaaagtaaatggctggctttcggttttgtataaagcgttatatgaattaccgcaggccggggcagttggaccgttgctgcagtttgccgacaattctattcagcatgctggaatgtgtccaaagcgggatgcttttttgccgggatttctactgaatgtgcatccgggtaaggggatggtctgggaaaaaggtgatgaacctacccaacaatcgatgttgacaggcgcctgtatgatgttaagtaaagctgattatgaggctattggcggattcgatgaaggttatatcattggtgactttgaagacagtgatctttgtttgaaactacgcaagcacggacgtacgctatggctgatacctgcagccaagctctggcatctggaacgccaatcacagaacttggaaaatattgccacttaccgtcagcttcttacgctatacaatgggtggcgttaccataagaaaatccttaaaggtgaaattgccaatccggaagagagtggaatctgatcatgcgtatcgtcattttgagccacgctcatccaacattcagcaagggggggggcgagattgccgcctacaatctgtttaaaggtattaacgagactaatatacacgaagcctggtttgtcgctcgcgccgacgcaaaactaatgcatttgggtacacctgtggcagctttgaatgagcgtgaatatcttatcgccggtaatgccggtatttctcatctcactgctactatcgatttgggcgatgatagcgactttgcgggaatgctgcgtaacattcagcctgatgttgtacattttcatcactatatttttcttggggtggaaatgatccgggcggcgaaacgcgtttgtccaaatgcgaaaattgtattgactctgcatgaatatattgctatttgcatgaattctgggcagatgatcaagaaggatgggaggctttgttatcggtccagtccgcgtgaatgtgctcaatgctttccggattggactgcggaggatttctttttgcgggaacgctatatcaaaacctacttcaaccttgtcgatcaatttatctcacccagtgaattcttgcgtcagcgttacatagcttggggaatcccggcagagaagatcatggtaattgaaaatggcttgccacctggagaaaagttaccgcctcgctcattgagggcagatgaatcgcgcggcaggtttgcatactttggacagattaattcatttaaaggtgtggatttgattcttgaagcatttgcacagttgcccaaaaaggtgcgaagacttgcatcacttgatatctatggttcagggttagaatggcagaatgaagattataaaaataaaatcaataagttatttgaaaaaaataaggatattattcgttatcatggctcctacgaatcggaagaattgagcaagttaatggaatccattgattgggtagtgatgggctcaatctggtgggaaaactcacccgtagtcattcaggaggcatttaaatttggaaggcccgtaatttgcccggatattggaggaatggctgagaaggtgaccaatggaaaaggcgggttaaattttcgtgcacgtgatagcctgagccttaaatcattaataacatctttgttatctgaaaatgatatatatcaagaagtaactgcagaaattccgccttatttggattttttttcatgcgctaaaaagcatgttgaggtttatgagcggtaaaagggaatattgtataaagtggcattgatggtgagaaatgaaagattatttttaacgttcagaattaatgttcatttaaacttcaaataatataaagacatgactcaaacaaagaaatcagattcagttagtttaacttccaatatgaaaggttatgttgatagagctgattcgcaatatgtagctggctggttagttgatttttcggatgtgacaaagcatttgcgagtaaaggtactaattgataatacagaaatatgctctggtttggctaatctctcgcggcaggatttgaccgaaaacctggatcttagaaatactgatcatgcttttaatttaaaaataccggaaattcttttagatgatagagaacatgaaattaaagtcatcgaagctgaaacagggtttgtcttaacaaactcgccggttaaagtcatgctgtccaaagccggctctcaaaacaaacgtagctatcagtcatgggatgatgctcaaggagattctaattccctagaaaaaagaaaacatttaagacttccaagacttgaaggtttgaaagttttagatattggttgtaatgaaggatatttttgcaattatgcgatcagaaatggagcaagcagagttgttggtattgatacaaatcctgttgtaattcaattggcaaaacaaagaactccagaagctgaatttttacatactaattggtggaatttacctgatgaaaaattcgatattatttttttcttttctgctattcactacgaaaagaatcaaaaagccctgcttactcatttaagaaattacttgactaacgatggtttgttaattctagaatgcggtgtagaagaaccttttaggggagctaatcattggtgtctgattcaacgacatgatggtcctttgcgctatccgagtatggattatttaatggatacattgttggatggatatgcagtgacattgatgggaaggagtgtcgctcaatctggcgatccagtcccccgttttgtattccactgtcgatcacgcaagccaacctttctttttttgtatggcaatagcgggtctggaaaaacatttttagcgcgtaatttatcaaatcatactattccaatttatggttttgattctctattctatagattaattgacggcaagaatattcctaaaaataaagtgtgtgaatttataaaaaacaatgggaatgtaatgaagcttgatactctttctcaaaagttagtgagtaacgatctttatgaagaactcatcaagttagtgatggaagaattgcctttcgaagcggatatatctattcttgaaggggagatcttaatacatgagaacttcagggaaacattaacacagcgaattgaagaaaaaggtgggcttgtatggaatgtaacaaagtcttaaaaacgaatggtggacgtaagatcaagaatcttatgtgcttacgataagagtcaacaggcaaattaagtagaaacgtatccaagtaaggaaaagtgattttttaggctgtgtggatatcgttggtatatgtaattcttgttttttcggcagcgcataggggttattagtctccctttctgttttgtcagagcctaacaatctgtccagtttttgggtatcacttcaggagtcagtttttgttgttttgtttattttcggcttcttggttttgggagcgatagctgtgttctgtttcaattcctgttcgacagtggccagattctcgatggcgtcctgataaccggagtggagcttgatggcttgtttcaactccttgcgtgcaccggtcagatcgccctggatgcgcaggagattgccaagattattgtgagcggccggggaatcgggttgcagtgtaatagcctggcggtaagcggctatggcttcgtcgagtttgccgatgcgtttgtaagcgacacccaggttaataaaggcagggaggaaatcagctttgacttt

SEQ ID NO: 1846 - DNA, 22561 bp, synthetic construct
  source 1..22561: mol_type = other DNA
  misc_feature 1..22561: note = Synthetic
cgccgcttgagtacgtgtctgaatggaaaagcagttcaacaaccggagccgtcgtttctaaatgaaaatggtccgataaaaccagacaggtcaaacacaaaaagtttcatcagggagactctaataagtgcaatgaaatattaagccaatatgattggtctgcactcattgattcgtttcagcttgggaatgcagtattaaaaggtaaccaaaagaaaagggaccacattgctgtgatccctttgtattgctggtgggtcgggcgagattcgaactcgcgaccaacaaattagttgatcccatcatcttcaaatatttcttttaactaaaattagaagttatctaaatcttttttcgaaaaataatccactagaaaatcaatcaagaccctaactttaggtgcaatatgtttacgcgtgggaaagatggcataaatgcctagctcaatcgacttgtatttgggcatgatttctactaagtctcctgcacgaatagcatctcccacaataaagctaggctgcaaaacaattccttgatgggcaattgcagcggaaaggcaagtatcgccattattcgtttgcataaatggctttatattcacgctctccccaccatttggtccatcaaagctccactcctctttgcctgcccaataactgtagttaatgacttgatggttcattaagtccgcgggtttttttggcgtgccatgttctttaaggtatgttggtgaggcgcataaaatgatacgagtagtagtgagttttttactcaccatagtagaattcgttagtgcggcgattcgaatggcaatgtcatacccctcatctacaacgtctactaaccgatctgagagcacgacatctaaagtgacttttggatacttctggtgaaatattccccacaaaggcgctagctttcgaataccaaagctaaagggggcgttaatccgaatttgcccgctcacatcctcagtgtgagaagtaatttcgttttcggcgctttcaatagtttccaaaatctctttgcaacgctcatagaagagctcaccttcttctgttagggagagtttgcgggtggtgcgatgaagcaggcgaattcctagtctggtctctaagtcaacgaggtgcctggaaacggctgctttggacatattgagtctatctgctgctttgacaaagctccctgcatcgactacagcggtaaaggtagtaatttcttggaatttgtccattgttccgatttattgaacagttaatctcataaatgctagtttatctattaattatggaacagtaaagttctacctaaggaaagaaggctttccgcttaatttactaaacaaggagtattagatgaaacacacttatgaaaacgctttaaatctggttggacgacttttaattgttgccctatttttaccggctggcttatcgaagattactggttttgaaggtaccgttggctacttcacttctttgggtatgtcagctcccacattgggcgtaatcgttgccatcattgctgaagtcttgggcggtattgcattgctcgtaggttttcaaactcgtatcgtctcagttctgttggctgtcttcacattggccgcttcgattactggccacgcattttgggcagctcccgcagatgcggcattcatcgcacaactcttattctttaagaacattgccgtaatgggtggcttgttggtattggcatcaagtggcgccggcaagttcagtatcgatggtttgaaagctaaacaagattaagccttgagtcggagcgcctctactttcgttgatggggtaggggcgcattcgctctacatatatagataaagagtaaaaaatgacaaccttagttgctgcccctcttatgttcatttctcatggtgcgccgacctttgccattgagcctggcttcttgggtgagcagttaaatcatatcggccaaaatcttggtgatgtcaaagccatcttagttgtgtcgccacactggcagactgctgatatagaggtaatgactaatccccagccagagactattcatgacttttacggttttccaaagcctttgtatgagctttcatacccagttaagggcgcaactcatgtggcaaagaaagcaattgatgttcttaagcaggcaggcttaatcgttaaagaaaatccttcccgtggtttggatcatggcacttgggttcctttaatgcatttattgccagatgggaatattccggtatttcaagtttccatgccaaaaggtctggatccacaaagtgcctatgatctaggtaaggcactaggccccttaagaaatgagggtgtgatgattattgcttcgggcagtatgacgcacaacttacatgattttcgtcaaggcgttggtggcgatcttccctatgtcagttcatttgccgattgggtcaaacaggtagttcagtctgaaaggttggatcaattattggcgtatcgagagtctgcacctggtgcaatgcgtgcgcatccaacggatgagcatttcttacctctgtttattgccttgggtgcccgcttaaatgatgtcaacttacgaacgatcgagggcggtattgagtacggaatcttatcaatggattctttcgcatggggtttgaatcaatctattagaggtaatttgagtgaagaagatgtgcacgaaggaagcgaggcttaaagatgattagccagctattaccgggtgctcagtttgcctatcgcgtacgaccagcttgtgtcagtccaccaaagggctgtttactcttacttcatggggtaggtggaaatgagcgtaatttttcagaaatcagcaaatggattgatccagctattttggtgatcatgcctcaaggcccgattgcattaagcaatagtggcgatcagtttgcttggtttcatgtgacctttactaaagatggtccgcaaattaatgagcaagaagcggatgagagtcgattgcgtttattggtcttcattaaagaaatgcaagcgctatatcaagtcactagtggcaatacggttgtggctggttttagtcagggaggcatcatgagtgctagcgtggctttgactttccctaatgcagttaaaggctttggcgttctctctggacgaattctgcctgaaattaagccgcacattaataatctagaaggtttgaagcagctacaagcttatttggctcacggtaagtttgatagcaagctgcctattagctttctatttcaagctgatgaattgctaaacgatttaaacgtgcctcatgtaagcaaaatttatccaatggatcatgagatttctgaaaatgagttgaaagattttgtgcaatggcttaatgagcacttcacttctgtagatgccatatcaaaactattgaattccacatgattccaatgatctcggtgcgtatgccacgcctgatctagtaaggcttaagtcattgtttctgctattgatttagctcatttttaaagcttctaaggccttgcttcgaaagatttagtttttatgtgggggggtaagaagagaaaagctgtgaaatggggtagagccgagcggtagagccgagcactggcggagagggtgactgccagccggttgtttcagtgaatatcataaacgatcatttaaacaattaaatcaataacttacgaataaaatattgctacatcttatatcctctgatatcatgaaatatcatcgttttggatatgtaggtgagtatgccgaaaatagcaaaggtactgacagcagttgaagttaaccgcatcaaagacactggttggcatgcagttggaggtgttgcgggcttactgcttcaagtgcgggagccatctcaggaaggtgctatgccggcacggtcatggctattacgtgtaagggttggtaatacacgacaccctattggtttggggtcataccctcaggtatcactcgccgaagccagagagcaagctaaaggcttggtgatggaagccaagcaaggggtaaaccttaaagtcaagaaagacgagcggcgtagcgctttattagccgcacaggcaaggtctaagacatttgaagaatgtgccaaaacctacatcgaagccaaaggggtagaacatacaaacgataagcaccgcaagcagtgggtaacgactcttgaaacctatgcttacccgattcttggcaagcggttagttgctgatataacgagagcagacgtactgcgagtgctcaatcaaccggcagaccctaaaaaaccagatgcagggacgttttggctagttaagaacgaaacagctaatagggtgttgggtcgcatcaagactgttctggactatgcaaaaacaagtgaataccgaagcggtgacaatccggcggagtggacaggcaacctaaagaacatactccctgcacccaataaagtagctaaagtgaaccatcaaccggcagtaccctatgccttggtcggtgatttcatgagcaaactaaggcttaacgaaagcatcagtgctaaagcgttgcagtttctcgtaatgacaggcgttaggtctggctctgttcgtgccgctgaatggtctgaaattaaccttgaagaaaaactgtgggtaatcccaccggagcatacaaagacaaagcacgagcatcgagtaccgttgcccccgcaagcaataaccttgctcaaatccctgcccaaactagccgacacaacaaagatattcccgagcacaagaggtagtgagttatcagatatggcactcagccagttgatgcgcggcatgcaagagcgtggggagctacccgttaaagccgtaccgcatgggtttagatcgacgttcagagattgggcagcggagtgcacgagctacccagatgaaatacgtaaagcagcaagtggtcatacagtcggcgatgcggtgcatcaagcctaccaacgcacggacttacttgagaagcgcagaaaactaatgaatgactgggcgaagttccttgacctacccagtgcgcaagatgcgcatagtgggacgggtccagcgagcgtgggaacggtcacaccgatcaggaggcgtaaagcatgagcaagaacgaagcagggttagaggcgctacttttgagagttgagtacaccaaaacgcagcgacgggcggcagagaaaatattcagcatggtgctcaaagagcaagggtctgatgctgatctcaagcagttagtgacacgcggatctttacttgagctaatttttttgctaattgaccacaccaagacagtgcgtgcacggggcgcacagagaaagtcgtccttggtagccagcttggcaaaggcaaaggctataaaaattctgtatgactggctggataagaacatacataaatacagtggtcggctcgcagcttgcagcgaagatgcaactcaaatccccgggctaggcaggggtgatagcttcgtcacaaaacatattgcccgctatcgcaaagaaagaggacttcggtaacaaaatttgcacgctgcagcagcgtgcatgtacggcgcatcctaagtaaatcagaatcaagttatgcatcgaattgaggtgctcttaactgatttataaggacacaacgcttatgagttaccccactatcaatagccgtactgcaacactacaacaaacggctaactacgacacactacctgacgctgtattgattagacccaagcagcttgtagcctctggattagtgcctttctcaatcgtaacggtctggcgcaaagctaaagccggcaccttcccctcccctgtaaaagttactcctgctatcactgcttggaaattaggggacgttcgcgaatggcttaaagaccctgcgaactacaaagcagaggtgtcagcatgaacaagaaaagcccgagcgcacgaaatcaagccgcaattaactgcacagagtggcaacttgcagctgcacaagacttaaccgacttattcgtggctagagacgtaccgttgaaagagcggtgggagtttatgaaaatcgttatggagtcaatcgtaaaaaatcacaagcgcttattgaaagcgtgggagcagcaggatgctgaataaaaagcgccgtctggcaggacggcgttaggtaagaacaaactacatggatattgtaatgcagacaaacatagcaatgaaagatttctcagcggtcattcccgctgaattacaggtgcagtcaacgtggttaatgcacagagacaaacgaccagttgatttcacgggcttatataacaagccttatagcgataaatcaatatggatgcgcatgaattctgctttagccctagctgaacgcaaagggttggcagtgggtatcagtttgactgaagacggcttaaaggtgtgtgatgaccattatgtatattgttttgatctagatggattcctttgcggtagtgacgatgacgacggcgtggcaacttttgttaacaaggttggtagttatgcagagatcagtccgagcggtactgggtcaaaaatctttgttgcagtagcggcgaaaccaagaaaagatatgcagatagttttttcaccgagcaaatttgcaaagactaatccagaagcgcgtaagtatcagaaccgatgtattgaagtcttcagtcagaagcggttccttgctgtcacaggtcagtcatacacaacacccccactgccgttaaagttaattagtgcggatgagttcgacgcgctgattgattacttagaccattgggcatgcagtgaaggcggtagtggtgttaaagcccgtagtgctgcaccaaagcctttaaatgcctcgggttttaccgagtggaacggtcattacggcaagctgactgaggcttgtttaaaagcggttttgggcagaataaagcacgtcgatgagcaatcatggtctgatgcatgtaatgcgcttgcaagagcttacggtgagtctgggaggggatatttcatccagtggtcaaaggatgggtatgggcaaggtgcgtatcaagattttgatgagggagtagttaatgccagatacgatcgcgcactgcgagaggttactggcaaggcgggctttggttgtaaatatctttgtgagcaagcggggtttaatacctcgcaattgcagtgggaaaagaccgttgaggattttggcagtgggtctctgtttgagaccttgggtattagtaatgaaatggtgttgcaacgacagttatttcctgagcaaggcatgctgtcagagcttgatagcgtggatgtacaccccaaacagataacgaagataagggaagcacgaggggatgtacgcaatggacagatttatgccgcacaagcagcgggtcagtttttgtgtgtgcactcagataagtcatggctgatgtggtcacaggcagatcaacgatgggcacggtgcaataaaagtgaacatatccagtttgggaagcaagttgcccaagcgatgttagaaagatctgcaaaagacttcatgggtgacgcaaagcggctcaatgaaatagcgcgcatacaagatcagcacaaactaaacgcaatgattgatatggcagctactgagccaagcgttgcagttgattcaatggtggagttcgatgctgatcctaacctactgggcgtgcgcaatggcgttattgacttgagatcgagcaaactactggcgccaacacctgaacagcgcataactaagcaatgtaacgtcgagtttaatgaggaagcactctgcccgctgtgggagcgattcatgctgcagtgctttaagggtgatgccactatggttgactatatgcagcgtgccatggggtacacgctctcgggtttcgtcggtgaggaagtcatgcacttctggttcggaaacggacgcaatggcaagtcggttgcaattaatgtttttagcagaatcttgggtgattacgttcatgtagcaagtactgagttgattacctcgaatgatggcaagagcaaagacacgatgtttgccgcattgcgtggagctagactagtaatgctcaacgaaaccaaagcagggcaacggttggacgatagcgcgattaagttactggttggacgtgagccaattgcagccagaggtctatacgggagacagttttcttttttaccaactgccaagctatatgttcgtggcaaccataaaccgatcgttcaagatacttcggctggaatgtggcgcaggatgcgccttgtaccctttactaataacgtaccagaagatgaggttgatcctaaccttgaaacaaagctatgggctgaacgtgccgggatacttaactggatgctccgaggctacgctgaatatcaagagcgtgagctaaagcctcctcaagctatcgtacaggcaggtaaaagttatcagcacgagtctgacctactcaacgaatggctagaagacaataccgatcaatccgaccctagcatttgcaccccgattggacttgtttacatggactacacccagtgggctaaagagcaagggttaaaaatcatgtctaaaaaggcgttaacgcaacgattgcaggatcatggtgtgtcagcaggtagaacaagtagctcacgtttttatgaaggcttgaagttactcaacgtctctcttgctgcgagggcactgtcgtgacggtgttgatgatgacgcttgtgacttatgtgggggtgtttccctttctttttcctactttttttcctataggactttagggaaataggagatatacgtcacaagcgtcatcaacacctaccccccccctgcattatccaaaaggtcaataggctttttacccagtatcaggatgcctcgcatcatgcctatttacaacccatgtcaaatcttgttctttccctgatgaccgttcccttaacaacacctacaaccaaacactttaaccattcttacacccaaggccatctacatactaacttcggagtaaaccatgcccctgccctacctgacaccagaaatacaatgcacagccaaatcaaaacgcagcggggtgcgctgcctcagagcacggtctcttaattgggtgggttgtaccgtctgcaagatgcatggtggtggacgtaaccctgcaaacttcagtcagcaagggcgtgagtctggtgctgctttagcagaaagaaagaaaaagatgcgagagcttcgcgagcttgaaagttattgcaagagtattggtttgttttctaagacaccgttggctattgatccctcgagatcggctggctaggcgaatgcactaaccgaataggtacccaatgcgctagttttaaaacagcagactctggccgtcatagataacattcactaaccttgcctcatggagtgagacagcccaatgtttttacagtcgaaaaagacgaaagccgcacatggcggctttccatttggtgcatctttcagcttgttagcgtccagagcgcatatctcaatcaactatatgggatactttagcatactaaattaaataatcaaacgagcgttaaaaggggtaggaaatggccaaaatgcgttatcgactggctttagacctaggcagcacttcgcttggctgggcgatggttcgactcaacgatgccaacgaaccccatgcaatcatcaaggcaggcgtgcgcatcttcagcgatggccgtaaccctaaagacggatcctccttggcagtcactaggcgtgatgctcgagcgatgcgcaggcgacgcgaccgcctactaaagcgcaagtcgcgcatgatggccaacttggtcgaatacggtttttttcctgtcgatcccgtagctcgcaaagagtttgaactactggacccatatgaactcagagcccgaggtttaaacgaggcattgcagccgagcgagtttgcccgcgccctatttcacataaaccagcgcaggggctttaaaagcaacagaaaaacggacaaaaaagacaatgatgcaggggctctcaaaactgccctaaaaaacctacgtgcagcgatggtctctgatggcagtcgcactgtcggcgagtggctgtacaagcgtcatactagcggtcaaaccgtgcgggctcgctaccgtcaaacgcccgtcaagcaagaaaacggaaagaccaaaattgataaaagctacgatttgtatattgatcgagcaatgatcgaggccgaattcgatgccctgtggagtgctcagacaaagttcaattcaagtcagtttacagaggatgcccgcctcgccctgaaagactgcttactgcaccaacgtccactcaaacctgtaaagccaggacgttgcaccctattgcccgacgaagaacgtgctcctctggcactgccaagcacccagcagttccgcatgtatcaagaggtaaataacctaaggatccttggcgaaggacttagtgaagggcctttgacattagcgcaacgcaacttactggtcactgctctagaacaacacagtaaacgttcattcacacaaattaaaaggttgctggatttaagcggtgcagcgcagttcaactttgaagacccaaagcgtcaagagttaaaaggtaatacgactagtgcaatcctttcaaagactgattactttggtgcgacatggtttgatctcagcctcgagcggcaagacgaaattgtgggcaaactcgttaacgaagagaacgaaacgcttttgatcaactggcttcaaaatgaattcggttttgatgagcgcaaagcagaaaaaatcgcaaatgcagcgctgccagaaggatacggtagtctgtgtgcaaaagcgctcgtcagaattttgcccgaacttaaaaaagaagtcgtcacctatgacaaggcattagtagcagctgggtttgagcaccacagcaatattagtcatgcggcaacaggagaaatcttacctctcttgccttactacggcgagtatttacagcgccatgtggggttcggtactggcgtacccgaagatcatcctgaaaagcgatacggcaagatcgcaaatcccaccgtacacatagggctgaatcaaatccgcgtcgtcgttaatgctctgatcaaacgctatgggcatccaagtgaagtcatagtagaactcgcgcgagatttaaaacaaagccaagagcaacgtaaagaagataacaaacgacaaactgagaaccaaaaccgcaatgcgcgactgcgccaagatgttgctaccgcattaaatatctctgccgaacgtgttcgcagagatgatattcaaaaaatgcttttatgggaagaattgagtcacgatgcggcagaccgtcgttgcccctacagcggcgtacaaatcagcgttcagatgcttctttccgatcaggttgaaattgagcacattctgccattttctcaaacattagatgatgggttgaataacaaaacagtggcaatgcggcaggctaatcgcattaagggtaatcgcactccgtgggaggctagaaatgacttcgcggcacaaggctggaatcacgaggatatgcttgctagagcagaaaaaatgcccaaaaataagcgctatcgttttggcgatgatggctatcaacgctggctacgtgaagacaaaacttttttagcgcgcgcactaaatgatacgcgccaccttagtcgagttgcaagagagtacatgagtctaatttgcccacaaaatacgcgcgttatacccggccaaatgacggcaatgctgcgcagcaagtttgggctcaacgacattctcggtttgtacggtgaaaagaaccgaaacgatcataggcaccacgcggttgacgcatgtgtcatcgccgtaacagatcaatctatgcttcaacgatttgcgaaagctagcgccaatgcaagggagcaacacttaacgcgcctagtcgagaacatgcctctgccttgggacacttatagggatcacgtagcgcgtgcaatcaacgcgattttcgtaagtcataaacccgatcacggtcatgaaggtgcaatgcataacgacacggcttatgggttactgagtggtggcgttgtgcgaacgcacaagattgttgatggcatccgccagcgagaagactcgaatttaaaagtcattgagatgactagcaataaggcacctaagcggcacgggttattgccagacggatcgcctcggccttacaaaggctataaaggcgatagcaactactgcatggagatctacaggacagacgacggaaaatgggcgagcgatgtaatttcgacttttcaagcttatcaaatcgttaggcatgagggagtggcgcgtttacgaaatccgcgtcttagcttgaatggtaagcatttggttatgcgcctactcatcggcgatacgttgcgacttgaagttaatggaagaaccgaaacggtcagaattcaaaaacttgcaggaaacgggcaaatatttctagcctcacaccaagaagcaaatgtagatgcacggaatcgtgacgcctcagatacatttgcatttgtttcaaaaatggttggatctttgcgaactgcgaagggtaggcgagtaacagtttccccgatcggtgaggttaaagacaaaggcttcgtggattaaacctatgctagggcgtattgttgaagtagctgatgacagtaggcacttatcggcgcttcgcggtctaatggtcgttcgcagtaccgaaggcgatcgtgaagagctaggccgtatcccactggatgatattgccgcagtcataggtaatgctcatggtttgagttatacaaacaatctgcttgtagcgcttgcagaaagaggcgtgccattcgtactgtgcgcggcaaatcacaacgcggtcggaatgctactgccgatagagggtaattttgagcaatccaaacgaattgagtcacagatttcagcaaaagcccctcttcacaaacgactgtggggcagcattgttcggtctaaattgactcaacaggctgcggttttagatgcagtaggagcaccctcagtcccgctaaaagctttgatttctaaggtcaagagtggtgacccagaaaacatcgaagcgcaaggtgctcgtcgatactggagcctactttttggtgcagactttcgccgtgatcgcgatttagatggcatcaactcattattaaattacggatacactgtttttcgtgctgccacggcgcgtgcagtgattgcagcagggctgcacccaagcatcggtttacatcacagcaacgacagcaatgcgatgcgactagtagacgatttgattgaaccctttcggccgatggtcgatcttgtggtctggcatttgtggagtaaaaacgacgccgaagtaaaacctgaaaccaagcgcttgttagtaagcactctgtatagcgatatgcagagcaaagccggggtcagcccaatcgtggtctgtatgcagaatctggcgatttcgttagctcagtgctacctaggcgagcgcgacaaacttgacctgccgttaccgtcattatcgattgccttggcgacagcgtacccttctgattaagcgcttgacccccatgctttcaggatatcgacttgtgtggatgattgtcatgtttgatttacctgtggtcgaaaaagcggaacgaagggccgcaacggagtttcgcaataccttattagatctaggtttttctatgagccagttcagcgtctacatgcggttttgtagcagccccacccaagttgacacgtactgtaaacgggtagaggaagccttgcccgaaggtggcaatgtaaacatcattcaatttactgataagcagtacgagagaattatcagcttccacggccgcgcgaaacaacccgataaaaaaacaccggatcagtttgatttattttgaaaaatcaacagtatttactgatcagaagcgaaaaacccactgacgtatcaatgggttatcggacttggagtttacttgattgagatatgcgcactggccggaacttacgagatgcttgggtggaaatgggaggaagtttacttgattgagatatgcgcactggccggaacgcggaggttctatgagtgaacggctaaaagagtttacttgattgagatatgcgcactggccggaactaatgcacaagctgcgaagtaaaaaatattagtttacttgattgagatatgcgcactggccggaacccggattatcggttactcaaaaaaaggacaagtttacttgattgagatatgcgcactggccggaactaatctgggtcaatttcctctaaatgctcgagtttacttgattgagatatgcgcactggccggaaccagtagaggttaaaaacgtgtacgggaatcagtttacttgattgagatatgcgcactggccggaacagcgtcaacattttgcatatttctcgataaagtttacttgattgagatatgcgcactggccggaactgctttattgggaatttatatctattcattagtttacttgattgagatatgcgcactggccggaactccaccataataagtagcggtaccagaaatagtttacttgattgagatatgcgcactggccggaactgccttcaaataccatattgcgcggtaataagtttacttgattgagatatgcgcactggccggaactctgtcacacagtgatcgaagtcaagcgcaagtttacttgattgagatatgcgcactggccggaactggttcagtgagcgccagtaaactgcaggcagtttacttgattgagatatgcgcactggccggaacttgcgcggaaccgtcaaaaaaaacctgacaagtttacttgattgagatatgcgcactggccggaacccagtcaagccgacagacgtaacggttaaagtttacttgattgagatatgcgcactggccggaactttctatgagggcaccatccatattcatccagtttacttgattgagatatgcgcactggccggaactttctatgagggcaccatccatattcatccagtttacttgattgagatatgcgcactggccggaacatacgctgcatcccggcgttcaacttcgaaagtttacttgattgagatatgcgcactggccggaacagaattagcgatggaaacactaccgaatcagtttacttgattgagatatgcgcactggccggaaccctcgcctatgtcgcagcattcaagcttaaagtttacttgattgagatatgcgcactggccggaacggtacggtaaaactttgtgcagcagttgtaagtttacttgattgagatatgcgcactggccggaactaagggggactttccaaagctttgcaaactagtttacttgattgagatatgcgcactggccggaactcttgccattttcggtgaactcgtagtcgtagtttacttgattgagatatgcgcactggccggaactcatctgtcagcgatacccatccacgctttagtttacttgattgagatatgcgcactggccggaactacaactctcagacttccgcactgcttttgagtttacttgattgagatatgcgcactggccggaacggatacgtataacaccaagacaacgaacaaagtttacttgattgagatatgcgcactggccggaactggcgatgaaggcggcaagctatcgcgaaaagtttacttgattgagatatgcgcactggccggaacaacgcccctgcaactaagaagcttagtaatagtttacttgattgagatatgcgcactggccggaaccgtatgaacggcacacggtgcgcgaaaacgagtttacttgattgagatatgcgcactggccggaacgagaccgttgacacttgatattgaggggtcagtttacttgattgagatatgcgcactggccggaacctacctattcgctcggaaatttatccgcgtagtttacttgattgagatatgcgcactggccggaacaacatcaaacacttctccaagtggccggtgagtttacttgattgagatatgcgcactggccggaactttcgttgtagcaaatgctgctagtgccgaagtttacttgattgagatatgcgcactggccggaactagtagccagactctttgcatcaagaggaacacgagaaagacaacaaaattcaagtagtgctgtgactagccaagcatctatcaacaaatgcaaacaattgaaatatagcgcagtgcacgaagagtaagccttacatgactgatgagatcaggtgctgggatatgcaacccaatatctttcaacagttctaaagcctactcttcttgagtaattctgaaggggttaaccctaaagcccctgacacacggataaggttaatcaccgtcaagttatgctctccccgctctattccacccatgtaggaacggtctaactcagcggcaagtgccagaccttcctgagacaaaccctgctttgttcgaacagacctaactgtctcaccgattgagacaagtgcagggttgccagagtgtgtaggagagggctttgccatccgcccaatgtcgttcattgacggacataaaaccacgggataagatacccaaaatcagagccgcctaaggagattagacttatggacttactgttggttattgtaggtatctatctagtcgtaggcgttgccaaagcacttaagcacctgaactctggacgcgttggtaccgaaggcccactcgcaacttttattgcggtggcgcttttgtggccatttgtctaatggtaaagcgctcattaacgaaaaacctaatctggttactgtttgtagctggcatcaacacggccattgctgctagggttttgagtaaggacgaatatcagaatctgttcatggcctccttcacttacatggcgaccgtgaaagcttgcgaaataagtagtctttatgcactgtctgatgacacagtaaatagagttattaagtatggatatacgcatagccttcacgacgagcaaactcaaagaattagtcagaacgtaagtttttacacgtcgaaaagcattgaggcctatcagcgagcgccaaagataagctgtgctgatgccgccagcacgatgcgcacgatcgcttattcagcccaacagttcaattaaggattgagacatgcaatggcttattggactagtctgtttcgtggcttggctaaaccacattttttattgcttcggtcatgcagcgtggggattccttgtggcgggagccctattttttccaatcggcataatccatggcatgtggctttggtttcaataacaagctgctgtcaacgtgccgctgactctctaacttactggggtaggtgaaaatgtttggtatgttcaaaaaatctttgacttggggtgagttggagtttttatttaaaacgtccgcctgtgaagtgtttaaggacgatgccgctgcatcttggcggctggaagattacatgacaaccctgctagaaatgggaaattacaagctaactcaaaatcaaagatcgacgctattggcagcgtgctcaaccgttagcgtatcaagttcactgcgcctagcattcaaagactgcaacctaccaacaggcgaattggatgctaagaaattcgctgcccttcaagaaaaactaggtgagaatctagtgcggtttagagagtcggtctgaccaaactagacagcccgataaatgataaaaagtaattggtctttttggcgcggaacaacgcaaagcacaagaagttaaaaatcaaagtaaggactaatattgtctcgcatagccagcttcaacctcttcaaatgcctaaactgcagtcagatacataatcgacctgagtgggggacttttcgcgttggttcgcctcctcacgattggggttcgtcagcggaggttttaaagacatgtgtcgggtgtggcttaaagaaaccgatctttgaatatcaacacgtggggaagactgtcgacagcggcaatagtcgcgaaatagtttggctggtggcatctgcagcgccagcacttaaaaaacatacgctgcttacacggctagtaagcttattcaagcaaaaagaaagcttgctggcgaactacccctcattcaaagattgaatccaccgctatgagcttgcaaaaagtttgacatgtgcacactagatacgaaactattgctcagtatcgagctcggtctcaccaacaaagcgaagctcgatgggctgatatgatgcactaagacgctcacgccagtgcttttcaattggaaatactactttattggaaaagctgtaaaccacaacaacaataattcgtacttgatttctgaaataatgacctgctcgagaactgcggtcaacaatcttatcaatcgaggcattcgactgtgcagtgctgggcgttagcaaaacgatcacctcgagaagtgttggccttagcccataaaagagcgcgtcaaaacggatgccggtattgcctatctcaatctccctttcggcacggacattgaattcacgttcaaatttttgaatagctctgtctgtggcaactgatattctgtggcggatttgagttagagggggtatggtcgttgtgttaggcgactcatttatttttacagggtcaactttttcgtcactccatgcttgggcagcttgactcaattccttttcaacctcagcgctagggactggacgaacaaaatccatccaagttgcgtcgctacgaaaatccgaaggggcatagagctttatatggtgtctggttaaaatccaataaaacacgaagagcactacaaatggaaacaccacgataaagcccaaaacaaaccagacctgatcaatgtttaaatgcgttacggttgaacttaacagccagtttgcgcaaccgtatatcaatgatatgaacgcaccgattaccgtaatgggtgtttttacaaaattaaacatttccaagtgccccagtgaaactacgcctcacaagttataaagtgaaagtaacaccggtaatggcgaatgcatatcccttaaaataaagtagttgataaatttcaaaatcgctgaatttagaaaatggtcaaacgtttgacatgccaatactagatttttacaaagttttacacgaatctaatttgcggctgacgaacagtgatacatggtcgaagggtgggtcgatcgcttttcggagggtgggggtgcggtggggttggcagtatgccaatatcaaaatcctaaccgtcctctttcgcttcttacatctgacaagggcgttctactggtgtagaaacttgcagggattgtttagctataactacccaaaaagaacaaggcagagatcagatatcaatcccgctgactgcttaaacatttgttcagcagcacattcaagtaaaaatttttgggtacgtttttgggtatgtaaaaataaaaagcgccccgagatgtgcgtatttactcacttcttggcggagagggtgggattcgaacccacggtggatttgcacccacgcctgatttcgagtcaggtacattcgaccactctgccacctctccgggttgactgaacatagtaggtgccatgctggttgcactcaccaccgtgcacggtcactagcgatcgcgtcgaagcctgtgattctagcagaatcccacctggctgatggcggtttatcagcatgacaacaaggtgccgctaaactaagctaactattctgcgattctcttgataggcgtcggcatgctttttcttttatccccagcaaaaaaacttgattacgactcagtggtttcgacgactgaacacacccagcccttgtttatcaaagaggcagctgaactcattaaagtgctcaaaaagaaatccgagaccgaagtatccgagttgatggacctcagtcctgccttgtccaagttgaacgttcagcgctacagaaactggacacctgtcttcaaccaggacaacgcccgacaagccttgcttgcgtttaatggcgatgtttacgaaggattggaagcctccaccttaaagaaagctgacatgaaatgggctcaaaatcatgtcgccatactcagtggtctatatggcgtgttgcgtccgctcgatctgatgcaagcctatcggctcgagatgggtactcggctaaccaactccagtggcacaaatctttaccagttctggtcgaaaacgatagctccttatctgaacgaaagattgtcaaaagacaaagagcctgtggtgattaatctcgcgtcagaagagtatttcaaatcggttgatttaaaagcgctgcaagcgagggtagtgcagtgcgtgtttcaggatggtaaagcgggtgtatttaaagtggtgagctttcatgctaaacgtgctcgcggattgatggctcggtttgctattcagaatcgtataacggcagtcgagcaactgaagcagtttgaaagtgagggatattcgtttgcggcacaagtatccacatcggacaaactagtctttaggagatctacctagcatggttactcgaaaacgcagttcgatagcacaagagaaaatctctcagtacccgcgggttgctttggttttgcagggtggcggtgcgctgggggcttatcaggcgggcgtttacgaaggattacatgaagtgggcgttaatccaaactgggtggctggcatttcaatcggtgccttgaattgcgcaatcattgcaggcaacaagcccgaagatcgcgtcgctaagctgaaagaattttgggagaccatttgccatccaccgtcacctgcagcgggcatgatgacgtcgatgatggatatgatgaattcagctgcagggatgtttacccagagcaccagggactttactgaaacctggtttgggacgatggcagctggtcaggcgattcttgcaggtcaacaaggtttttttgttccacgcccaatggctcctggcatgggaaacccagcacaaatcagttattacgatacaagtccgctcatcgcgacgcttgagcggctgtgcgactttgatcggatcaacgatagcgacatgcgcgtttcactgggtgctacaaatgtcagaaacggaaatttcgtctactttgataataccgaaatcacgctgacgcctcatcattttctggcatcggggtcactgcccccaggcttccctgccactgaaatagaaggcgagttctactgggatggcggctgcgtatccaatacgccacttgagtacgtgatcgcgggccagcatcgcaaggatacgctggtgtttcagatcgacctctggagcgctaagggcaagttgcccgagactattggcgacgtaatgacgaggatgaaagacatccagtattcaagccgtacccgcaacatcacgactgcaatcaaagagatgcagggtctacgagatctactgaacgagaccatacagaaagtgtcaccagccgtgcgggcaaaagatcctttcttcaaagagctgaccgccaagcttgaaggggtgcgctacaactgtattcatttgatctatcagaataagcagaccgagggttcatataaggatgttgagttcagtcacgagaccaagcaatatcactggtcagaagggttgtcagacatgcgcctgacgtttgatcatcccgattgcctgaacttgccgcccaagggtcaaaccttcacacagtttgatgttcaccgcgagtcttgggcgcacgctgctaagtcggtgtaaaaccttgctcattccagataaaaaaaggcgcctgcgcgcctctttcattgcaggagggatagccctattactgcatgtgccagccgtgactaacgataatggattgaccagttagcgcattggtttcaaagcctgctaaaaatgcgaccgtattggctacgtcatcaaccgtggtgaactcaccatcaaccgtgtctttaagcatgacattcttgatgacctgttcttcggtgatgtgcaaggaggcagcttgctcggggatttgtgcctcaaccagtggcgtgcggacgaaaccgggacaaaccacattggctcggacgcctttggggccgccctctttagccactgcacgacataggccaagcaggccatgctttgctgtcacgtaagccgacttcagttttgatgcctcgtgcgagtgcaccgagcccatataaataattgcgccaccgcgaccacttttatacatgtggcgaatggaggcttgtgtcgtcaaaaatgcgccgtccagatggattgccagcatttttttccagtccgagaacttgaaatcctcgatcggtgcgatgatttgcacgccggcattggacaccagcacatcgatgctacctaattgagcgacagctgaatcgatccctgcaaagacggctgcttcgtctgtcacatccatcgccacggcaagggcgcgcccacctgaagcaataatttggttggcgacctcttgtgatttttccagattcaaatcggcaatcacaatcgaagccccttgttctgccatcttcagtgcacaggctttgccgatcccgctggcagcaccagttacgagagcaactttatcttttaaagacatggaggttccttttaggtagtaaggttagccctgaagcggacaatc

SEQ ID NO: 1847 - DNA, 22238 bp, synthetic construct
  source 1..22238: mol_type = other DNA
  misc_feature 1..22238: note = Synthetic
taccttgaagaatcagttattgatcgaattagtcgaaaaaatcacagtcccagcctaactggggatgaccgcagggtttttcaagatccgatttgcagccgccggatggccccgctgaattgcggcaggccgggccagccggtgatccggcccaggcgcttgccgccacggaacagcacaaaagtcggcacaccatgcagaccgaaacgctggccaagcccgggatccgcgtagacgtccgcctgaaaccaggacaggcccagctccagcagggcgtcgcggtgcaacagcgccgtctgcttgaaaatattgcagttgtagcagtcctcgccccagagaaagacgcagcgcagatcatcacccgccgaattaacgacgatttcgtcgaaattagcgctcgataccggcgacatgccgaaggtttcgaacacctggctgggatcaaagccgctcatggccgcgtcttcaacagggagggtcaacccgccgacaccaccaccagcgcggggcgcagggtccggtcggcaatgacatagcccttttgcagcagctgcaccacggtattggccggctgctcggcaggcaccgaggagatcgcctggtgcagatgcggatcgaatttgtctcccggagccggcgcgacctctttcaggagattgcgctcgaaggcggatgtcagctgcctgagggtgacttccacgccttcgcgcagggcggcgacggtctggtcgggctgggccaaggcggcctccaggctgtccttgaccggcacgaggctctcggcgaaggattcgattccgaatttgcgcgccttggagacatcctcctgggcgcggcggcgaacattctcgcttcggccatggcgcgcagcgcctgttcttgctgggcctgggcctgggcctgggcggcggccagttcggcgcgaacggcggccagttcggcctgcaggtcatcagcgggcagatcggcgccggcgtcttggtcgacaggctcttggggtgccgtcatgagaatcctccagaatagggaaagtgcggtatcagcccctaaatgagggccgcttccctggtttcaaggggggtacgggtcaaaaaggaccaaggcccgccgcatcgcgaacgggcccggggtttacttcttgcggggctgggccggcgccggagggtcgctggccgggaaagactcctccagggcttcgtcgatcaggtccggacggtcttcctcgggcgtgatggcgatggggtcgctggccggaaaggtctccatcagcgcctcgtcgagatcccgttcgacctcgtcttccttgagatcgccgtgaccgggcgcgccggaggtgcccacgctggggcgggtggggggtgtcatcttgccgtctccttgaaaaggctttcgcggaatagacaatgcctgggcacgcaggcgtgccagccgacttcagtttacgcgattggccggcgcgtggccggccaaccttgcaactggttctggaccaggtcggccaggcccgccacccacagcgggctgtcattgagcgccgggatgtaacggaagcgcttgccgccggcctccatgaatgcgtggcggcactcctggtcgatttcttccagggtttccaggcagtcggccacgaaaccggggcagaccacatcgacctcggtcacgccctggcgggccagctccctgagggtgggctcggtatagggttccatccagcgcgccgagccaaagcggctctggaaagccacctcgacctgctcgggcgccaggcccagacgttcgcgcagcagccgggcggtctccaggcaatcgcggtaataaggatcgcccagttcgatggagtagcggggcagcccatgaaaactcatcagcagcttctgcggcctgccctgcgcgtcccagaaagcgcggatgcgctcggcctgcgcgtcgagataggcggggtcgtcgtagaagcgcttgacgaagcgcagggccggctggtcgcgcaggcgcgcggcatggcgcgtgacggcgtccaccgcggtcgcggtcgtgctggccgcatactgaggataaaggggcagcgccaggatgtggtcgcagccctgctcgcgcaggcgcgtgatgccctcggccaccgaaggctggccatagcgcatggccagggccaccggcacgtccaggccgcgctcggcaagcgcggcggccaggccctcggcctgctggcggctgtacaccatgagcggcgagccgccttccagccagatgcccgcatagcgcggcgccagtttcttgggccgcagcgtcagcaccagcccgtgcaggatgggtttccagaggtagccggggatctcgatgacgcgcggatcggacaggaattcgcccaggtatttgcggatatcggccttggacggcgtctccggggtgcccaggttgaccagcagcacgccggcgcggcccgggccgcggggcggcggatggtcatcgaacgggtcttcgccgcgcgccgctccgccagaaagcgctcgggccacaagtacttgaacagccgaagaaacacagacctctcccgggggcaccccccgcgggatgccgttgttgttggaattattgattgtggctgagcgcgttggacagcagccgggcggtgatatcgacgatgggtatcacgcgctcataggacatccgggtcgggccgatcacgcccagcgtgccgacgatctggccgtccacgccataaggcgccgtcaccacggtgacttcgtccatgggcaccagctgggaatccccgccgatatagatctgcacgccttgggcacggctggagacgtccagcagctgcagcagatcggttttcttttcgaacagcgcgaacatcttgcgcagccggtccatgtcggaggcgatgtcggtcacatccagcagcttgcgctcgcccgaaatgaccacggaatctccctcgtcggcggcctcggcgccggcctccaccgccgcctgcatcaggcgcgagatatcctcgcgcagctgggtcagctcggtcgacagcgtgcggcgcaccgcgtcgaaggacttgccggagaagtgctggttgaagaaattggccgcttcgacgagttcgctctcggcgtagtcgcgctgcacctgcatgatgcggttctgcacgtcgccatcgggcgtgacgatgatgagcagcacccgcttgtcggtcaggcgcacgaattcgatctggcgaaacacctgcgcccgcttgggcgtgagcaccacgccggcgaactgtgtcaggttggacagcagggccgcggccgcgttgacggcccggctgggctcgaccatgggcagcagctcgcccatattggccggctcgaactgatagggatggacggccagcagggaatccacgaacatgcggtagccccgcggagtgggcacgcggccggccgaggtgtgggggctgtggatcagacccagctcctccaggtcggccatcacgttgcggatggtggccggagaaaggtcgaatacctttgaaagcgtgcgcgaacctaccggttgcccgtcggcgatatagcgttcaatcaacgctttcaacaaagctcgtgcgcggtcgtccatatgtgtattttatggaaagttttgccaggaggcgatttttgtcctccgacatgatatgcggccccatataatcgcctgatacgcctcacgaatccactgaaacccgctcatgcactttcctatcgtcgccctgatcggacgctaccaggacaccggcctggacgctcccctgcgcgccctggccgacatgctcacgcaggcaggccggcgcgtcctggtcgacgccgatacggcgcgcaacaccggggtccatgagttccccgaagccacgctgcaggaaatcggcgaatccgcctccctggccgtggtcatgggcggcgacggcacggtgctgggcgcggcccgccacctggcgccgtatggagtgccgctggtgggcatcaaccacgggcgcctgggcttcatcaccgatatcccgctgcaggacgcccgccaagcgctggcgcgcgtgctggacggcaacttccagatcgaagagcgcatgctgctgcaaggcagcgtgtggcgcggcgacgcgcagatgtattccgcctcggcgctgaacgacgtggtgctcaaccgcgccgggcgcggcggcatgatcgagatgcgcgtcgagctggacggcgtctatatgtatacccagcgcgccgacggcctcatcatcgccacgcccacggggtcgacggcctatgcgctgtcggccgccggccccctgctgcatccgggcctgaacgccatggtcctggtgccggtggcgccgcaaagcctgtccaaccggcccatcgtgattcccgacaccggcgtgctcaatatgacgctgacggccatcggccgcgtcgagaccggcgcctcggtgcacttcgacatgcagacctggtcggatctgcaactgggcgaccgcatcaccgtgcagcgcgccccgcataccgcccgcctggttcatccccagggctacagctttttctccaccctgcgccgcaagctgcattggaatctgatgccgcaggccaccgacaacatcgagtaatcccggcagcgcccgccatgttgcgaaccctgcatatccgcgacttcgtcatcgtcgaacagacggaaatccatttcggcgccggtttcaccgtattcacgggcgaaacggcgcgggcaaatccatattgatcgacgcgctggccctggcactgggcgagcgcggcgacgccagcgtgctgcgcgaaggcgcggccagggccgatatcacggccatcttcgacacgcccgcgcacctgtcggcctggctggccgagcgcgaactcgagcccgccgaagagctgtcgctgcgccgcgtcatcgatgcccaggggcgcagccgcgcctatatcaacggcatgcccgccaccgtcacacagctgcgcgaactgggcgacaccctggtcgacatccatggccaacatgctcaccaaagcctgatgcgccccgacgcgcagcgcgagctgctggacgcgcatggcgggcatggcgagctgcgccaggtcgtggcgcaggcctggaagcactggcgcggcctggctcgccagctcgaaaccgccgagcaagacgccgaagcgctggccgccgagcgcgaacgcctgcaatggcagaccgaagacctggaccgcctcaacctggccgaaggcgaatgggacgcgctgcaggccgaacacagccgtctgtcgcatgcccaatcgctgctcgatggcgccagccagattctcgaagccctggatggcgaacaggactcggcgctgtcgcgcctgaacgcggccagccatcgcctgcaacagatgcagcgccacgacagcggcctgggcggcatcgccgaagagctggaatcggcgcgcatcgccatgagcgaagccgtctccgacctgaacaactacctgagccgcgtcgacctggatccggaccgcctgaatgcggccgaggcgcgcctgagcgccgtcttcgaaaccgcgcgcaagttcaagaccgagcccgagcacctggccgccctgcacggctcgctgcgcgagcagctggcccagctgcaggccgccggcgatgtcgacgccctgcgcgcccaggccgaggccgcgcgggcgcaatatgacagcgccgcggcgctgctgaccgaggcgcgccgcaaggtcgcccgcgacctgggcaagcaggtcacccaggccatgcagaccctatccatgagcggcggccgcttcgaggcggccctcgcggccggtccggccagcgcccagggcaatgaaaccgtcgaattcctggtcgccggccatgccggcaccaccccccggccgctggccaaagtggcctctggcggcgaactctcgcgcatctcgctggcgctgtcggtgatcgccagccgcgcggcgcgcgtgcccaccctgatcttcgacgaagtcgacagcggcgtgggcggcgcagtggccgaggtcgtgggcaagctgttgcacgagctgggcgggcgccatcaggtgctgtgcgtcacccacctgccccaggtggcggcctgcggcaaccaccaattccgcgtcagcaagaccgaaaaaggcggcgtcacgcgctcgcgcatcgtcgaactcgacgccgacgagcgcatcgaagaagtggcccgcatgctgggcggcatcaccatcacgtccaccacgcgcgaccacgcgcgcgagatgctgcagaacacccgcgcggcctgatcgtccggcgcgcggacaaaaaaaagccccggcctgggccggggcttgagtgctgcgctgggcgcgatcaacgggcgcgctggcagtccgagcaaataccatacagcaccatggcatggctttcgagcacaaagccattgtccttggcgaccttgtgctggcgcttttcgatgtcgacatcggaaaactccaccaccttgccacagttggtgcagatgaggtgatcgtggtgatcaccgtcgttgagttcaaacaccgccttgcccgtgtcgaactggctgcggctcaggatgcctgcctgctcgaactgggtgaggacgcgatacacggtagccaggccgatttcgacgctctcgccgatgagggcgcgatagacgtcttcggcgctgaggtggcgctggtccgacttgcggaaaatgtcgagaatcttgaggcggggaaacgtcgccttcaagcccatgttcttcaattcgctttggtcgctcatgtagtcgctctccgtccactgaggcgcggcgccggagcccggcccaacctgggtctagtaatgcggccccatttccgcaccgccgcctcgcatgatgaaacggcctacaagacattggctggcagagccccaattcccgctgccttgcggaactatccgttatttaaacctttatgataacggttttgtccgtttccaataataggggcgcgtagtgtccatgattgctcgtaatccctcccggcccatcaaggcagtgctgggaaccctggtactggccgcggccctggccggctgctcttccggcaaatggggcttcccctatcgcgcggacatgcagcaaggcaactggatcacccgcgaacaggtcgcgctgctgcagcccggcatgtcgcgcgaacaggtgcgcttcgccctgggcagcccgacgctgaccagcgtgctccacgccgaccgctgggactacccctattacttcaagcccggctatggcaaggccgaagaacgccacttcacggtcttcttcgagaacgaccgcctggtgcgctggagcggcgacgagcagcccgagctgcagcctttccagatcaacaaggtcgacgccgagcgcgccgagaaagccgcaaacaccgaagacaccgccgagaagcgcgaagagcaggccgagaaggccgagaaggccgagcaggcccggccccacatccaggtgaactcgccggtctcgccgaccaatgcctaccctggcctgcccggcaatgcgcccgaacccctcaagtaagctccaaggaaagacaatgcgtattgcaatcgccggcgccagcggccgcatgggccacatgctgatcgaggccgtcctcaacaccgagggcgtcgaactcgccgtggcgctggaccgcaagggctcgccgtcgctgggccaggatgccggagccttcctgggccgtgataccggcgtgcggatcaccgacgacctggacagcctgtccggcgccgactgcctgatcgacttcacccgccccgaaggcacgctggagcacctgcaggcctgcctgcgccatggcacccgcatggtcatcggcaccaccggctttgacgatgccggccgcgccgccatcgaagtggccgcgcaaaaaatcgccgtggtgttcgcgcccaatatgagcgtgggcgtcaacgccacgctcaagctgctggacatggccgcccggatcctgaacagcggctatgacgtcgaggtcttcgaagcgcaccaccgcaataaggtcgatgcgccctcgggcaccgcgctggccatgggcgaagccgtggcctcggcctggaatgtcgccctgcccgacgtggccacctggacgcgccacggcgacaccgggccgcgcaaacccggcaccatcggcttttcggtggtgcgcggcggcgacatcgtcggcgaccacacggtctacttctgcggcacgggcgagcgcatcgaaatcacccaccgctccagcagccgcgccacctatgccgagggcgcggtgcgcgccgccaaattcctcgacggcaagcacaacggcctgtacgacatgcaggcggtgctcgggctctgagccgcgccgccaccctgcatgaaaaagccggctcgcgccggctttttcatgcagggtcccttaacgcaccacgatgggctcgggctccagccgcacgccatagcgcgccatgacatcatcctggatggcggccgccagcgccaggatatcggccgcccgcgccccgccccggttgaccagcaccaaggcctgacggtcgtgcacggcggcgggccccaggccgcgccccttccagccgcactggtcgatcagccagccggcggccagcttatagcgcccgtcgggctgcggatatgacaccaggccgggaaagcgggcctgcagacgctcgcgcgtggcggcgtcgaccaggggattcttgaagaagctgccggcattgccgaccacggccggatcgggcagcttggcgcggcggatatcgcagaccgcctggaagatggcgcgcgcatcggccggcccttgctgcaaggccggccagcgctgcaggtccggatactccagcacggcgcgccaggggcgcggcaaggcaaagcgcacccgggtgatcagccagcggccgggctcgcgcttgaagacgctgtcgcgataggcaaaacggcaatccgcggccgaaaagcgcacggcgcgcgcctcgcgcaagtcccaggcggtgaggctgtcgaaacgatccgccagctccaccccgtaggcgccgatattctggaccggcgcggcgcccaccgtgcccgggatgagcgcgaggttttccagcccatcccagccctgctcgacgcaatgcgccacaaaatcatgccagcgctcgccggcggccgcctcgacgatccatgcatcgggacgcgcctcgaccagacgtatgccgcgcaaggccacccgcgccaccaggccgtccacggtctcgcccagcaccagattgctgccgccgcccagcacgaaacaggcgggataggccgccgccagcgccgacaaggcaggcagctgggcctcgtcctccagggtgacgaaagcgtcggcgcgcgacgccaggccaaaggtgttcaaaccgcgcagatcctgggccgcgggcgcgagggatattgacatgggcacgaaaagctatgctatagtttctgtcttcgctcatattacttgaacgattgatgggtctggcgccagcctgcgactcgcggattcgagaccgcggcgcggcacggcaaaaaaagccgcagccagcacaaatcaaaattttcatgtataatgcgcgtctttcgtgaatacagcggtgcgtcaaaccactgccaaaaacgaaacccaagcgggaatagctcagttggtagagcgcaaccttgccaaggttgaggtcgcgagttcgagactcgtttcccgctccaaattttgaattcatggctgataaacattcacccatgaagccccatacagaaaggccgaaaccttgagtttcggcctttttctttttctcccacgcaacaaacacgcgcgccccgtccgcagggtctccgaagaaatgacgaaggccccgcatgcggggccttccatttggtgcatctttctgcttgttagcgtccagagcgcaattcccagtgaactgttcacaacgttagcatactttgctacaaattaaaattaattcgaacaggcacaaataaataagggacatcatggcaaagcaagtcagataccgcttatccctcgacctgggctccacgtccctgggctgggcaatattccgccttgatgccgacgcccaccccacggccattatcaaagcgggcgtgcgcatcttcagcgacggccgcaatgccaaggatggctcatcccttgcggtgacgcgccgcgcggcgcgcagcatgagacggcggcgggatcgattgctgcgcagaaaaacccgcatgctggatgcgctgctcgagtacggctttttcccgcaagatgcggcccagcgtaaagcgctggagcggctcaatccctatgccttacgcgctgaaggtttagcgcgcccactgacgcccggtgaattcgctcgtgcgatatttcacctcaatcaacgccgaggcttcaagagcaaccgcaagacagacaaaaatgacaatgacagtggcgcgctaaagactgccaccagccaactgcgacaagacatacaggccagcggctgtagaaccgtcggagaatggctgtggacacagcgcctgcagaagaaaccggagggtgttcctcatcagggcgtaagagcccgataccgggaaacaccccacatcaacagcgagggcaaaaaacgcatagaaaaaaagtacgacctctatatcgatcgaagcatgatcgaggcagagttcgacgcactctggagcgcacaggcaaccttcaatcccgtggtcttccatgccacggcacacgaaaaactgaaggacatcttgctttaccagcggccattgcggcccgtaaagcctggtcgttgcacgctcttgcccgaagaggaacgcgcgccattggcgttgcccagcacccagcgattccggatctaccaagaactaaacaatctgcgccttcttgtcgatcagctcaatgaacagcccctgacacttgcacaacgcgacacgattgccaccctgatggaaggtcgggcaaagatatcattcgaccaaatccgcaaggcgctcaaactcgggagcatgaccaagtttaatctggaagacgacaaacgaaacgaactcaaaggaaacgccacgggcagccagctggcaaagaaagagtttttcggcccggcctggcatcagttcgacgaagcgctgcaggatgacatcgtctggcacctcttgtccgaggagaacgagagcgcgcttatctcctggctacaagaccggacaggtatcgacgccgccaccgcgcaggccgtttccaacgcatccctgccggaaggatatggaagcctcagccgaaaagcgctggaggtcatattgcccaggcttcggagtgaagtcatcacctatgacaaggccgtgcaggcagccggcttttctcatcacagccagcttggcttcgaatatgatccggacgacgttgaggattggatcgaccacgcgacaggcgaagtaaaacccatattcaagcgactgccttactatggcaaggccttgcagcgacacgtcgcttttggcagcggcaaacccgaagactcccaagagaaacgttacggaaaaatcgccaacccgacagtgcatattggcctgaaccaggtacgagtcgtcgccaatgccttgatcgcccgttacggtcgtccgacggaaatcatcatcgaattggcgcgcgacctgaaacaaagccgggagcaacggcaacaggaccaaaggcgacaagccgacaaccagaagcgcaatgcccggatccgaaattccatcgcgcaagccctgggtatcgccgaagcgcgcgtacgccgagaagacatccagaaatggatcctctgggaggagctcgaccccggagacgccatgcaccgttgctgtccatacagcggcgtgcccatcagcgcctccatgttattgagcgaacaggtggaaatcgaacatatcctcccgttctcaatgactttggacgacagtctgaacaaccgaaccgtatccctgcgccaggcgaaccgcatcaaacgcaaccgttccccgtgggacgccagggaggacttcgaagcacaggctggcactacgatggcatcttgcagcgcgccgggctcatgcccgtccagaagcgctatcgtttcgccgccgacgggtatcaacgctggctgcgggacgaccaggactttctcgctcgggcgctcaatgacacccggtatctttcgcgcatcgcggcggaatacttgcggctggtatgcccacagggtacgcgggtcatccctggccaattgaccgcgcttctgcgcagacgattcggcctgaacgatatcctcggcttggagggtgaaaaaaaccgcaacgaccatcgtcatcacgccgtcgatgcctgcgtcatcggcatcaccgatcacggtctgatgcaacgctttgcgcgggccagcgcacaggcccgcgagcaaggtttgacacggctggccgaagaaatgccgctgccctggccgacctaccgtgatcatgtagaccgtgcggtatctcttatatgggtcagccataaacccgatcatggccacgagggcgccatgatggaagaaaccgcctatggactcatgaaagacgggaccattcgtcaacgccacaaggcggacggaaccaagggacgcgaggtcgccaatgtgattcgcatagcggagcccgcgcaacccacccggcacggcgtcgatgatcaaggccgccccctcccctacaaaggctacattggcggcagcaattattgcatcgagatcacccgcggcgctcaaggcaaatgggaaggcacggttatctccacttctgacgcctatggcatcgtgcgcgctcgcggcatagccggattgcggaacacatcgcagggccaaaatggtcatccacttgtcatgcggcttgtcattggagatagcctacggctccgaatcaacgatgcgctgcaaaccatgcgggtaaccaagatctccggcaatgggcaagttttcatggctggcgtacacgaggcaaacgtggacgcccgcaaccgggataaatcccaggcatttgccctggtgtcgaaaatggcgggttccttgcaggccgcccaagcccggcaagcgacgatatcgccgataggcgaaatccgcgatcctggatttccgggctaggacgcatgatcggccgcatcgtcgaaattgcggatgaccggcgccatttgtacgtcaaccgtggattcctcgtcgtcaaggatacggagggcgaacgcaaggagcttgggcagatcccgctggacgacatcgcggccgttgtcgcaaatgcgcacggcctgagctacaccaacaaccttttggtcgcgctggcggaacgaggcgctcccttcgtgctttgcggatcaaaccacaatgtaatcggcatgctgctatccgtggatagccatcatatccaggccaagcgtatcgaagcgcagatcgccgccgcccttcccacgcacaaacgcctgtgggccaccgtcatcagagccaagctcgctcaacaggcagcaaccctaatagcaaccggagcgcctagcgctcctttgctcgcacttgtacgcaaagtcaaaagcggcgatcctgaaaacatcgaaggccaaggcgcgagacgctactggactttgctattcgggccggatttccggcgagacatcgatggcggcagcctcaacggccttctcaattacggctacaccattctgcggtccgctaccgcgcgggccatcatcgccgccggtctacatcccagcatcgggctgcatcacagcaacgatgccaacgccatgcgtctagttgacgatctcatggaaccgttccgccccatcctggacttaaaggtatggcaactacgcaaggcgggcgagactcacgtcacaccagagaccaaacgcagcttggtgcacgtcctgcatgacgacatgcagacaaaaactggagtgacgccggtcatggtatgcatgcaaaggctggcagtatcgttggcccaggtctacctgggagaacgaaaagacctcgaactgcctctgcccggcctgccaatttctctggccaatagcctgaacggcgactgattttcgacatgctttcgggatatcgactaatgtggatgctggtgatgttcgacctgcccgtccttgaaaaagccgaacgcaaagccgcctcggcttttcgcaataccctgctggatctagggttcgagatgagccagttcagtgtttacctgcggttctgcaccagccaggcccagcttgacactttgtgcaaatcggtcgaacaatgccttccggaaggcggcaaggtccacgtactccaattcacggataaacagtacgagcgcacgatcacctatcaaggaaaatcgcgccaaccctcgaaaaaagccccggatcagttcgatcttttctgacaatgagcactctttttttactcagagaattgaataaccccctgataaatcagggggttatgggaacaacattctagatcactgggaattgcgctctagccggaacatgtttatcgtgatcacgattttgtcgtggattctagatcactgggaattgcgctctagccggaacgcggtggttctgcgccgattaacattaatattctagatcactgggaattgcgctctagccggaacagtgatcttcttcgtaacataacgcgctacattctagatcactgggaattgcgctctagccggaacactagcgttgtagttatgttgcgtgattgcattctagatcactgggaattgcgctctagccggaaccgcatcgacggaccgcagatcagatcatcgattctagatcactgggaattgcgctctagccggaacaagtcgaagtacagcatgttgagggactagattctagatcactgggaattgcgctctagccggaacgtatgccgtattcgatgcgcccccagcagattctagatcactgggaattgcgctctagccggaactctttcacgtcctttccttgagagagtccaattctagatcactgggaattgcgctctagccggaacggtcgtcacgccttcccgaccgccgctgtcattctagatcactgggaattgcgctctagccggaacagtggcgtttcagctgtcattcccgtacctattctagatcactgggaattgcgctctagccggaacatcagtcgcatgaagctgccgccgtactgaattctagatcactgggaattgcgctctagccggaacgggtgagggcgtagaggggaatgttcatggattctagatcactgggaattgcgctctagccggaacacgtgttacgacgcgatttcgcttccaataattctagatcactgggaattgcgctctagccggaactggaacaagaagtgatcgcaccgccggaagattctagatcactgggaattgcgctctagccggaactatttggattggtgcaagttctatctggaaattctagatcactgggaattgcgctctagccggaacttgcccgtcatggacgtgacggcgccgtcgattctagatcactgggaattgcgctctagccggaacatccatccgaattcactacgggccaagctgattctagatcactgggaattgcgctctagccggaacatagcgatgcagggacggcgcgcgttgactattctagatcactgggaattgcactctagccggaacggccgctccagtaccactcgtgacgaaactattctagatcactgggaattgcgctctagccggaactcagatgcactgctacatccgccagtccgaattctagatcactgggaattgcgctctagccggaaccctacgcgggttcgactcccgcagcccgctattctagatcactgggaattgcgctctagctgaaaaaaattggcagactaccccacacggcagaacgtgaacctcttaacgctccattaatccaagtcctggatccttgattgtcattgtgagcgcaggcggagtggatggggttggattaccggtgtttgtcagtgtttccgggcgtgtgtccgtcctgggcggcaagccatgcatagcgtcggcccattttccgtccaggtgatcgccgtggcgcttgccgccgtcctggcctggctggccgcgcggctgctgtggcgcaaggacggcacgggcaagcgcgccgccgccgtgctgctcgacgccctgctcatcggcctgctggccgcccgtgcgctctatgtgctgcgctggtggccggattacagcgccgcgccgcgggccatcgtgtccgtcggcgatggcggtttttattggtgggccggtctgccggccggcctggcttatctggcctggcgcacgcgcgggctgccgccgctgcggcaagccgcgctgggcagcgcggccatcggcatcgcagtgtggactttcgcccagggctatatcgtccaggcgcggcgggcgtccctgcccgccctggcgctggagacgctggatgcgcgcccggtctcgctggatcaatacgccgggcagccgctggtcatcaatctgtgggcgtcgtggtgcccgccctgccggcgcgaaatgccggtgctggcgcaggcccaggcggactatcccggcgtgcgctttctcttgatcaaccagggcgaagacgcggcgaccgtgcgcgatttcctggcgcggcagggcctggcgttcaaggatgtgctgctggacccggcttcgcgcgccatgccggcgctgcgcacccgcggcctgcccacgacgctgttcttcgatgcgcaaggacggctggcccaggcgcatatgggcgaactgaccgccgcgcgcctgcgccagacgctgcaagatcctctcatgtcaccgccggacgcaatcaggctccaggagtagcgccatgttctcaacaaaatcccttgtctccgccctgttgggcatcgccgccctgggcgccgccgcgaacggctttgccggcgagccggagcgtcccgccgtgatccgcgcgctggagcgccagggcctaagccacgtccaggaactgggcaaggtcagcgggctgcgcggctacgccggcatggcgggccagcagcccatcaccatctatgtggccgacgatggcaatgccatcgtcggcagccgcatcagtcccgagggcgagaacctggacgaggctcgcgtgcaggaactggtcgccaagcccatgggcgaggccatctggaagcagctggacgagtcgacgtgggtggccgatggcaaggcgcgggcgccgcgcgtggtttatgccttcagcgatcccaattgcccctactgcaatcgcttctgggaagccgcccgcccctgggtggacgcgggcaaggtgcagctgcgccacatcatcgtgggtgtcatccgtgccgacagcagcaccaagccgccgccattctcggcgcgcccgaccggagcgccgcgctgctcgagaacgaacgccatttccgccaaggcggcatcaagcccgcggccagcgtgccggcggccatccgcgacagcctggataacaatcagatcctgatggcggagctgggttttcgcggcacgcccggcatcctctacaaggacgagcagggacgggtgcagcgcgtcaatggcatgccgcgcccggaggccctggagcgcgtgctcggcccacgctaggcgcgccccgcgccgctatgtcttgagcgcatccagcaaggcggcttcgaggcggtccacatcgaccttgcggttgtggccatgaaagctgatgcgcagccgctggcggcgcggacatggttcggcaaggggatgtccggcgatgggagcctgggcatgaccgtgagcgcgcggactcaggcccagtttagggcttgggcatggcccggttccggggggatccgctactatcagccatgcattatctgcatagcttgatgcgtattatttccgtggctgacgccgcggccagacgatgaatacccagcagctcgactacctcaagcaggccgtcaaggccggcagtttttcccgcgcggccgatatcctgggccttagccaatcccgcttgagccggcaggtggcggccctggagcaggaaatgggctgcccgctgctgaggcgccatggccggggcgtcgccgccaccgccgccggcgaacgtctgctggcgctggccgagacctttctgcaggaagtcgcccgcctgaagtcggcgggcgccgggcgcggcttgcagggcgagttcaagctgggcgtgcccatgttcttttcgcagtccctggcgccagacctgatggcggccgtgcgcagccgttatcccggcttgagtttcacggtgcgcgaagggcctagcggcgatctgcacgattggctgctggccggcgagctgtcggcggcggtgatccacgagtccaagcgcccgcgccagctggaaggcgatgcgcttttcctggagccggttttcgtggtcggcacgcgcgaactggcgcggcgccacggcctgcccctggaccggggcctgagcctgcgcgaactggcccgactgcccatcctggtgccgaccgccgccatggcacccgcctggatttcgatgcgctcatgcgccggcaccggctgacgcccgacatcgtccatgaagtagacgcgctgggcgcgcgcatgctgctggcgcgcagcggcgccggcgtgacgatattcgagtcggcgggcctgctggccgaaagaaaagacccttcgctttttgtgctgcccctggccgacccggcattctttcaccggctggtgtgggtggatgcgcgcgaaccggagcgcggcgcccaatggcgcggcctgctgcgcttcctgaagcgcggcattgtgcggctgcgccaggatctgggtgatggcggcccggccaagctcttgcagtcctaggcattcggggctacattgtcgacaatcagctcaccaaaggcgaataaatcgggcaaacaccgaccaaacgtctcaggattgtcaacacgatggaccaacccatcctgccctcagatctccccggagacagcgagaccctatccgaccagctgttccgcaagctgcagtccgccatcatcaagggcgagatcgcgccgggcagcaagatgtcggaaccggaactggcccgcgcccatggcgtgagccggggccccttgcgcgaggcgctgcaccgcctggaaggccagcgcctgctggtgcgcgtgccgcacgccggcgcgcgcgtcgtgtccctgagccccaaggagctcagcgagctctacgaaatccgcgagtccctggaaggcatggcctgccgcctggcggcggcccgcatgccggccgccgaagtccagcagctgcgcgatgtgctgcatgcgcatgaaaaagacgccgccttccaggccgggctgggctattaccagcaagagggcgattacgacttccactaccgcatcgtcaagggcagcggcaatgagatgctgttccgcatgctgtgcgacgagctctaccagctcgcccgcatgtaccgcatccagtactccaacacccccaaccggccgcgccagtcgtatgccgagcatcaccgcatcctggacgccatcgccgagggcgacggcgaactggccgaactcctgatgcggcggcatatccgtgcctcccgtctcaatatcgaacagcaaatcacccaaggcaatcagcccgagagcgaagcatgaaccattcctaccgcaagcccctgccgggcacccgcctggactatttcgacgcccgcgccgccgtggaagccattgctcccggcgcctacgatgaactgccctatacctcgcgcgtgctggccgagaacctggtgcggcgctgcgaccccgcgctgctcaacgatgcgctcaagcagctgatcgaacgccgccgcgacctggacttcccctggtatccggcgcgcgtggtctgccatgacatcctgggccagacggctctggtggacctggccggcctgcgcgatgccatcgccgacaagggcggcgatccggccaaggtcaatccggtggtgccggtgcaattgatcgtcgaccactcgctggcggtggaatatggcggcgacgatccggatgccttcgccaagaaccgcgcggtcgaagaccgccgcaacgaggaccgcttccatttcattgactggaccaagcaggccttccgcaatatcgatatcgtgccgccgggcaatggcatcatgcaccagatcaatctggagcgcatgtcgcccgtcatctatacccaggacggcgtggcctatccggatacgctggtgggcaccgacagccatacgccccatgtggacgcgctgggcgtgatcgccatcggcgtgggcgggctggaagccgaaaacgtcatgctgggccgtgcctcctggatgcgcctgcccgacatcatcggcgtggaactcaccggccgcccccaggccggcatcaccgccaccgacatcgtgctgaccctcaccgaattcctgcgcaaggagaaagtggtcggcgcctacctggagttccatggcgaaggcgccgccgcgctcacgctgggcgaccgcgcgaccatctccaacatggcgcccgagtacggcgccacggcggccatgttcgccatcgatcaacagaccatcgcctatcttcgcctgaccggccgcgaagaaagccaggtcgcgctggtggaaacctatgccaagaccgccggtctctgggccgacagcctgacaaccgcgcgctatgagcgcgtgctgcgctttgatctcggcagcgtggtgcgcacgctggccggcccgtccaacccgcatcgccgcctgcccgtgtcggcgctggccgagcgcggcatcgccggcaaggttgaaaacaccccgggcagatgcccgatggcgcggtcatcatcgccgccatcaccagctgcaccaacaccagcaatccgcgcaatgtgatcgccgccggcctgctggcgcgcaatgccaaccgcgccggcctgaagcgccagccctgggtcaagagttcgctggcgcccggctccaagacggtcgcgctctacctcgaagaagccggcctgctgcccgaactcgaaaaactcggcttcggcgtggtggcctttgcctgtaccacgtgcaacggcatgtccggcgcgctcgacccggccatccagcaggaaatcatcgaccgcgatctctatgccaccgccgtgctgtcaggcaaccgcaatttcgacggccgcatccacccctacgccaagcaggccttcctggcctcgccgcccctggtcgtggcctacgccatcgccggcaccatccgctttgacatcgagcgcgacgtcctgggcgtggacgcccagggacgcgagatccgcctggccgacatctggcccagcgacgaagagatcgacgccgtggtgagctcggccgtcaagcccgagcagttccgcaaggtctacgcgcccatgttcggcatccaggacgaccgcaaatcggccgtggacccgctgtatccctggcgcccgatgagcacctatatccgccgtccgccctactgggaaggcgcgctggccggcgagcgcacgctgcgcggcatgcggccgctggcggtgctgggcgacaacatcaccaccgaccatctctcgccgtccaacgccatcatgctcgacagcgcggcgggcgaatacctcgccaagatgggcctgcccgaagaggatttcaattcctacgccacgcaccggggcgaccacctcaccgcgcaacgcgccaccttcgccaatcccaagctcttcaacgaaatggtgaagaacgaagacggcagcgtgcgccagggctcgctggcccgcgtggagcccgaaggcaaggtgatgcgcatgtgggaagccatcgaaacctatatggaacgcaagcagccgctcatcatcgtggccggcgccgattacggccagggctcttcgcgggactgggcggccaagggcgtgcgcctggcgggcgtggagaccatcgtcgccgaaggcttcgagcgcatccaccgcaccaacctgatcggcatgggcgtgctgccgctggaattcaagccgggcgtcaatcgcaagacgctggggctggacggcaccgagacctatgatgtggtgggccagcgcaaaccccgcgccgacctgaccctggtcattcaccgccgcgacggccggcgcgaagaggtggcggtcacctgccgcctggacacggccgaggaagtctccatctacgaggcgggcggcgtgctgcaacgcttcgccca

SEQ ID NO: 1848 - DNA, 22215 bp, synthetic construct
  misc_feature 1..22215: note = Synthetic
  source 1..22215: mol_type = other DNA
ggaaggcgcccggcacgcgcgcgccgccggattcgctcaggaacacgtaggcgtcgtcggtcaccggctggtgcagcggcgcgcccttttccttccagtcggggatcagctcggtcagcgccttcgggtccatcaccgcgccggacaggatgtgcgcgcccggctccgagcctttttccagcaccaccaccgacacgtcctggcctttttcggcggcgcgctgcttgatgcggatggcggccgacaggccggccggcccggcgccgacgatgaccacgtcgtattccatggcttcgcgcgggccgtactgctggatgatctgctcgggggtcatggggacttcctcgtggggtttgaaataatgggcggcatggtcggcgcgcgccccacaccgggcctgtcggctgtgcgaccgattttatgcagcgccgcgcgccccatcggcgacggcctgtccccggcgttccttgcccatcctgattcggagtcttcccatgagctacagcattgatttgtccggccgcgtggccctggtcaccggcgcctcgggcggcctgggggcgcagttcgcgcgcacgctggccaaggccggcgccggcgtggtgctggccagccggcgggtggaaaagctcaaggacctgcgcgcgcgcatcgagggcgacggcggcgacgcccacgtggtcgagtgcgacgtcaccgacctggcctccatcaaggccgccgtggcccacgccgagaccgagatgggctcgatcgacatcctggtcaacaactcgggcgtgtccaccacccagcgcctgcaggacgtgagcgaggacgactacgaccacgtctttcacaccaacgtgcgcggcgccttcttcgtcgcgcaggaggtgggcaagcgcatgctggcgcgcgccaagggcgcggcgccgggcagcttcaccggcgggcggctcattaacaatgcccgcacggccggcgctcagggggctcccaagatcggcgtccgccgtgatccagatgaccaaggccatggcgctggaatgggggcgccacggcatcaacgtcaccgccatctgccccggctacatcgacaccgagctcaaccgccaccactggcagaccgaggccgggcgcaagctgatcggcatgctgccgcgccagcgcgtgggcacgcccgccgacctggacgcggtgctgatgatgctggcctcggacgagagccacttcgtcaacggcgccatcatcagcgccgacgatggttttgcggtctgatggggcgccagctcccgtccgacaagcgtcatccgccatcatttttgtagcaattcccaacaacaaaccctgatgaagatcgaccttcccgaacagaaaaagctcgtccacgagatgctcatccccatccgctggggcgacatggacgccatgggccacctcaacaacacggtctacttccgctacatggagaccgcgcgcatcgaatgggtcaacgccatgggcctggcgccccggcccggcggcgaggccatcgtcatcgtcaacgccttctgcaatttcatccgccagttcgaataccccggcgaggtgcgcatcaagaccttcgccagcaaccccggccgcagctccttcgacacctgggcgaccatggagcgcaccgacgaccccggcaccgtgtacgccaccggcggcgccaccatcgtgtgggtggacatggtggcgcacaagtccgcccccctgcccgagtggctgcgccgggcggtggagccggcgccggagccgaccgagtgaatgaccgagcgccccggcagttcaggcacagtacccgtcatgaccgaacccatcccccacccctacgaagacctgatgcgccacgtgcaggcgcacggcgtgttcaaggccgaccgcaccggcaccggcaccaagagcgtgttcggccaccagatgcgcttcgatttgtcgcagggttttccgctggtgacgaccaagaaggtgcacctgaaaagcatcatttacgagctgctgtggtttctgcgcggcgacggcaacgcgcgctggctgcaggagcgcggcgtgacgatctgggacgagtgggccaagcccgacggcgacctgggcccggtgtacggcgtgcagtggcgcagctggccgacgcccgatggcgggcacatcgaccagatcgcgcaggtggtgcagcagctcaggagcaaccccgactcgcgccgcatcatcgtcagcgcctggaacgtggccgagctggaccggatggcgctgatgccctgccacgccttctttcagttctacgtcgctgaaggcaagctcagttgccagctctaccagcgcagcgccgacatcttcctgggcgtgcccttcaacatcgccagctacgcgctgctgacgcacatgctggcgcagcagtgcgatctgcaggtgggcgacttcatctggaccggcggcgactgccacatctacagcaaccacgaggcgcaggtgaccgagcagctgagccgcgcgccctaccccttgccgcagctgcacatcaagcgcaagccgccgtcgatcttcgactacgagtacgaggatttcgaggtgctgaactaccggcaccaccccgccatcaaggcgccggtggcggtgtgaagttacatccaaccattccacgcacgacttctacgtctcgatgatgtctgatcgaccagaccatgatttttgttgccgtcttgggaggcgatcaatacagtgaccttcaatgaaatacgcgccatagagcttctccaactcggttctagtcacgccaacgccaccttccgtgaaggccagaaggatgcgattcgccacatcgttgatgggcgtggccgtctgctggttgtccagaaaaccggttggggcaaaagctttgtttatttcatcgcgacaaagttgctgcgtgaggctggtgcaggcccagcgctgttgatctctccgctattggcactgatgcgaaaccaaatcgccgcagccgagcgcatgggcgttcgcgccgccacgatcaactcggacaatgtcaacgactggatacaagtcgaggccaagctggcccggggagagatcgacatcctcttgatcgcacccgagcgcctggcaaacgagcgcttccgcacgcaggtgctggccggcatcgccgcacagatatcgatgctggtcatcgacgaagcgcactgcatctccgactggggccacgacttccgccctcactaccgcctgctggagcggatcgtcaagacgctgccgcccaacctgcggctgctggccaccacggcaacggcgaacaaccgcgtgatggaggaccttgctgccgtgctcggtccgaagctcgaagtctcgcgcggcgacttgaatcggacctcgctgtccctgcaagcgatccgcttgcccagccaggccgaacgtctggcgtggcttgcgcagcaactggccgtgctgcaaggccacggcatcatctacacgctcaccgtgcgcgacgccaaccaggtcgccgactggctcaagacccggggcttcaacgtcgaggcctacacgggcgaaacgggcgaccggcgggaagcgcttgaacaggcgctgctcaacaacgaggtcaaggcgctggttgcgacgacggcgctgggcatgggctacgacaagccggatctggccttcgtcatccactaccagatgccgggctcggtcgtcgcctactaccagcaagtgggccgtgccgggcgcgcgctcgactccgcctacggcgtactgctcagcggccaggaagagtcggacatcaccgactggttcatccgaagtgcgttcccgacccggcaggaagtcgccgacgtcttgggcgcacttgaggaagaagagaacggcctgtccgtccccgagctgctgagtcgcgtcaacctgagcaagggccgcgtcgacaagacgatcgcgctgctctccctcgaagcgccagcacccatcgccaagcaaggcaccaagtggcagctcaccgccgccaccctgagcgaggccttctgggagcgagccgagcgactcacggccctgcggcgtgatgagcaccagcaaatgcaggactacgtcagtctgcccttcggtgagcacatgggctttctgatccgcgcgctcgacggcgatccaagtgttgtcacgcggcctgcgctgcccccgttgccaacggatgtggatgaggtgcttgttcgggacgccatcgaattcctgcgccgaaccagcctgcccatcgagccccgtaagaagtggcctgatgggggcatgcctcagtacggcgtcaaaggcttcattgcgcctgaacaccaggcgcagcccggcaaggccctctgcgtgtggggtgacgctgggtggggcggcctggtccggcgaggcaagtaccacgacggcaagtttgccgacgatctggttgcggcgtgcgtgaagatggtccgcgaatggaacccccaacccaagccgacgtgggtgacctgcgtgccctcgctgcgtcatcccgacctcgtccccaactttgcgaagcgcttggctgcggctctgggcctgccgtttcatatggtcatcgcgaaaactgacgacaggcccgaacagaagacgatggcaaatagcacacagcaggcgcgcaacatcgacggctcgctggcactcaacggtcagccggtgccccacgggccggtgatcctggtcgatgacatggtggactcacgctggacgctgaccgtggccgcgtggctgctccgcaagagcggaagcggcgacgtctacccgatggcgctctctcaaacgggacacgacgaatgacgcccaccctgtcctccaacacccaggcgatcctgctgctgacagcgccgctgatcgctggacgcggcacgtcttccgcggatctgctgtccccgggcgaatacaagcgtcttgcccgtcacctgcgggagatccaacgccagcccgcagatctcgtgtcgcccgatgcggccgatctcatgcatgcctgccagcccgttgtcgatgagggccgactgcaaagcctcttggggcgaggcttccttctgagccaagtcatcgaacgctggcaagcgcgtgccatctgggtggtcagccgcgcggatgccgagtacccccgccgcctgaaggtgcgcctgcgcgaagacgccccggcagtcctctacggttgcggcaacatggccttgctggagtcgggtggcctcgccgtggtcggctctcgccatgtggacgactcgttaatcgactacacgatggcggtgggccggttggcggcccgggctggaagaacgctcgtatccggcggtgccaagggcatcgaccaggccgccatgcgcggtgcgcttgaagcgggaggcaaagtcagcggcgtgctcgcggacagtctggagaagacgaccatgaaccgcgagcaccgcaatctgctgctcgatggtcaactggtgctgatttcgccctacgacccaagtgcggggttcaacgtcggcaacgccatgcagcgcaacaagctgatctacgcgctggccgatgcatctctggttgtcagctccgatttgaaaaaggggggaacctggactggtgccgttgaacaactggacaatctcaagtttgttccggtctacgttcgatcgacaggtgagtcgtccgtcggactagaagcattgcgcgataaaggggcgatctcctggccgaacccagaagacgctaacgctcttcagaaggtgttggaagctgatatgccagcccatgtgcgtccctcacagtcagcgcttgaacttacccccgaaaatcaaccatcagccgtaacatcgataactccgtcagttcaagaggcacatccaccaacgttccaaatttcgatcagttcagcaccaaaaccacaaccggaacagacacccagagatcaatgcattgagtcgcagtcacggccttccttatcccttttgtcgtcgccgctcggcaatacctcaaatgtcgcaggttcaatagcgagcacaggatcaacacccgctgacatgttgttcaccgcagttcgcgagttgcttcagcctctgctcgcgaccccgatgagtgacgccgaagttgccactgcgctcggcgtatctagtacacaagccaaagtttggttgcgacgcctcgtagaccaaggagtgatcgagaagcgaaagaagccggcgtgctacgtcatcaagcaacccagcatattcgaatgacgcctcggcagaaccacaactctcagactcgattgcgttacagcaatacctaccaagctcgcaaatgaccgacctgctctccctctaccgcaccatggtgcgcatccgcgccttcgaggacgcggccgaagtcgccagccagggcggcgtcgccgcctggggcaaggaggcctccagcacgcccgccctggtgcgcggcccgctgcacctgtcgaccgggcaagaggcggtggccgccggcgtgtgcgcgcacctcgcgcccgccgacctgctgaccagcacccaccgcggccacggccacacgctggccaagggggccgacccggccaagatgatgtgcgagctgttcggccgcgccagcggctacaacggcggcaagggcggctcgatgcacattgccgacttttcggtcggcatgctgggcgccaacggcgtggtggcggccggcctgccgattgcggtgggcgcggcgcaggggctgaagattcgcgggctgcatcaacgcgatggcgccatcgccgtgtgctttttcggcgacggcgccatcaaccgcgggccgttcatggaggcgctgaactgggctgtggtgtatcagctgccggtgctcttcgtgtgcgaggacaaccgcatcagcgccaccaccgccagcgcgccgatgacggccggccccggcgccagcgcgcgcgcggccgccatgggcatcgcggcgctgcaggtcgatggcaccgacgtgcaggccgtcagtgaagccgcggccgagctgatccgcgagatccgcgccggcagcggcccgcgcctgctgcacgcgctgacggaccggcacaagggccatgtctcggtcgatccgggcctgtaccgcgacccggacgccgtggccgccgccctggcccgcgacggcctggcgcgcacgcgcgcgcaactcgtcgtgcagggccacgaagcgcaggtcgaacagatcgagcgcgaggccaaggccgagatcgacgccgccgtcgccaccgctaccgccgcgcccttgccggacaggagtgcggcctacaccgacatccagaacgtgggcgaaggagtgtgggcatgagcagaacgaaactcccccctgagtcgccgtcggcgccttcccccctgaggggggacgcacccgacggccagggaaaccccggccgtgggcgcctgtgcatggcctgctccgcggccgtttggctctttggatttcgtgcaacgcgggtgatgtgagcgatatgaaaattgaaatgacttacgcgcaggccgccgcgctggcgctgtcgcaggcgatggagaaagacccgcacgtcatcgccctgggcgaagacctgggccgtggcggcgtgttcgggcagtaccgcgatgccgctggcgcgccgctggtgcagcgcttcgggccgcagcgcatcatcgacacgccgatctcggaaagcaccatcgtcggcgccgccgtcggcatggcgctggccggctgtacgccggtggtcgagttgcgcgtggtggacttcgccctgtgcgccatcgacgaggtggtcaaccaggccgccaagaaccgctacatgttcggcggccagggccgcgtgccgatggtggtgcgcatgccgatcggcatctggtcgtcctcggccgcgcagcacagtcagtcgctggaggcctggttcgcgcacatccctggcttggtggtcgccgcgcccgccacgccggccgacaaccacggcctgctgctggccgcgctggcctcgggcgatccggtggtctatatggagcacaaggagctgtgggccacgcccggcgcggtgacgccgggcgaggtggtgtcgctgggcaaggcacgcatcgcccgtgaaggccgtgacgtgacgatcgtcagctggtcgcgccagctgcaggcctgcatggaagcggccgaacagctgaccgcgcaaggcgtgcaggccgaggtgatcgacctgcgcaccatctggccctgggacaaggccgcggtgctgcaaagcgtcgccagaaccggccgtctgctggtggtgcacgaggccatccgcgccgccggcttcggcgccgagatcgccgccacggtggccgaggaaaccggtgcacgcgtggccaggctgggcgcaccgcgcatcccggtcggctacgcgccgacgctggaggccgaggcgcgcgtcaccgccgcgcagatcgccaccgcggcgcacaagctcgtcgtatgacgcgtccgcgcatcggcctgatctgggcgcaggcgcgcggcggcgtgatcggcaaggatggcgtcatgccctggcacctgccggaggatctggcgcacttcaagcgcaccacgctcagccacccggtcatcatgggccgcaagacctgggactcgctgccgcccaagttccgccccctgccggggcgcaccaacatcgtcgtcacgcggcgggcggattggcatcatatcagcgcccagtcggtgtccaacctaagcggggcgctacaactttgcgagaacgccgaacaggtctggatcatcggcggcgcccagatctacgcccaggcgttgccgctggccgatgaactggtgatcaccgagatcaacgccgacttcgacggcgatgccttcgcgcctgccctcggccctgagtggcatgaagtggcgcgcgagccgctggtggcgaccagcgggctgcacctggccttcgtcacttggcagcggacgccgccgagcgcgtaaaaggtgccctgcggggaaccacactggggtgataacaaattcagcattggctggcgcccgaaggtggccaaaaagacgaaaggccgcatgtagcggcctttccatttggtgctcatggatagagcttgttagcgtccagagcgcatttcccaatcgtgtagtactgcaatcttaacaccccgtgttacaaccccatcaagtattgattggagggattcatgggaaagatgcgctaccggttggcgttggatttgggcagcacctcgctgggctgggcgatggttcgattgaaggaagatcaacccgtcgccgtcatcaaggcgggggtgcgcatttttagcaatggccgcgaaccatcccgccccggcgaacttggaacctcactggcggcaactcgccgcctgaagcgcgcgatgcgccggcgccgcgaccggctgctcaaacgcaaggcccgaatgatggccctgctgatcgacaagggctttttccccaccgaccctgccgaacgcaaggcactggagcaactcaacccctacgaactgcgtgccaaaggcctggattccccgctcagccaggccgaatttgcccgcgccctctttcacatcaaccaacgccgcggcttcaagagcaaccgcaagaccgacaagaaggacaacgacagtggcgcgctcaagaaggccatcagtgcgctgcgccagcaactcgacccgagtggagccgacggcaaggcgcgcaccgtgggcgaactgctgtggcggcgcatgcaggatggcagcggcgtgcgcgcccgctatcgcgagcgccgcgtcgagaaggaagatggcaagacccggatcgacaagagctacgacctttatatcgaccgcgccatgatcgagggagagttcgacgcgctctgggccagccaggcgcgattcgacgcgacgcgattcaacgaggcaagccgagtcgcgctcaaggactgcctgttgcatcagcgcccgctcaaaccggtcaagccggggcgttgtaccttgctgcccgatcaggagcgcgcgccgctcgcgctgcccagccagcaacgttttcgcatctatcaggaggtcaaccacctgcgcatcctgggctcggatctgaccgatacgccgctgacgctggcgcagcgcgatgccgtcgtggacgcgctggagcgcagcgccaaacgcagcttcacgcagatcaagaccttgctgaaactgccgggcaccacgacattcaacctggaagacatcaagcggcaggaactcaagggcaacgccaccagcgccctgctcggcaagaaggacttcttcggttccgcctgggtcaccttcagcccagcgcagcaagacgccatcgtcatgcgtttgctgaccgaggaaagcgaggcagcgcttgtcgattggctgcagaccgaattcggcctagacgaatcccgctctgaaaccattgccaacgccagcctgccggaaggctatggcagcctcagcacgcaagcgctctcgcgcatcttgccagcactaaagagcgaggtgatcacttacgacaaggccgtgcaggtagcggggttcgagcaccatagccacatcagccacgcggcaacgacgggagaaatcctgctccaactgccctactacggccagcacctgcaacgccacgtcggcttcggcagtggtgacccacacgacccgcccgagaaacgcttcggcaaaatcgccaacccgacggtgcacatcggcctcaatcaggtgcgcaccgtggtcaatgcgctgatcaagcgctacggacaccccagcgaagtcatcgtcgaagtggcgcgcgatctcaagcaaagccaggagcagcgcaaggaacagcaacagcggcaggcggacaaccaacagcgcaacaaccgcctgcgcgccgacgccgccggcatcctgcgcattgcgcctgaacgggtgcgccaagccgacattcagaagctcattctctgggaggaactcagtcgtgacatcgccgaccgccgctgcccctacagcggcgtgcagatcagcgctgcgatggtgctgtcggacgaggtggagatcgagcacatcctgcccttctcgaacacgctggacgacagcctgaacaacaaaaccgtggccactcgccgcgccaaccgggtcaaagggaaccgcacgccttttgacgcacgcgccgactttgagcgacaaggctggacttacgacgccatcctggctcgtgcagagcacatgccacgcaacaagcgctaccgctttggtgaagacggctaccagaaatggttacgcgaggaccgagactttctggcccgcgccctcaacgacacacgttacctgagccgtgtggcgcgcgaatacctgagcctgatttgcccacagagcacgcgtgtcatccccggtcagatgacggccatgctgcgcgccaaattcggtctgaacgacgtcctgggtctggacggcaagaagaaccgcaacgaccatcaccaccacgccgtcgatgcgtgcgtgatcgccgtcaccgaccagggtttgctacagcgctttgcccaagccagcgcctgtgcgcgtgaacggcaactcgaccggctggtggatgacatgccgctcccgtggccaagctaccgagaacacgtggcacgcgcaattcacagcatctgggtcagccataagccggatcacgggtatgagggggcgatgatggaagaaacatcgtacggcatccgccgcgacggcagcataaagcagaaacgcaaggccgacgggagcgaaggacgcgagatcagcaacctgattcgcctggctgaacccacgcaactccagcgccatggcgtcgatcgcgacggcaatcccctttcctacaagggctacataggtggcagcaactactgcatcgagatcacccgcgaccaatccggcaagtggattggcaatgtgatctcaacgtttcgcgcgtacgacatcgtgcggaactcgggcttcggtcggctgcgccatccgaacctgggacagagcggccaaccgctggcgattcgtctggggatcaacgacgtcgttcggatggatcacgaaggtcgtgagcagacgatgcgggtcgccaaggtggacagtagcggaaggatggcgtttgcacctatcagtgaagccaacgttgacgctcgaaatcgagacaaggaggacgcgttctcgtacacatacaaaatggcaagcacattgaagttgtccaaggcacgccgcgtcaccatctcccccatcggcgagttgcgcgaccctgggttcaaagagtaagccccatgcttggccgcatcgttgaagtggccgatgaccggcgccacttgttcatgcaccggggctttctggtggtgcaagacaccgagggcgagcgcaaggaactgggccaggtgccgctggacgacattgccgccgtcatcgccaacgcgcacggtctgtcctacaccaacaacttgctggttgcgttggccgaacgcggtgcccctttcgtactgtgcgcggccaatcacaatgccgtgggcatgctgctgccaatcgagggcaacttcgaacaatcgcgccgcatcgaggcgcagatcgccgccggccggcctgtgcacaagcgtctgtgggccgccgtggttcgcgccaaactggaacagcagggggcggctctggaggccgctggagttgccaccgcgccgctacttgcactggcgcgcaaggtcaaaagcggcgacccggacaacctggaagcgcagggcgcccgtcgctattggggcctgctgtttggcgacgacttccggcgcgatcagaacggtggtggacgcaacgcgttgctcaactacggctacaccgtgctgcgggccgccactgcgcgcgccgtcatcgcggccggcctgcatcccggcatcggtctgcaccacagccatgacaacaacgccatgcgattggtggacgatctgatggagccttttcgccccgtgatcgacctcaaggtctggcagctctggcgcaatcaagaagttgacatcacgcccgagtccaagcgcgccctagtgcgcaccctgtacgacgacatgcagagcgacaccggcgccacgcccgtcatcgtgtgcctgcaaaagctggcaacctcgctggcccaggtctacttgggccagcgcgacaagcccgatctgcccctgcccggcctgccgctggcgctggccacttcactgcaagacgaatgaggtcagtcaggtgccaccatgctcacggggtatcgattgatgtggatggtggtgatgttcgatctgcccgtggtactcaaggccgaacgcaaggccgccaccgggtttcgcaacgcgctactcgatctgggattcgagatgagccagttcagcgtctacatgcgcatgtgcaccagcgccacgcaggtcgaaacctactgcaagcgcgtcgaggaagccttgccccagggtggcaaagtcaatatcctgcagttcaccgacaagcagtacgagcgcatcatctgctttcatggacaggcccggcaaccggccaacaaaacgcccgatcagttcgatcttttctgacaaaaagcgcatggttttgcaagcgctgaaagcgataaccccctgaaaaatcagggggttatcgctgtcagagtctagacgattgggaaatgcgctctggccggaacgtcgcttcactgatcgcgtcgtaaagttctagtctagacgattgggaaatgcgctctggccggaacgtgcgcagcatgaggccggcggcgcgggcgagtctagacgattgggaaatgcgctctggccggaaccggattgcgcaccgcgttgtagctgtcggcagtctagacgattgggaaatgcgctctggccggaacggcctgcatttcctccagcaccgtcaggcgagtctagacgattgggaaatgcgctctggccggaacgcgtggcgcgggcgtatctggcttgccaagagtctagacgattgggaaatgcgctctggccggaacaacctgttgatccgcctcggccgcatggtcagtctagacgattgggaaatgcgctctggccggaaccgctatgcgcgtcagatcaccgtgcgcttcagtctagacgattgggaaatgcgctctggccggaacgggcagggcctcgatctgatcatgggtcacagtctagacgattgggaaatgcgctctggccggaacggtcagcgcctgctcgatgcggccctcgatagtctagacgattgggaaatgcgctctggccggaacgccggcggcatcactgaaaacgcgcgtcaaagtctagacgattgggaaatgcgctctggccggaacagcctcctacgcctggtgctgcgacttcgaagtctagacgattgggaaatgcgctctggccggaacccgccgaagctgccgccgccaccacctccaagtctagacgattgggaaatgcgctctggccggaacggcaatgagtcggcgcagcgtcaagagccgagtctagacgattgggaaatgcgctctggccggaacacatcacgggcgctgcccctgccacgggcgagtctagacgattgggaaatgcgctctggccggaacgcgcctgtctcggctacgcaagctgacgccagtctagacgattgggaaatgcgctctggccggaacacccgacgcagggccaacaggccctgcgtcgggtgtcgcgcctgaaggcgcgcatgttgatcaagaagcgtcagaacactctactgtcatggctatcgccgggtcacggatgcctcgccggcagagacgacgcgcaccatgaaacgccctcccgaacggatggcgggcgtcacacggtagccggccggacggtgtagcgcagccagaccacgctgtcgcccagatcttccacgctgctcaggcggaacgccaccgggttgaccgcgctgtagggctcgcgcgcggtgaagaagcgtggcgcggtggggtcaccgttggcgatcggcgccagcaccatgctgacctcgtccaccaagccgttctggatgaaggaccagttgatggtgccgccgccgcccaccatcagccgctcgatgccgagcgcgtggagcctggacagcatcagcgcgtagtccacctggtcgccgccggcgatgatgtaggagacgccccgacgccgcagatagtccttgtaggcgttgctggccgcgtcggtcagcacttcgatgacatgtgcggtgacgccgccgtagtcgaaaccgctgaatggccaggcgagttcgccgcgcggatcgatggagatgtagtacatgcccgcatccggcgcggcgatgaagtcgcctggcggcactggcgcggcgttggcgtccagttcgggccgcttgtgatgggtgatgttgtcttcggtggatgccttgccgttgagataggcgtcgatgtcgagctgctgcttgcccggtgtcagggcgatgtcctgatagtgccggctgccggccttgaattccggcaatgccatggaattgatgttgccgtcgagcgcggtgtgggtgtggatgatgatgtagggacgattcatggtcgcttcctttgaagtggtcgagggaaccggcggcagcccctggctgaacgccttcgcatggaacaccgtcgcgccctgccccttgtccatgtcgctggcaacggcgtagagctcgttcctgccggggtggatggccaggctggtggaggccaggttatggccgccatcgcgccccggtagcagcacttggccgatgggaatgccgttgcgattgaacgccagcacgcggccctgcccgtagatcgccacgtacacgttgccgtcggcatcggcgcgcatcgagtccggcgccgggcctgtgaagtgataggcgatggccgagccgatcggtgcgatggtggtcgcatcggccagctcgacgcggtgcagcaggttgcggccgaactccgtggcccacagcgtcttgccgtcggggccgagcgccaggccgttggccatcgccagatgcggcagcacgggcttgaccgtggcgaggtctggcgcggtgtagtacacgccgcccttgggctcggtcgccgtgcccttgaagtcggtgaagtagaagccgccgcgtgcgtcgaaaaccaggtcattgggcatgtagccagccaccggcggcacgatggcctgcaggcccgagccgtccgggttcaccgcgaagatcgcgccgcgctggttcgggatgtccagcgccgcaatgaacaaacgcccgtccgggtgaaaggccagcccgcccggcgccagcgcgtccaggctcacgacggtggacaactgcttgtccagcgtcaggcgcagcacgcggcgtccactcacgtcgcaaaagagcagattaccgctgcggtcgaagatcgcgccctcgaggatcagcccctcctgggataccttgaaccagggcgcggccacggcagtctgcaagccgcgctcggatggcgggaccggcaccgcaccctgcgtctgcgcgtcgtaggccagcccggccacgttggcttgctgtgccgacgcgcccgacacgaggccgatgctcagcaccaggcatgtgacgatgagggccgctctcgccttggcgccacgctggcccatgggcttgcgcaggaaggtgggtgacatcgcaccgctcaccaggcttgcctggcgggcccgaccgtgaactcgctgaccgtggtgtcctcgggctggtcgatcgcgtaggcgacgacgttggcgacccggtccggggagatgccgagcttgtcatagaggccctgcatctggtccagcgacgccttgtcgctgatcgtccccagcaattcggtgttgatggccgccggatagatcgtcgcggtgcggatgtgggtgccttcctgggcagactccatgcgcagcacttccatgaagtcgcgtacgaaccatttggtgccgccatagacggcgccgcccggataggccttgagccccgccaccgacgaggtcgcgatgacgtggccggatttccgggccatgaactcgggcagcacggcggccacgccattcagcacgcccttgacgttgacgtcgaccatctggtgccactcatcggtcttcagtgcagacagcggcgagttgggcatcaggcccgcgttcagaaagatgacgtccacgcggccaaagctgtccttggccagttggacgatggcgtcattgtcggactgccgggtcacgtccagttcctggtaaacggcctggccgccatgctgctggatctcgcccgcgatccgcttcagatgctctgcgcgccgcgcccccagcacgaccttggcgccttggctggcgagcagcttggccgtggcctcgccgatgccggatgaggcgccggtgatgatgacgactttgtccttgatcatgatgtttctctccttcagtacaccgtgaacccgccatccaccgccagcgcctggccggtcacgaagctcgatcccgaactgcacagccacagcacggcatcggcgatttcttcaccggtgcccaggcgcttcatcggcaggtcgcgcagcaggtcgtccatggccagcatgcccttgtcgagcatgtccgagaccatgggcgtggcgatggtgcccgggcacacggcattgacccgcacgccgcgcgtggcgtattccagcgcggcgctcttggtcagcccgatcacgccgtgcttggtgccgtggtaggcggcgatcatggcccgccccgtgaggccgccgatggacgagcagttgacgatggcgccgctgccctgctggcgcatctgaaagagctcgtgcttcatgcaggcccacacgccgcgctggttgatggcgctgatgcggtcgtagtcctcgatggactggtccgcgatctccgaggcggggatctggatgcccgcgttgttgaaggcggcgtccaggcggccgaaggtatccaccgtgcgttgcaccatcgccgccacctgggcctcgtcggccacgtcgcagaccacgccgatggccttgccgcccgcggcggtgatgtcatccacggcccgctgcaaggccgcttcgctcacgtccgccagcgtgacggaagccccggccttggcaaaggcccgcgccgtggccaggcccatgccggaggccgcgccggtgaccagggcgacctgccccgtgaagtcgtaggtgagtttcatgaaattctccttgtgggttgtgacccgcatccattcagcggggattttgggcaaatccgatccgcaccgtgccgctgccgagcgcctgcgccagacccgcagggtcttcgagacggcccacgcgggtgtaggcgtagtgcgagctgaaggtctcgtaaaaaaccaccagggtcttggcgccgaacagcagcacgtcgcccgtgcggatggtgcccaccctgaccgcctgcgtcggcagggcttggggcagatcggcgtatttctcgttgccatgcaggtcggccatgtccatggccagcggcagcatcgcggccagcgcgcgggcggcctcggtgtcggccagggtgatggcgaagcggcgttcgccgacggtcatccacatgcgtgatacctccttcggggcagtggccgctgtattgctggccgtggcggctgcgggctggcccggcgcacccggctgagcagcgtcgcaggccccgagcaccagcaggccgaacatgagggccagcctgcgcatctcagttgtccatggcgctgcgcgccgcccgcagggcatgaaacaccacccttgtgggagcggccttggccgcgatcagcgcggccggcgagcgatgcgccccatcgcggccaaggccgctcccacggggcgggacgcacaggcgccgatggttcgtcaggtgtttcatttcagtcctggccgacctgcgccatctgcacagtgtccatgcggccaccgtaaatctcaagccgagccagcccggtctccagcgcccacaaatcgtccgccgtcaaacgcaggttggtggcgcccatgttctcgcgcagatgttccaggttgcccgtgccggggatgggcacgatccacggctttttcgccatcagccacgccagcgccacctgggcgggcgtggcgcccttgctggcgccaaagatcttcaggaagtcgaggaccggctggttgttcttcattacgatagggctgaagcgcggaaagctcgcgcgcaggtcgttcttcgggtccatggtggactgcacgtccgccttcagcgtgccgggcagcaggccctggcccagcgggccccagggcacgaagccgatgcccagctcctcgcaggcctgcagcacgccgttgcgctccacgctgcgctcgatcagcgaatactcggactggatggccgccaccggctgcaccgcatgggcgcggcggatggtgcgcgcgctgggctcggacaggccgaagtgcagcaccttgccctggcggatcaaatccttgatggtgcccgccacgtcctcgatgggcaccgtcagatcgacacggtgctggtagtacaggtcgatgcggtcggttttcaggcgcttgagcgattcctcgaccacgcggcggatgcgctcggggcggctgtccaggccgttggtgccgtcgatcttgaagccgaacttggtggcaatcgccacttggttgcgcaccggggccagcgcttcgccgaccagctcttcgttcacgtaggggccatagacctcggcggtgtcgaagaagcgcacgccgcgctcgtaggcctcgcggatcacgcgcaggccctgcgcgcgatccaccccggggccgtagtggccgccgctcagcgtcatgttgccaaagcccaggccgggcacggtcaggccgcccaggcggcgcggctccaggccttgcggctggcgggcagtgccttgggccgatgcgggcagggacagcgatgcagcgcccaccggcagcgcggcggccgctgcgatgcccgccgctctcaggaagctgcgccgaccggcgggtgtgcctggtcttggcgcggtgtcccggtcatggatgttctgtgggttcatgtgcgaatgctttcaagtggaggaagtggaaaccggcgttccatgtcctgcatgttcccgtatgcgggcgcccttgactagataatgaattcttaaagggtatataaggggtgctaatcaatcctggagggacactgccccatggtcagacgcaacctcaacgatctgctgtatttcgtcaccgtggcgcgggaaggcagcttcacccgcgccgcatcgctgctgggtgtcacccagtccgcgctcagccaggccatcagcggcctggaggcgcggctggagattcggctgctcacgcgcaccacgcgcagcgtgtcacccacggccgccggcgagcgcctgttgaacgccatcggccaccgcttcgacgagatcgatgctgaactcgacgagctgaccgagatgcgcgacaagcccgccggcaccgtgcgcatcacttgcggcgagcacgtgctgcgcaccacgctgctgcccaaactcacgccgctgctgcgcgaataccccgacatccagatggagttcgacatcaactacggcttcaaggacatcgtggccgaccgcttcgacgcgggcgtgcgcatgggcgacaccatcgacaaagacatgatcgcggtgcccatcggcccgcccttgcgcacggcggtcgcggcttctccggcgtactttgagacccaccccatccccaggaccccgcgcgacttgctgcagcacaactgcatcaacatgcgcatgcagaccgccggcggcctctacgtctgggacttcgagcgccggggccagaagttgaacgtgcgggtggacgggcagctcatcttcaacacctcgcccagcatggtggactcagcgctggcggggctgggcatagcgtccctgcccgaagacgagttcgcaccgcacctggaggaaggccggctggtgcgcgtgctggaggactggtgcccgccctttcccggctattacctgtactacccgagccgccgccagccttcgcatgcgttctcgctggtgctcaatgcgctgcgcgtgtcggcaccgcccggctcgaaacggcgataggccgagtcgttcgggaagaaccaagcctgccttcgcgcccatgcttcgaccgaagtggcacgaagtcgatcgccagtaacgcgtcgccgcgaacggcctgcgcctggccttcgtcaaggggttttcgcccgcgctcaccgctgaaccgcgcagcagggccacaatgacttggcccatccacgggcgcgagaggccaaaccatgacccagcccttccaggtcggcgaccgcgtcagctggaactccgaggctggccgggtgagtggccgcatcatccgcatccatcgacaggacttcgactggaagggctacacccaccacgccagcccagacgatccgcagtacgaaatccggagcgacaagaccgtacacgtggcggtgcacaaaggcaaggccctgcggcgcaccgcggattgaggccatggccgagcgcctgccctgtttcaccatcggccattcgacgctgtcagtggatgaactcgccgcacgcctgcgcgccgcgggcgtgtcccgcttgatcgacgtgcgcgcgatcccgcgttcgcgcaccaacccgcagttcaacgccgacgcattaccggcggcgctggcggcgcacggcatcggctacgaggcagtgcccgacctgggtgggcggcgcggccgccagcgcatggtggcacccgcggtcaacggctggtgggacaacgtcagctttcacaactacgccgactgggcgctgcagccaccctttcgcgtcgcgctgcaagccctgcgcgacaaaggtcagcgcgagcgctgcgccgtgatgtgcgccgaagcggtgtggtggcgctgccaccgccgcatcattgccgaccacctgctggctgcgggcgaggaggtgcgccacatcatgaaaggccggatcgaagacgcggcgctgacgccgggcgcgctggcgcatgcagacggtacggtcacctacccggcacaatcggccgcatgaaaatcaccacctggaacgtcaattcactcaccgcccgcctgcagcacgtgctgaactggctggccgccaacccggtcgatgtgctggcgctgcaggagctcaagctcagcgacgacaagtttccgcacgaggcgctgcgcgcggccggctacgaggccgccgtgttcggccagaaaacctacaacggcgtcgccctgctgacgcgcgcgcctttgctggcggccgacgt

SEQ ID NO: 1849 - DNA, 21984 bp, synthetic construct
  misc_feature 1..21984: note = Synthetic
  variation 14935..14979: note = n is a, c, g, or t
  source 1..21984: mol_type = other DNA
gcgcaaacacatcgtcctcgtgcacctcggccgttcccgcagagggggtgtgctgcgccagggcgcgctcgtattcatcaccgagcgccagcacgcgcaagccgggcaactgcgcgcgcacggcctgcaggatgggcgcgctcagcagcgggtcatggatgaagacggtgggcttgacgcggcccatggtcgtgagcgccgcttcggccggcaggtgcttgtggaagctggcaaagatggtgccgttctcgaacgtggccaggcgggtttcgtactgctcgccggtttcgggcagccaggtgaagaccacgtcgccttgcttcacgccctgcgcctgcatccaggcctgcaggcggtacacgcggtcttgcagctgcgcataggtgagcgtgccgcgccggtcgatgagcgcgggttggcgggggtgcaggcggtacgccaggcgggccaccgagcgcgcggtgcgcaggcggctgagcagaaagcgcgccagcaggctgcgcagggatggaagggccaccggaatctcccgaagacggcatgaaagcgaagtccaggcagtttttcacgcacggccggggcaagcgatgaccatttgtatgggcgcgtatcttgttgtttccgattccgctgtgcggtcgttttgtcctcttgaacggccagcgtgtttcaggcgcgcgtcgccattgcgcaacaaggccgggtgccggtgcaacggacaaagaaaaaccgccagggccggatcgcggcggctggcggttttgcagtgcaggggcccggcccgggtggggcagggttgcaaaaaaggcggcagcggcgctcgggccgcggcagtgggtcaggggtacagaccgcgcatttcgcgcgcgtgcaggatgcgcttgcaggccacgatgaaggtggcggtgcgcaggctcaccttgtgctcttgcgccacttgccagatgcccgcaaaggcctcttgcatgatgcgcaccaggcgcgcgttgatctcgtcttcgctccagaagaagctggagaagtcctgcacccattcaaaatagctcaccgtcacgccgcccgcgttggcgatcacgtcgggcagcaccagcacgcccttgtcgtgcaggatgtcgtcggcctcggtggtcgtggggccattggcgccttcgatcacgagcttggccttgatctggcccgcgttgtccttggtgatctggccttcgagtgcggcggggatcaggatctcgcagtccaccgcccagaactcctcggccttcatcacatcggcgccggcaaagccgcccacgccaccacgcgttttcacatgggccagcagcgcgggcacatccaggccctggccgttgaagatggtgccggtgtggtcctgcacggccaccaccttggcacccgcttcggcaaacagcttggccgcaatgccccccacgttgccaaagccctgcaccgccacacgggcgccttccagcgccaggccggtcagcttggcggcttccacacccacggtgtacacgccacggccggtggcttccacacggcccagcgagccgcccaggtccacgggcttgccagtgaccacgccggtggcggtggcgcccacgttcatggagtaggtgtccatcatccaggccatgatctggccgttggtgttcacgtcgggtgcggggatgtccttggacgggccgatcagcaggccgatttcgctggtgtagcggcgcgtgaggcgctccagctcacccatcgacagcttcttggggtccacgcggataccgcccttggcgccgccgtagggcacgttcacagctgcgttcttcaccgacatccaggccgacagggccatcacttccgacagcgtcacgtcctggtgaaaacgcacgccgcccttgccggggccgcggctcaggttgtgctgcacgcggtagccttcgtagtgggcgatggtgccgttgtccagctcgatgggcacgtccacgatcaggatgcgcttggggcgcttgagcgtttccacccagcgggccaggctgcccaggtagggcgtgacgcgatcaacctgctgcaggtagttgccccaggggccgaggtggtcggcctgcaggtaggagggcagggtgtgcacggcgcctgcaggggtggcggcgggtgcgccggtggatgaggacatggtgaattccttgtgggatcagttcaagccgcgaagcttatgcctgccccgaaagtctgtccaaggccggagtgtttgagtgctatgcaattaatgcataaccatgggaaagcccatgttcatgcggcattgcagcaaaagcagggcgtcattcgacccgcaggtgcgccagcgacgggtcgcctgcgggggcgcgcaggtccaggctttgcagcacctcgcgcagcaccgtggcgatcatcaggttgcggtgggtcttggagtcggcgggaacgatggtccagggcgcccagggggtgtgcgtggcatggagcaaggtgtcgtaggcccggcggtactcggcccattgcttgcgcaccgcgatgtcgcccaggctgaatttccagcgcttggccgggtcgtccagccgctcctgcaggcgctggcgctgttcgtcggcgctgatgtgcagcaggaacttgagcacgatggtgcccgtctcgctgagcatgcgttcaaacgcattgaggtgcgccagccgctgctggtgctgttcgggcgtgatccagccgttgaccacgggcaccagcacgtcctcgtagtggctgcggttgaacaccgtgatgtcgcccgccggcggcacctgctggtggatgcgccagaggtagtcgtgcgccagttcggtctcggtgggggccttccagcccacggcgtgcaccccgagggcgctcatgcggccgaacacgccccggatggtgccgtccttgcccgaggtgtcggtgccctgcagcaccaccagcagcttgtagcgcttgtcggcgtagaacaggttctgcagggtgtccagctccagcgccagcgcttccacggcggccttgtcgcgggccttgtcgcccagcgagaacggcttggcgccggggtcgaggtcgtccagcgacaggcccttgtctgtgggctgccaagggcgcaggcgttgcgcaaaggaggacggggcggcatcaaaaggcgaaggcatggggcggctcctggcagggcgcccgaaggcgccggggtgtcaaagatacccgctgtgggctggtgcctgctgccactggccgtgcaacccgtccgcccgcacgaaggtcggtgcgccaggccggagttggtcaggccctcgatgccgcccaggccggcgtgcgcattcttccttgaacggggcgttccgccccctgccacaccccgtcagcgccgggccatgcggtaggccagcggcgtctgccccgtggcctggcggaaggcgcggtgcaggccggtttcgttggcaaagcccaggtcttcggcgatgcgcttcaagggccggtcggtgtcgcacagcgcctcgctcgcctggcgcagcttgatgcggcgcatccagtgcgcggccgacaggcccgtgtgcgcctgcacccgccgcgccagcgtgcgtggcgacaggcccagggcatcggccagcgcgggcaggcgcagctgggtggccgggctacgctgcacccacagcatggcgcggcgcagctcggcatcggccactgccatgaggtcgtgccccgcgaaggccgggtgggtggtgcgcgggcgcggcagcatcagcagggcctgcaggtcggccaaggcctcggggggcagccgcgcggccagcgcgtgcagcatcaggggcaggtagccattggccccggctgcggtggtggcggtggggccggccaccaggggctcatcaaagcgccaatccaccgcggcaaattgctgctccagtgccgcgcgcagccaccaggtggccgtggcgccctggccgcgcagccggccgctggcggcggccagcaccacacccgcgcagtagctccacagcggggtgcggcggggcagggcgcgcagcgcctggaccacgggggccagctgctgcagcggtgcctgcaggccatcgggggacgagagccacaggcccggcaccagcacggcatccgcccccgcctgggccagcgccaccgtgggggccagggccgggccctgccaggtgggcacgggctgcaggtccacgccggcccaacacacctcgatcaccgtggcctgcgcgcgcaggttggcggcgcgcaccatgtcggcggtggcaaacaggccggccggcatgcagccggggtacagcagcagtgcgagccgcaacggggcggtggggcgtattggaggggcgggcatggatggccggaagtggcaagaaattgtcagatccagccattctcgccgtcgcgccaaatttcaacaatccacccatacccacctatacccatccgtaccccccttccttcggagtcttcgccatgcacatcacccaccttcgcaacgccaccgtggtgctggaattccaggccgccgggcagtccatcggcctgctggtggaccccatgctcgcgccccggggcagcctgcccgccctgcgctacctgggcgtgcggcgccagcgcaaccccatcgtggagctgcccgcgcaggccgacgcggtgctcgggcgcgtcacccacgcgctcatcacgcattgccagcgcgggcatttcgaccacctggacagcgccggcaagcgcttcctgcgcgagcgccgcatcccggtgttctgcatgccgcacgacgcggactaccttgcgcagcgcggcctgcaggtgctgccgctggccggtgcggcgcgccagccctttgccctgggcggccagatcaccccgatcgcttgtgtgcacggcgagggctgggtggggcgcttcatggagcatggccacggctacctgctggagctgccgggcgagcccagcgtgtacctggcgggcgacacggtgctcacccccaccgtgcgcgactgcctgcagcggctgcagcccggcgtggccgtgctgccggcgggtggtgcgcgcttcgacctgggggcagacatcctcatggacgggggcgacatggccgaggccgccgccctgatggccggaaccctggtggtgaaccacctggaggcgctggaccactgccccaccacccgcgcctcggtgcgggcgctggccgtgcaagggggctgggccgaccggctttgggtgcctgaggatggcgagtcacgggcgtttcgatacgccgccgttcgccctgtggttgctactgaatcagtagctgtttgcgcttgatgattaagccttggacggctttttgatgctgctctcgccgggccccgggcgcggccctgcgctctcgcgcatcagcgccacgaagcgcgccgcgcccaggcccagtggccgctccttggaccagaccacgtccacccacagcgccgtgccgttgctgaggttttcaaacggcatctccaccagcgtgcccgccgcaatgcgcggctgcaccagcgcgcgcggctgccagccccagcccaggccggcctcgatcaggcccagcgcggccaggtggttgtcggtgcgccagtggtggcgggcaaacacaaaacgcgggtcggtctgccccaggtcgcggctggccaccacgatctggcgcgtggtggtgaggtgttcctcgcgcagcatggcgccctcgggtggctcgccgcgcgcctgggcggctgcgcgggccccggccagcaccgggtgctcgggtgcaatcacggccaccagggtttcggtgcccacctcctgaaacccctcgcgcccgtcgatgctgggccgctcgaacaccagcgccagctgcgcacggccgctgtgcagcagcgccagcgcatccacctgcggggcggccagcacctccacctgcagcagcgggtattcgtgcgccagcgccgccagcgggccccgccagcgcgcggccagcagctcgggggcgatggccagggtcaggcgctcctccagcccctgggtcagcgccagcgcctgggcgttgagctgctgcagctgctgggccagcagccgcgcctggggctccagcgcgcgcgccgccgccgtgggccggggctcgcggccgctgcggtcaaacagctgcacatccagctcggcctccaggtgcgccatcgtcatgctcacggccgaaggcacccgcgacagcgcccgcgcggcggccgaaaacgagccctggtcgagcaccgtgagaaacacctgcacgctgtcggagttgaaagccatggcggttctatctgtcaataaaactgaaataagctgaatttatatgtcagattgttgaatataaagtaccggccatggacaagacacccactctttttggcctgcaaggcgtcaagcgccgcgtgatctacgtcactctgtacgagctgatcgccattggcgccgccacggtgggcctggcgctgctcacgggccagggcgcggggcattcgagcgtggtggcggtggcggcctcggtgatcgccatcgtctggaacctcatcttcaactgggccttcgagcgttgggaggcgcgccagcccgtgcgcgggcgcagcgtggcgcggcgcgtggcgcacgccatcgggttcgagggcggtctggtcttcacgctggtgccgttgtttgcctggtggtttggcgtgagcctgtggaccgccttcgtcatggacctggggctcatcgtgttcttcctgtgctacacgtttgtcttcaactgggcgttcgatcacctgttcggcttgcctgcatcggccatggcggcttcgtaacaacagcctagagcgcgcttcttcaaataacgtcactgctatctgcagggcgttttgggcggaacctttttgcagttcctgcctgttcgctgacccggtaaaatccgccgcttgcccaaggagcgttgcagcggccccatcgccatggtgaagccgtcaggcttgggcaccccataagctattcaagccccaccgcaacgacgctcacctgtatttccgctgcccctgcacaggtgagtcctatgtccgctgtatccctgccccccatgaagctgtccggcctggagcccgtctccattggcgagggcaccttgttcgtcaacatcggcgagcgcaccaacgtcaccggctccaaggcgttcgcgcgcatgatcctgaacggccagtacgaagaggccctggccgtggcgcgccagcaggtcgaaaacggcgcgcaggtcatcgacatcaacatggacgaggccatgctcgacagcaaggccgccatggtgcgctttctgcagctcattgcgtccgagcccgacatcgcccgtgtgcccatcatggtggacagctccaagtgggaggtgatcgaggccgggctgcgctgcatccagggcaagggcatcgtcaactccatcagcatgaaagagggcgtggagaagttcaagcacgaggcgcgcctggtcaagcgctacggcgctgccgccgtggtgatggcgtttgatgaggtgggccaggccgacacctacgcccgcaagatcgaaatctgcgagcgcgcctaccgtgtgctggtcgatgaagtgggcttcccgcccgaagacatcatcttcgaccccaacatcttcgccgtggccacgggcattgaagagcacaacaactacgcggttgatttcatcgaagccacgcgctggatcaagcagaacctgcccggcgccaaggtgtcgggcggggtgtccaacgtgtccttcagcttccgcggcaacgaccccgtgcgcgaggcgatccacaccgtgttcctgtaccacgccatcaaggcgggcatggacatgggcatcgtcaacgccggcatggtgggcgtatatgacgacctggagcccacgctgcgcgagcgtgtggaagacgtggtgctcaaccgccgccccgacgcgggcgagcgcctggtggagattgccgaaaccgccaagagcggcgccaaggacgaaagcaaaaagctcgaatggcgcggcacgcccgagcaccccaagaccgtgggcgagcgcctctcccacgcgctggtgcacggcatcaccgacttcatcaccgaagacaccgaagaggcctaccgcgagattttggccaagggcggccgcccgctgcatgtgatcgaaggcccgctcatggacggcatgaacgtggtgggcgacctgtttggcgcgggcaagatgtttttgccccaggtggtcaagagcgcccgcgtgatgaagcaggccgtggcccacctgatcccttacatcgaagaagaaaagcgccaggacgagctggccggccgcgacgtgcgcagcaagggcaagatcgtcatcgccaccgtcaagggcgacgtgcacgacatcggcaagaacatcgtcaccgtcgtgctccagtgcaacaacttcgaggtggtgaacatgggcgtgatggtgccctgccatgaaattttggcgcgcgccaaggtcgagggggccgacatcgtgggcctgtcgggcctcatcacgcccagcctcgaagagatgcaatacgtggcgggcgagatgcagaaggacgaccactttcgcgtcaagaaaatcccgctgctcatcggcggcgccaccaccagccgcgtgcacaccgctgtgaagatcgcgccgcactacgaaggccccgtggtctatgtgcccgacgcctcgcgcagcgtcagcgtggcgcagagcctgctgggcgacggtgtgcagacctacgtggacgagctgaacgccgactacgaaaaagtccgcacccagcacgccaacaagaaggctacgccgctgtggcctctggccaagatccgcgccaacaagacgccggtggactggtccgcctacctgcccgcagtgccccgtgcgctgggccgccgtgtgttcaagaactttgacctggccgagctggccaagtacatcgactggggcccgttcttccagacctgggacctggccggcccgtaccctgccatcctcaccgacgagatcgtgggcgtggaagccacgcgtgtgtttgccgatggccaggccatgctcaagaagatcatcgaaggccgttggctcacggccagcggcgtgatggcgctgctgcctgccaacagcgtgggcgacgatatcgagttctacaccgacgacacccgcaccgaggtcgccatgacctggtacggcctgcgtcagcaggccgaaaaacacaccatcgacggcgtgacccgacccagccgctgcctggccgactttgtggcgcccaaagagagcggcattgccgactacgcaggcctgttcgccgtcaccgccgggctgggtgtggagaagaaggaaaaggctttcatcgacgcgctggacgactactccgccatcatgttcaagagcctggccgaccgcctggccgaagcctttgccgaatgcctgcaccaccgcgtgcgcaccgacctgtggggctacgcggcgggcgagcagttgagcaacgacgagatgattgctgagaagtacgctggcatccgccccgcacccggctaccccgcctgccccgaccacagcgccaagaccgacctgttccgcgtgctgaacgccgaagagatcggcatgggcctgaccgaaagcctggccatgacccccgccgccagcgtgagcggcttctacatcggccaccccgacgcggtgtacttcaacgtcggcaagatcggcgaagaccagctgcacgacatggcccagcgccggggcatggacgagaaggtgctggagcggctgctggcgccgaatttgtgatgctatagattgtatagctgcctgcgcttgaataataagcgctagagcccaatccgatcagaaagacgaaagccccgcatgcggggctttccatttggtgcatctttcagcttgttagcgtccagagcgcatatcccagtgatatttagtaggcttgaattctaaacgaatctgctaaaaccgacggtctagtcttcacaattggagtggcctatggcctttgcaggtgcgtatcgtttggctctggacctgggttccacttcattggggtgggcgatgtttaggattcaccaagacccgattgggggcagtgttcccacagccatcattcgctcaggcgtgcgcatcttcagcgatggccgcaaccccaaggatggatcgtctctggccgtgactcgccgtgccgcccgtgccatgcgccgccgccgcgatcgcttgctcaagcgcaaggcgcgcatgatggagcaattggtgcgccatgggttttttccggccgaggtggccgagcgcaaggcgctggagtcgctcaaccccttccagttgcgcgccaagggcctgcatggggcactcacctccggcgagtttgcgcgggcgctgttccacatcaaccagcgccggggctttcaaagcaaccgcaagaccgatcgcaaagacaacgacagcggcgcactcaaacaagccatccaccaactgcgcgcgcatatcacggccagtggttgcgctacggtgggtgaatggttttggcaggtgcgcatgcagcagcggcccgaaggggtggcagggcagggcgtgcgtgcgcgctaccgcgaaaagcccttcaccaccgaagagggcaagaaacgcatcgacaagagctacgacctatacgtagaccgcgccatgattgcgcaggagttcgatgcgctgtgggctgcgcaggcggcgctgcaaccggccctgttcaccgaggtggcgcgtgccgatttgcgcgacaccctgctgcaccagcgcccgctgcgccccgtgcgccctggccgctgtactttgctgcctgaggaagagcgcgcaccgctggccttgcccagcacgcaacgttttcgcatcttgcaggaggtgaaccatctgcgtttgctggatgacacgctgcgtgaagtgccgctgatgctggcccagcgcgatgcggtggtggcagcgttggaggctaagaacaagctcagttttgaccagattcgcaagctgttgaaactgtcgggttctgtgcaattcaacctgcaagatgccaagcgcaatgaactcaaaggtaacgccaccagcgcagccttggcgcgcaatgatctgtttggtgctgcctgggcgggctttgcggtcgaactgcaggacgagatcgtctggcagatcgtgaatgaagagggcgagggcaccctggtggcctggctgcagcagcacacgggcgtggacgaggctcgggccgaagccattgccaacgtggctttgccagaaggctatggcagcctgagccgcaaggccctggcgcgcatcgtgcccgagttgcagcgcgatgtggtgacctacgacaaggccgtgcaggccgccgggtttgcgcaccacagcgatttgggctttgactttgaccacgaaagcgacgaagtggagctggtaggcgagcgcaccgtgccctccacgggggaaatccagcccgtgttcgccttcaaagagctgccctactatggccgtgcactgcagcgccatgtggcctttgccaaggacaacccgcgcaacgacgaagagcgctacggcaagatcgccaaccccacggtgcacatcggcctgaaccaggtgcgggtggtggtcaatgccttgatccgccgctatggccgccctgctgagatcgtggtggagttggcgcgcgatttgaagcaaagccgtgagcagaagctggagacgcaaaaaaagcaggtcgacaaccagcgccgcaatgcccgcatccgcgaacgcattgccgagaccttgggcatcagccccgagcgcgtgcgggccagtgacatccagaaatggatcttgtgggaagagctgagctttgacgtggccgaccgccgatgcccctacagcggcgtgcaaatcagcgccgtcatgctgctcagcgagcaggtggagattgagcacatcctgccgttctcgcagacgctggacgacagcctgaacaaccgcaccgtggccatgcgccaggccaaccgcatcaagcgcaaccgcacgccttgggcggcgcgggctgattttgaagcgcaggggtggagttatgacggcattctgcagcgcgccgagcgcatgcccctgcgcaaacgctaccgctttgcgcccgatggccatgagcgctggctgggcgaggacaaggactttctggcccgtgcgctcaacgacacgcgctacctgtcgcgcgtggccaccagctatttgcggctggtgtgcccgcaaggggggcgggtgattccggggcagatgacggcgatgctgcgcgccaagttggcgctgaacgatgtgctgggcttgaacggcgagaagaaccgcaacgaccaccgccaccatgccgtggatgcatgcgtggttggcgtgaccgaccaaggcttgttgcagcgctttgccagcgccaacgcccaagcccgtgaagggggcgtgaaccgtttggtagaaaacatgcctttgccgtgggacacctaccgcgaccatgtggagcgcgccgtgcggcacatctgggtgagccataagccagaccatggttttgagggcgcgatgatggaggaaacctcttacggcatccgcaaggacggtagcatcaaacagcggcgcaaggccgacggcagcgcagggcgcgagatcacccacctcatccgcattgcagagcccgcacagcccacccgccatggtgtggatgccgaagggcagccatcgccctataaaggctacgtgggcggcagcaactactgcattgaaatcacccgcagtgagctgggcaagtgggagggagacgtgatttctacctttgatgcctatcgcatcgtgcgagcggcaggagagggagatgctggatggggccaactgcgtcacgctcgtcaggggcagaacggaaagccgttggtgatgcggctcgccatcggggattgcgtacggttgcaactgcgggaccgtgaagaggtaatgcgtgtcgtctctgtcaattcggcgggacgtttgacactcgctgccattcatgaggccaatgtggataaacgcaatgccgacaagaccgacccctattcctacacatacaaaaacgcggcgcctttgcaacaagcaatggctcgacgggtgtctgtgtcccccatgggtgatctgcgcgacccaggctttcagggctagccaccatggtaggccgcatcgtcgaaatcgcagacgataggcggcacctgtttgtgcaccgcggcttcatggtggtgaaagacaccgaaggcgagcgcaaagagctagggcaggtgccgctggatgacattgctgccgtcattgccaacgcccacggcctcacctacaccaacaacctgctggtggcgttggcagagcgcggtgcgccctttgtgctgtgcggtgccaaccacaacgccatcggcattctgctgacgctggatgggcaccatgtgcaggccaagcgcattgaggcccagtgggcggctgcgttgccattgcataagcgcttgtgggctgcagttgtcaaatgcaagctggagcagcaggcggcagcgctggaggccgcaggcgcacccacggcaccgctgcaggcgctcgtaggcaaggtcaaaagcggcgaccccgagaacattgagggccaaggtgcccgccgctactggggcttgctgtttggcccagagtttcggcgcgatcaggatggtgatggcgtcaacgcattattgaactacggctacaccatcctgcgctctgccacggcgcgtgccgtggtggctgcaggcctgcatcccagcatcggcctgcatcacagcaacgacgccaacgctatgcgcctggtggatgacctgatggagccgtttcgccccatggtggacttgaaggtatggcaattgcatcaggccgccgagtcacatgtcaccccagagaccaaacgtgctttggtgcgcgtgctgtacgacgatatacccaccgctgcaggcgttacgccggtgatggtttgcatgcagcgcctagccatctccctggcccaggtgtacctgggtgagcgcaccaagctggatttgccgttgcccggcttacccctctcgctggcgggcagttttgaggcggactgaaccccactaaagccagtccattgctacaccatgttgtctggataccggcttatgtggatagtggtcatgttcgacttgcctgtgattgagaaggccgaacgcaaggctgccacgcagtttcgcaacggtctcttggacctaggctttgaaatgagccagttcagcgtgtacatgcgcttttgcacaagtcaggcgcaggtggataccctgtgccgagccgtagaacgcgccttgccacagggcggcaaagtgaatatcttccaattcaccgacaaacaatacgaacgcgccatcacctaccacgggcgcagcaaacaaccggcgcaaaaagcaccggaccaatttgacctcttctagcaaatggcgcggttttctagtgctctgaaagcgaaaacttcttttgttatcaagaagttatggcgctcagagtctagatcactgggatatgcgcactggccggaacgagagagataatcggccccgccttggacgtagtctagatcactgggatatgcgcactggccggaacccgggcctacgcggagcgcgggcagttcgaagtctagatcactgggatatgcgcactggccggaaccgcaacaaacatgcggttcatgaacggcttagtctagatcactgggatatgcgcactggccggaacccggcgtccttgttggagcaaggccaggggagtctagatcactgggatatgcgcactggccggaactcggcaacagcaacggcgcaaaggtcattgagtctagatcactgggatatgcgcactggccggaactgttctggagattggcacctggattgcaggagtctagatcactgggannnnnnnnnnnnnnnnnnnnnnnnnnnnnnnnnnnnnnnnnnnnntgcgcactggccggaacggcgcggggtacttccgagccatccgcgagagtctagatcactgggatatgcgcactggccggaacacgaagcgggcgtttggaatgccgagtttcagtctagatcactgggatatgcgcactggccggaacagctattgcagtggggacggtgatcgtcgcagtctagatcactgggatatgcgcactggccggaacctgcacgcgccgccagaagtcgcgctcgtaagtctagatcactgggatatgcgcactggccggaaccacggaaacgctctcgggcagcagccccgcagtctagatcactgggatatgcgcactggccggaaccaatcgccttcttggcacgaactaccagcagtctagatcactgggatatgcgcactggccggaacctgctccgggcgctctgccaggtctcgttgagtctagatcactgggatatgcgcactggccggaactgaatgggcatctcagtgatgcgaccccgaagtctagatcactgggatatgcgcactggccggaacgtagtgctcgcgcaggtagtcgttttcttcagtctagatcactgggatatgcgcactggccggaacccaacgcttccacaagcgccctcattgcgcagtctagatcactgggatatgcgcactggccggaacatagatgcggtcccagcgctgtttgccttgagtctagatcactgggatatgcgcactggccggaacgctacagccgaaggcacatgacatgatccccacggactatttgtccgctgtcatcccacccgcactctcagccatctcaagctgcatcatcaccatgttgaccagcgtgtgcaccgatggccgcccggtctcgatcacgtagtgggcggtttcgcggtacaggtggtcgcgctgggcgtagaggtcgcgcagcttgtccatggggttgccgccttgcagcagggggcgggtcttgtcgtgtttgacgcgcttgaagatttcttcgggcgaggcgcgcaggtagagcacgttgccgaattggcgcaggacttcgcggttctcggggcgcagcacggcgccgccgccggtggacaggaccatgccgccgggctggcgggccacgtcggccagcacctgggcttcaaggtcacggaagcgggcttcaccctcggcttcgaagaagctgcggatggtggtgcccagggtctgttccagccggtggtccaggtcgatgaagggcacgcccgcgcggtgggccagttgccggccgacggtggatttgcccgagccgggcatgccgaccagtgcgcagcgaatctgcataggttcaaaaaagaggtctgggggacgacgggcctgcgcactgcggatggagctgtgttgcatgccgtgactgggcgttgagtgtaagccggggcctgtgggggtctgtggggcctctggcgcccgccgcagcagggcgctgtgttccgaggggcgggtctgtcagatcgattcgcattccaaacgacccacccgttcacgctgaggtcgtcgaagcgttgcgctgggcttcgacaggctcagcccgaacgggtggggttggggtggatggggcctgaacgttgatcacaatgccgcgtacaccagcgccgggtacagctcacacagataccgcagctggccgggcgcctgggtgagcaggatggcgaacaggtcctcgtcggggtccacaaagaagcaggtgccgcccaggccgctccagctgtagtgcccggccgagccggggcgggtggcctggccggtggcggtgcgcacggccacgcccaggccaaagccgtaaccggtgggcaggatgtcgcccgccaccggcagggtgcccaggtggtcagcggtcatgaagtccaccgtggcgcggcccagcaggcgcacggggccgtggggcccgggggcggtgccccggcccagcatgagctgcagaaaccgcgcgtagtcgctggcggtggagaccaggccgccgccggccgactcgaacgcgggcggggcggtcacgtcgatcagcggcatgccgagcccggtctgcgggtcgcgcgcaaaggcttcggccaggcggtgctgttgcgcggcgggcacggcaaagccggtgtcgtgcatgcccagcgggccgaacacgcggcgctgcaggatcgcgcccaggcgctcgccttcgatcacctccagcaccgcgcccagcacgtcggtggcgcggctgtattcccagcaggcgccgggtgggtgcaccaggggtagggggcccagcgcggcggccagctcggcattgctgtggcggcgcgagccgatgcgcgcggtgcggtaggcatccggcaccgtgccggcctcccaggcgtagctcaggccggcggtgtggcgcagcaggtcgtgcacggtggcttcgcgttgcacgggggcggtggtgccagtggctgcgtcgtacacacgctggcccgcaaacgcgggcaggtagtgcgccacggggtgtgacagtagcaggcggccttcttccatgagcatcatcgccaccagcgaggcgatgggcttggtcatggagtagatgcggaacaccgtgtcgggcgccatggcgggcactgccgagtcggcgctgggcgggcgctggtggcccacggccgtgtgcagcacggtgtggccccggtggtgcaccagggccacggcgccgggcagcaggccctggtccacatgggtttgcagcacggagcgcaggcgggcgagggcggtggggtgcatggggtggggcaatgaaatttttgaagttttttggccgcttgcgctctacagtcaagcgctaaaagctataaaaatagtagcgtttgcatgagttgccatgcgcagccgctcaggccgcagccccgggcgcacgactgcgctcctgctcctgcagctcgcgccactgcaccttgcccgtgccggacttgggcaggcgctccaccagctgcacgatgcgcgggcttttgtaggcggccatgtgctcgtggctccagtcgatgatctcttgctcagtggtctggcccttgaaggcgtcgcgcagcacgaccagggccttcaccgtctcgccccggcgctcgtcgtgcgcggcgatcacgcacacctcctggatcgcagggtgggcgtacatcatggcctcgacctcggcgggccagaccttgaagcccgaggcgttgatcatgcgcttgagccggtccaccatgaagaaatagccgtcttcgtccacctgggccagatcgcccgtgcgcagaaagcgcttgccgtccagcgtgataaagctgtcggccgaggcctgcgggttgttccagtagccttgcatcacctgcgggccatgcaccacgatctcgccgatctcgcccgggggcagctcggcgaaggtggccgggtccaccacgcgcgcatccacgtcgaacacggggatgcccaggcactgcggcttggggcggtgcggcgggttgatgtgggtggcggccatggtttcggacatgccgtagccctccacatagtcgagcccggtcaggtctttcaggcgctgcgccacggccttgggcatggcggcgccgccaccgcggatggcctgcaggctactgatgtcgtagtcaccaatgcgcgggttggccagaaagtccaccaccatggtcgagatggcctgccagatgctgatgcggtagcgctgcatgagctgcgcggccgcgtcgcggtcccagcgcggcagcaccaccacggtggcgcccacaaacagcggtccgttcatgctgcccgacatgccggtgacgtggaacagcggcagcaccgtgaggtaggtcgagtcctgcgtgcgcgcaaaccactgcgcgccgcccaccagcgtgctcatggcgctgcggtgggtgtgcatgcagcccttggggtggcccgtggtgcccgaggtgtagggcatcacgcacaggtcgtccggcccggtggtaagagggccgggcacgcgctgctgcgccagcatgtcgctccacagcgtgacgcccggggcatcaatggcctggcgcggcgcgctgacgaaggcgggcacgggcagatcggtgggcacctgcaggtagtcgctgtaggcggccacgatgaggtgctggagtttgccctcagcacattcaccgcctgctgcatccaccagcggctgggcctgcgcatgcaggtcctgcggcacaaaggccacggtggcgccgctgtcgtgcacatagtggcgcagctcgtcggtcaggttcatggggttcaccggcaccaccaccgcattggcgcgcaggatgccgtagaacgccagaatccactgcgggctgttctgcatgtacagcagcacccggtcgcccgccttcacgccacacacctgctgcaaaaagcccgcgatgtgctcggcctgctgctggaactgccggaaggtcaccagcgtgtcgtagaacaccagaaagggcttgtccggaaagcgcgcggccgacacctcggcgttgtggaacaggtgggtctgcggcagcgtgaggtggcggggcagaccgggcggccagtgcgccaggtggcggtcggacatggggagggttcctcgggttcgttcacaccttctcaggcgtcgtcggtcgggcggggcggggcgcccgctgccgccgtcattctcatcatgcgcgtttcaggtggcgggccagttcgtccttggcgatggcgttgcggtgcacctcgtcggggccgtcggcaaaccgcagggtgcgggcctgggcgtaggccgctgccagcgggaagtcgtcgctcacgccgccgccgccatgcacctgcatcgcccagtcgatcacctggcaggccatgctgggcgcggccaccttgatcatcgcgatctccttgcgcgccaccttgttgcccaccgtgtccatcatctgcgcggcgttgagcaccagaaagcgtgcctggtcgatcaggatgcgcgcattggcaatgcgctcgcgcgtcacgccctggtcggccacgggccggtggaaggccacgcggcccagggcgcgttggcacatcagctcgagtgcgcgctcggccacgccgatgaggcgcatgcagtggtggatgcgccccggccccaggcggccctgggcgatctcgaaaccgcgcccctcgcccagcaggatgttggacaccggcacgcgcacgttgacaaaactcacctcgccgtggccgtggggcgcgtggtcgtagccgaacacgggcagggcgcgctccatggtcacgccgggcgtgtccatgggcacgaggaccatcgactgctgctggtgccggttggcatggtcggggtcggtcttgcccatgaagatcaggatcttgcagcgcgggtcgggcgcgcccgaggtccaccacttgcggccgttgatcacgtagtggtcgccatcgcgcacgatgcgggcttcgatgttggtggcatccgacgaggccacgccaggctccgtcatggcaaaggccgagcggatggtgccgtcgagcagcggcagcagccagcgctgttgctgctcgggcgtggcgtagcgcgccagcgtctccatgttgccggtgtcgggtgccgagcagttgaacgcctcgggtgcgatgtgcgagcggcccatgatctcgcacaggggcgcgtattcgaggttggtcaggcccgcgcccaggttggattcgggcaggaacaggttccacaggtcggccgcgcgggccttggccttgaggtcttccatcacccgggtgggctgccaggggttgccggccttgcggtgggcggccacctcgtggtggtacaccgattcggcggggtagatgtgttcttccatgaacgccgtcaggcgctgctgcagggctatgactttgggggtgtaggtgaaatccatggcgaatccttggcagtgagatcgggtggggtcagatcaggctggcgccgccatcgaccacgatggactcgcccgtgatgtggcgcgaggcgttagacgccaggaacaccaccgcgcccttgaggtcctcttcaccgccaatgcggcgcaggggtgtgcgctcgatcatggcggggcccagtttttcgatgaggccgctggccatcttgctcgggaagaagccggggcagatcgcgttgacgcggatgccgtagtgcccccattcggatgccagcgtgcgcgcaaagtgcagggcggcggccttggaggtgttgtaggcaatggtgttcatgcccgggggcgtgcccttgagcgcagccaccgaggccgtgacgatgatcgagcccttgccgcgcggaatcatgcagcgcttgcccacttcgcgcgacaggaagaacggtgcgctcacgttcaggtccatcaccttgtgccaggcggcgtcggggtagtcctcggccttggcgccccaggtggcgcccgcgttgttcacgaggatgtcgatggtgccgaagcgttcgaccacctggtccaccaggccggggatgtcttcggttttctgcaggtcgttgaccacggtcagcacctcgtagcccagggcttccaggtggcttttggcctcggccagttcatcggctttgcgcgccgtgatggcgagtttggctcccatctcgcccagggcctcggccatctgcaggcccaggccgcgtgagccgccggtgaccagggcgacctggccggtgagatcgaagagttgcttgacgctcatgggaatcgctttcgtgaaggggaagagagaagaaagagtgggttgccgcgcgccgccgggggctgctgttctgctgcggggaacgaaaaggagggtgcggaggtgcgtggcgcggtgacggtgcaagggctgcctggcgcgccgcggtggcggtgttcaggcatcagaacctgttcaagatcttttcggggatcgcattggagtgcaatcgggatgagtggatgcttcggatgcgccgcatgggctcgtgcccatgcaagccgccggggcgtccaatcgcccgatttcactccaacccttcggccaagtgccttgcc

SEQ ID NO: 1850 - DNA, 20066 bp, synthetic construct
  source 1..20066: mol_type = other DNA
  misc_feature 1..20066: note = Synthetic
acgttgttgagcttggccgatttgctgatgggctgcatgaggcaaccgtcctttccgtagggaatgccggagccgggccggcgcgaaaaggtataatgttacttgagcccttgctgcaccgcaaatccagaattgacgcggcttgcacgggggcgtgcccctaccggatcgaccgcctttcgccgatgaaacttcactccctgccgaccaccggcctgctggccatcaccacctacgatgcagcgtcgattcacgtcaatggccagtgccttacccgcagcttcattctcaccggcgagcgcctgatcgaagactggccaccggcgtccatcgcggatatctccgcaaccgatctcctgcccctggccggcctcggttgcccgatcgtcctgctcggcaccggccggcgtcagcactttcccccgccggcgctgctgcgcccgttgtatgaacatggcattggtatcgaggtgatggacacccaggccgcctgccgcacctacaacatcctgctcgccgaaggccgcgccgtggctgcggcactgatcctggaacattccgcatgacctcgacccccctgcgccgcgggcccttgctgctggccctgctgaccttcgccgtgctgtggttcggcgccctcgaccatcgtcgcctgatcaatcccgacgaaggccgctatgccgagatcccgcgcgagatggtggtcagcggcgactggctgacgccgcgtctgaacgacctcaagtatttcgagaaaccgccgctgcaatactgggccacggcggcggcctacacgctgttcggcgaacatcactggacggcgcggctgtggccggcactcaccggcttcttcggcgtgctgttcaccggctgggccacggccctgctgttcaccccggcagcgggtctgttcgcggctgcggtgctggccagcagcctgctgtggaatctgatcgggcacaccaacacgctggacatgggtgtcagcttctttcttgccgcggcggtgcatgcgctttgtcttgcgcagcgcgccacggcaaccgcgcaggaaagtcggcgctggcaggacgccgcctgggtgctgctggcgctggcgatcctctccaaggggctgatcggcctcgtcctgccggccgccaccgtcctcgcctatgccctgtggcagcgtgactggggcttcatcctgcgcatccggccctggcggggctgcctcatcctgttgctcgtcagcgggccctggctcgtcgcggtctcgctggccaaccccgagttcgcccatttctttttcatccacgaacatctcgaacgtttcctgaccaaggtgcatcaccgctacgagccgccctggttcttcctccccatcctgatcgtcggcatgctgccctggctgggcagcctgtggccaggcttgctggcaggcgcgcgccaggccggcagtggcagggaatttcagccgcagcgtttcctgctcgcctgggccgtggtggtgttcgtctttttctcgatttcagactcgaagctaccctcctacatcctgccgatcttcccggccctggcctcgctcatcgcgctcgaaatgaccacggccagaacgcgcctggcctggcagatggcgccggccatcctgatcggcctggccggactgttgctgacgccttatgtcatccaccgcgccggcggggaaatctcgctcgacatttatcgtgcctatcaaccctggctatacgccgccgccggattgctgacggcaggcggcgcggcggcgacctggctcgcccatcgcggacgcgccgcggcggcgacgctggtgctggccgcggccggctttcttggcggccaggccgtgctgctcggtcacgacagcttcggcaaggccaactcggcccacgacatcgtcgccgccatccgcggccaggtgccgtccggagtgccgttctacagcgtcaatacctatgacccgagtttccagttctatctccgtcgcacgacaacgatggtcgaatacaagaatgaactgagcttcggcatcgcccaggaaccggaaaaattcatccccgacctgaaaaccttcgccgcccgctggcaggccgattccgtcgcctgggcgctaacctcgccggacaccttcgcccagctgaaaagggaagggctgccgatgatcgaggtcgcgcgcgatccgcgccgcgtggtgatcagaaaaccggacgcaggagcaacccggccatgacccccgtcagtttcgccctgatcctcaccggcgtgctgctcaacgccgccgcacaactgctgctcaaggccggcaccaatgccgtcggccacttcgaattccatgtcggcaacctgatccccatcggcctcaagctcgccctgcaacccttcatcctcggcggcatggcctgctatgccgtcagtctggtggtgtggatcatggcgctctcgcgggtgccggtgtcgatcgcctacccgatgctgtcgatcggctatgtgatcaacgccttcatcgcctggcagtggttcggcgaagcactggccgcgcaaaagctgctcggcatcggcttcatcgtcatcggcgtggtgctggtggcacgatcgtgagttcatcctttttgcccttcacccgcccggcgatcgacgaggaaaccatcgctgccgtgaccgccgtgctgcgttccggctggctgaccagcgggcccaaggtgctggccttcgaggccgcgctttcacagtactgtggcggccgcccggtgcgcgtcttcaattccggcaccgcggcgctcgaaatcgcgctgcggctcggaaaagtcggcgctggcgatacggtgatcaccacgcccctgacctgggtcgccaccgccaacgtgattctcgaagtcggcgccacgccgatcttcgtcgatgtcgatccggcgacacgcaatctcgatctcgaccagatcgaagccgcgattcagccgacgacccgggccatcatcccggtcgatctcgccggcctgccggtggaccggcaacatctccacgccctggccaagcggcacggcctgcgggtgatcgaggatgccgcccaatccttcggcgcatcctgggccgggcagccgatcggcacgtcgttcggcgaaggccgcgatttcgtcgctttcagctttcatgccaacaagaacctgaccagcggcgaaggcggcgccctggtgttgcccgacgatgtcgatccgggactgtgcgagcgtttgcggctgcaaggcgtgcggcgccttgccgacggcggcatggaggtcgacgtactgggcggcaagttcaacctcaccgacatcgccgccgtcatcggcctcggccagctcaagcacctgccggaattcaccgagcgccgccgcgcgctggcccgccgctatttcgaatggatcgatcccggcctgggcctcgaactgcctgccgctgatttcgtaaattccaactggcatatgtttcaggtgctgttgcccgccggcgcagatcgcggcgaattcatcgcggcgatgaagacgcacggcgtcggcatcggcgtgcattacccggcactgcacctgttctcgctctaccgacggcttggctggaaggatggcgactttccagtcgccgaggacatcggccggcgcaccgtctccctgccgctgtttcccgccatgcaagaaagcgacgtcgatcgcgtctgccacgccctgcatgagatattgcccgaggtctcccgatgatttccatcgtcattcccgtctataacgaggaggccggtctgccggtgctcttcgcccggctctatccggcgctcgatgcgctggccgaaccttacgaaatcctgttcatcgatgacggcagccgcgaccgctcggcggcgctcctgcgcgaacagttcgagcgtcgccccgaggtcacccgcgtcatcattctcgccgtcaatgccggccagcacatggccatcctcgccggcttcgagcattgccggggcgagatcgtggtcaccctcgatgccgacctgcaaaatccgccggaggaaatcgccaccttgctggcgaagatgcgcgaaggccacgactatgtcggcagcatccggcggcggcggcaggacaacctgttccgcacctgggtctcgaaagccgtgaatcggctgcgggaaaaaaccacccggatcaagatcaccgaccagggcaacatgctgcgtgcctattcgcgcgacgtggtcgaggccatcaacagatgcaaggaagtcgccaccttcatcccggcgctggcctacaccttcgcccgccatccggccgaggtcatgaccgaacacgaggaacgcgccgcgggcgaatccaaatattcgctctacagcctgatccgcctcaatttcgacctgatgaccggcttctcgctgatgccgctgcaatggttctcgatgctcggcatgctggtcgcgctcggctccggtgcgctgttcgttctgctgatcgcccgccgcctgctgctggggccggaggtcgagggtgtattcaccttgtttgccctgatgttcttcctcatcggtctggccctgttcggcatcggcctgctcggcgaatacatcggccgcatctaccagcaggtacgtcaccggccgcgctatctgatcggcgcgatcctggaaaaagaacagtgactaaagcacccacggccgtcgtcttcgcctaccacaacgtcggcgtgcgctgcctggcagtactgctggcgcatggtgtcgaggtggtgcgcgtgatcactcaccgcgacaacccggcggaaaccatctggttcgacagtgtggctgaactcgccggccgctacgacattccggtcatcaccccggaaaatgccaacgacccggcaaccgtcgccgagctggccgcattgcagccggatttcatcttctctttttattaccggcagatgctgggcgcgccgctgctggccctgccccgtcgtggcgcctggaacatgcacggctcgctcttgccaaaataccgtggccgcgtgccggtaaattgggcgatcatccacggtgaacgggaaaccggcgccacgctgcacgaaatggtcgccaagcctgatgccggcggcatcatcgcgcaacaggcggtgccgatcctgcctgacgatacggcattcgaggttttcaacaaggtcaccgtcgccgcggaaatggcgctcgatcgcattctccccgacctgctcgccggccacgtccatccgctaccgcagaacctggccaccggcaactattgcggcgggcgcacggccgaggacggacgcatcgactggaaccgctccgccgccgctatccacaacctgatccgcgccgtggcgcccccttatcccggcgccttcttcgacaccccgcagggacgcgtgcgtgttctgcgctcgctgcgtcccttgccgcagcccggcccttttggccggccgacactgttcttcgatgaccgccggttgctcgccgaatgcggcgacggccgcgttctacccctgctcgcggtagaattggcgggagcgccgctgcaaaccacgaatgacaatccgctcggcattttttttggcgcgaacacgcttcctctgacatgaaaaaaatcctcatcctcggcgtcaacggcttcatcggccatcatctttcccggcgcatcctcgacaccaccgactgggaagtccatggcatggacatgaactcggagcggatcgcaagcctgatggacaacccgcgctttcacttcttcgaaggcgacatcaccatcaaccgcgaatggatcgagtatcacgtcaggaaatgcgatgtcatcctgccgctggtcgccatcgccacgccggcgacctatgtcaaggaacccttgcgcgtcttcgagctcgatttcgaggccaacctgccgatcatccgccaggccgtgaaatacaaaaagcgcgtgctgttcccctccacatccgaggtctatggcatgtgccaggacgcggaattcgatcccgaaaactccaacctgatcctcggcccgatcaacaagccgcgctggatctactcctgcgccaagcagatgatggatcgcgtgatccatgcctacggccagcaggagggactcgactacacactgttccgtcccttcaactggatcggccccggcctcgattcgatccacacgccgaaggaaggcagctcgcgggtgatcacccagttccttggccatatcgtgcgcggcgagccgatcaagctggtcgatggcggcacgcaaaagcgcgccttcacctatgtttcggatggcatcgatgcgctgatgaaaatcatcgaaaattccagtgacattgcccgccacaagatttacaacatcggcaacccgaagaacaactatgcgattcgtgacctcgctcacctgatgctgaaactggcgcaggagtatccagagtatgcggtcaatgccgccaaggtgaagattctcgaaaccacctccggcgaatactatggcgccggctaccaggacacgcagcatcgcgtaccgagcatcggcaacaccatgcgcgatctcggctgggcgccgaaagttgatttcgagaccgccctgcgcggcatcttcgaagcctatcgcagcgacgtggccgccgcgcgcgaattgatggactgagtttcttcctatgcagatcggcttgaaaatcgacgtcgatacctggcgcggcacccgtttgggcgtgccgcgcctggtcgacctgctgcgccgccatgacgccggcgccagcttcctcttttcgctcggccccgaccacaccgggcgggccattcgccgcgccctgcgtcctggcttcatgcagaaggtgcaacgcacctcggtgttcgcccactacgggctgaccaccctgctctacggcacgctgctgcccggccccgacatcggccggcgcggcgccgacatcctgcgcgcagtgcgcgaggccggcttcgaaaccgccatccattgctgggatcacgtccgctggcaggacggcgtgacgcaggccggtgcgccctgggtcgaacgcgaaatgcagcgcgcccatcagcgctacgtcgatattttcggcgccgagccgcccggtcacggtgccgccggctggcagatgaacgcccatgccctgcgcctgacgcaacgcctcggctaccgttgggcctccgattgccggggcacgcatcccttcatcccggtctggaatgcggagatcgtgctttgcccgcaactgccgaccaccctgccgacgctcgatgaactgatcggcatcgaccagatcaccgccgacaatgtccatcaccatctgctcgaccttaccgccaacccgcgccagaaccatgtattcaccttgcatgccgaactcgaaggactgaagttcggcgatacgctggaacgcttgctcaccggttggcgcgagcagggctatcagctcgtctcgctcggccagctgcgcgacgggctcgacctgacacaacttcctcgccatgaaatgatccgcggcgaactcccgggccgctccggtacgctgatgctgcaaggcgaggaatttttatccacctggaaggaagccgcatgaccgacccatccccccagccttcgctgatcgggctgaccgtgcccgagttcaccgcgccgtccaccgtcggcgagttcaccctttcgctccatcgcggtcaccccgtggtgctctatttctatccccgcgacaacacacccggctgcaccacggaggcccagcagtttcgcgacctgcatgccgaattcatcaaggccggctgcgtcatcgcgggcatctcgcgcgactcgctcaagtcgcacgaaaacttcaaggccaggctgggtctgcccttcgaactgatttcggacatcgaaggcacgctttgccggatgttcgacgtggtcaggaacaagatgctctatggcaagaaggtgctcggcatcgagcgcagcactttcctgatcgatggcgaaggccgcattcaccaacaatggcgcgggatcaaggccgacggccacgccgcactggttcttgacgctgtgatgaaactctaattgccgataaagccggagattccggctctcattaccgcctcgggaaaaccgggggctcgctatcgtgagctcacccatcccaccccgaggtgcccatgaacgccaaacgcgccaagtcggccaaaacccccgccagcaagctgttcgtcatcgacaccaacgtgttgatgcatgacccgctgtcgctctaccgcttcgaggaacatgatctgttcgtgccgatgatggtgctcgaagagctggacgcaaataagaagggtatgaccgaagtcgcccgcaatacccgccaggccagccgcatgctcgacgaaatcgtctgcgaggccgagcaccacatggccgacggcatcgccctcgaccagccatcgcgggggctcgccagtggccgtctgttcctgcagaccgaagccatcaaccacattctgcccagctcgttgccgaccgcgcgcgccgacaaccagatcatcggcgtggtgatgtatctcagccagaaatatcccgggcgccccgtcatcctggtgtcgaaagacatcaacatgcgcatcaaggcccgcgccctcggactcgaagcgcaagattacttcaacgacaaggtgctggaagataccgatctgctctacaccggcacgctcgaactgcccgcggatttctgggacagccacggcaagggactcgagtcacgcaagcaggaaagccgcacctggtatcgcgtcaaggggccgctgtgtcccgacctgctggccaatcaattcgtctggcaggacgagccgcagccgttccaggcgcgggtaaaagtcggcgctggcaagacggcggaaatcgagaccgtgatcgattacagccatgccagaaactcggtgtggggcatcaccgcgcgcaaccgcgaacagaatttcgcgctcaacctgctgatggacggcgagatcgacttcgtcaccctgctcggccaggccggcaccggcaagaccctgctgacgctggccaccgcgctgacgcagacgctggagatgaaacgtttttccgaaatcatcatcacccgcgtcaccgtcccggtcggcgaggacatcggtttcctgcccggcaccgaggaagaaaagatgacgccgtggatgggtgcgctggaagacaatctcgacgtgctcaacaagccggccgaccagccggtgggccaggccggcaattacggcggcgaatggggccgcgccgcgacaatggatctgatccgcagccggatcaaggtcaagtcgctcaacttcatgcgcggccgcaccttcctcaacaaattcctcatcatcgacgaggcgcagaacctgaccccgaagcagatgaagaccctgatcacccgcgccggccccggcaccaaggtggtctgcctcggcaacatcgcccagatcgacacgccctacctcaccgaaggcagctcggggctcacctacgtggtcgaccgcttcaagggctggctgcattccggccacgtcaccctgcaacgcggcgaacgctcgcggctcgccgaccacgcggccgaggtgctgtaaccagggaaagggaaccactgaacaagccgtcatggtcggaagttatgcaggacgagacggtgcgacggtggccggatggccgcaatgtgcagagttgcagccgttccttattctggccggcaggtctgcgtccgaccctaagtggtctcatgacaaatagtagccatctagctgcttcttcgcgcattgccgccatccggcccaaggggcttacgcccagtcagaaactcgtaccacctagaccatactgcctagccaagttgaagattagcctttagacggacgaaggccgcgcactgcgcggccttccatttggtgcatctttcagcttgttagcgtccagagctcatatcccagtcatgtagcagccacaatcgtagcacaacgtgctaaaaatatgccactgaataattcagggagagaaacatgggcggtttgcgttaccgattggcactggatttgggcagcacctcgctcggctgggcaatagtacggctcaaaggcgacgaacccgttgcattcgtcaaggtgggcgttcgtatcttcggcgacggacgcaatcccaaggatggttcctcgttggccgtcactcgacgcgccgcacgcgccatgcgccgccaccgcgaccgtctgctcaagcgcaagcaccgcatgatggcgctgctgctcaagcatggcttcttccccgccgacgttgccgagcgcaaggcgctggagttgctcaacccatacgaactgcgcgccaagggactgaacgaagcgcttgcgcctgccgaattcgcccgcgccctgttccacatcaaccaacggcgaggtttcaagagcaaccgtaagaccgacaagcaggataacgacagcggcgctctcaagaccgccatcaacaccttacggaaagccatagccacttacccagtgggatcggatggcaaaccgcttcaaccgggtaatttcaacctattggattgggtaaatcggcaattaccagaaaccaggaacgaccttccccgaaccgtaggtgaattgctatggcgacacatcaaacctgaaaagaaaggtcaaccgatacgtgcaggactcgtgcgtgcccgctatcgagaacgccatattgaaaaagaggatggcaaaacccgcatagacaagagctacgacctctacatcgaccgggcgatgattgaaaccgaattcgacgcgctctgggccaagcaggcggagatcaatccgactgttttcaccgaagcagcgcgcgcagaactcaaagactgcctgctgcatcagcggccgctcaagccggtcaagccgggccgctgcacgctcgaacccgacaaagagcgtgcccctctggccctacccagtcagcagcgctttcgcatctatcaggaggtcaacaacctgcgcatcctgcgcgaggacttgcgcgacgaaccgttgacgctggagcagcgcgaccaaatcgtggctttgctggagcgcccccaacgtgacaagaaaacggcacacgaggtcagcttcgaccagatgcgaaccgccttaagcttgcgtggcgccaccaagttcaatcttgaagacgccaaacgcacatcgctcaaggggaactccaccagctccaatctgagcaaaaaaaacttattcggcccggattggtttaactggtcgttagcgcggcaggacgaaatcgtcatgcggctgctaaccgaagaaagcgaagccgcgctcgttgcctggctgcaaaatgaattcggagtggacgaagcccacgccgaaggcgtcgcaaacgcccgtctggcagacggttacggtagcttaagcgccaaggcactcgcaaaaatcctgcccaaacttaagaccgaagtcattagcgccaaggaagccgagataaaggcgggatacaaattcgccgaaaggactggcgaaatcctgtccgaactaccctactacggcgaacccgaatcaatgcaacggcatgttggctttggcacgatgaaccatgacgacgtgccggagaaacgctacggcaagatcgccaaccccacggtgcacatcgggctgaatcaggtgcgtgtagtcgtcaatgcactcatcaagcattatggccatccgtccgaggtcatcatcgagcttgcgcgagacctcaaacaaagtcgggagcagcgcaaggaagatcaggaacggcaagcgcagaaccaaaaacgcaacgagcgtctccgtgcagacactgccacaattctgcaaatagccccagaacgagtaaagcacgccgacattcaaaaactcatcctctgggaagaattgagcttcgacgtggccgaacgacgctgcccctatagcggtgtgcagataggcgcgcgcatggccttgagcgatgaagtcgaaatcgaacacatcctgcccttctcgcaaacgcttgacgacagcttgaacaacaaaacccttgcgacccgacgcgccaatcgcgtcaagggcgaccgcacaccggcacaagcacgcgaggacttcgagcgcgaaggttggtcttacgaaaacatcctgcaacgcgccgagcgtatgcccaaaaataaacgctaccgcttcggcccggatggctacgaaaaatggctgggcgaagagaaaggctttctcgcgcgcgcgctcaacgatacccgccacctgagccgcgtcgcccgtgaatacctgagcctgatctgtccgcagggcatgcgcgtcatccccggccggatgacagccatgctgcgagctaagttcgggctaaacgacatccttggcctacaaggcgaaaagaaccgcaacgaccatcgccaccatgccgtcgatgcttgcgtgattgccgttaccgaccaaggtctgctacagcggtttgcgcaggccagcgccagtgcgcgtgaaaagcaattggacaagctggtcgactccatgcctctgccgtggccgacttactacgaccacgtcaaacgagccgtccacaacatttggatcagccacaagccggatcacggctatgaggccggatttgccgatgaaactacctaccggccgccgcacctagacccgcaaggcaaatggcgtacgcgcggcgttggtggtagcaaccccaacgaacgctcggcggacacagcaatgattgcaatctcggaaccaaagttagctggacgacacaagctcggtctaactggcgaggtattgccatacaaaggctacctcggtggagataattactgcctcgaaatcacattgaccgagaacggcgcatgggagggcaatgttattcctactttcagtgcctacgaaattgtcaggcagcacggaatacggcagcttcgcaacaaatccggagggcaaaatggcgcgtctttggtcatgcgcttggtcgctggcgattgcatcgccattgagaaagactcgcaacggctcattctgcgagttgtcaaaatgcgagcagggagaaatcaagtcacgcttgtcggcgtatctgaagcaaatcatgccaatcgactgaaagagaaagattccagtttgatttggcttgaagataaatctgcttcctctcttcgcagcctgcgcgcacgccatatcaccatcagtccaatcggcgaactgcgcgaccctggctttaaggagtaagacgcatgatcggccgcattgtggaagtggccgacgaccggcggcatctgttccttcaccggggcttcatggtggtgcaggacacggatggcgaacgtaaggaactcggccaggtgccactggatgatattgccgccgtcatcgctaacgcgcatggcctctcctacaccaacaatctgctcgtcgcgctagccgagcgcggcgcacccttcgtgctgtgcgccgccaaccacaacgccgtcggaatgttactgcccatcgacggcaacttcgaacagtcccgccgcatcgaggcgcaaattgccgccagccagcccgttcacaagcgtctatgggctgccgtggtgcgctccaagctcgaacagcaagcggcggcgctcgaagctgcgggcgcaccgaccgcaccacttaccgcgctggtgcgcaaggtcaagagtggcgacccagaaaacatagaagcccagggagcacgacgctactggggactgctgtttggtgaaggcttcaggcgcgaccagaacggcgatggtctcaacgctttgctgaactacggctacaccgttttgcgctcggccacggcaagggccgtcatcgccgcaggactgcatcccggtatcggcctgcaccacagcaacgacaacaacgccatgcgcctggtcgacgacctgatggaacctttccgcccaacgattgacctcaaggtctggcaactctggcgcaatggcgaacagcatgtatctccggagacaaagcgcgccttggtacgcacactctacgacgacatgcagagcagtgcgggagcaacacctgtgatggtctgtatgcaaaaactcgccacgtccatcgcgcagatgtatttgggcctgcgcgacaagcccgatctgccgctgcccagcctgccattggcgctagcgcaatccttgcaagacgaatgaagcgcgggacatcatgctcacagggtatcgactgatgtgggtggtggtgatgttcgacttgcccgtggtactcaaggccgagcgcaaggccgcgaccgacttccgcaatacgctgctggacatgggttttgaaatgagccagttcagcgtctatatgcgcatgtgcaccagcccgacgcaaatagaaacctactgcaaacgtgtcgaagccgccttgccagaaggcggaaaagtcaatatcctgcaattcaccgacaagcagtacgaacgcattatcagttaccacggccaagccaaacaacccgccaataaaacgcccgaccaattcgatctattctagccatgccgcctgttttcatgacatcagaagcgagaaacccctcaacgaatcaaggggtttctcgcgggccattctagctgactgggatatgagctctggccggaactcaaccgcgcggcggtgctgcatctgcgcgattctagctgactgggatatgagctctggccggaacaatacaagccgctggccgaagcacaggcgcattctagctgactgggatatgagctctggccggaacacccggcgagtggctggcattatgcaaattcattctagctgactgggatatgagctctggccggaaccgctctggccgttggtggctaggatggcgcattctagctgactgggatatgagctctggccggaacatgttttccgcacagcaagcgatggacagcattctagctgactgggatatgagctctggccggaacattgcgccggtgctggaagttgccttcctcattctagctgactgggatatgagctctggccggaacgcacgacgctgtcgaccgcgacatcggtcaattctagctgactgggatatgagctctggccggaacctattactgctgtacgtgcaagccctcaaaattctagctgactgggatatgagctctggccggaacagcatcttcatggtatcggcgacgatctcgattctagctgactgggatatgagctctggccggaacggcagcgtcggtgcggtggcgctgagtgacattctagctgactgggatatgagctctggccggaacgcgcccgggcttgcagcgtggtggggtgcaattctagctgactgggatatgagctctggccggaacgataacttcatggtcgtaggaggcgccaaaaaccgcgcccccttcaaccacgaagttcttgcttcgcaaggtctgcaagaaggacttttgcgccgtcttgccagagccgacttactgatttgccgctgccctgactagctagcgatggctggaatgtcaatcatcgcctatagggatgaccgctgtcctgccttgagtcgacgctcagaggcaagtaatttacgcgctgttatcgtctcctgatggccgatctcggacgaagccagtccagtctggaatggccattgccggcagtattgcagccatcgaactgaattgccaagccggtttctctgtcctggcgtttcaaccagatattgcacaaaacagggtgcttgcattcagacgcgaatccttcgcatccaatctcggaatgcaaatagccaaaaatgtaccaagcgccacactaacttcccgctgtctccatctgatgccagaggcaagcgcccttgctctccctggcgatcgtttgcagcacctgctcgtgggcggccagctcttcggccgtgggttgcagcacgacgagcggcgcacgctcgcagctggaggccagcggccgatcggtcggcgcggcaaactcgatggccagcgaattctgcccgcgcgtcatggccagataaacctcggccagcagttccgcatcgagcagggcgccatgcagctggcggccggaattgtcgatgccgaactcgctgcacagcgcgttcagattgttcttcctgcccggtcgcagttcgcgcgccatgcgcagcgtatcgatcactccgccgcacagccggtcgagactttcccgctcgatcaactccagttcgtggttgagaaagccgacatcgaacgcggcgttgtgaattatcagttcggcatcgcgcacgaactcgacgaactcaccgacgatgtcggcaaaacgcggcttgtcggcaaggaactcggcggtcaggccgtgcaccttcaccgcgcccggatcgatctcgcgttccggattcaggtacttgtggaaatgcaccccggtcagccggcggccgatcatttcgacgcagccgatctcgatcacccggtcacccgtgcggtggtcaagcccggtggtttcggtatccaggatcacccgccgcatatcaacgcccttcccgcaccgaatcgacgccgcgtcgcgccagcgcgtcggctcgttcgttctccggatgcccggcatggccgcgcacccagacccattcgatgcgatgtccggcggccaggcgatcgatctcgcgccacaaatcctcgttcttcaccggttccttgccggccgtcttccagccgcgccgtttccagccgtgaatccactcgctgatgcccttctgcacatattgcgaatcggtatgtacgcgggcggcggcgggacggctcaaggccttgatcgcctcgatcaccgccgtcatttccatgcggttgttggtggtcatccgctcgccgccgaacagctcctgctcggttccattcaggcgcaggatcgcgccccagccaccgggacccggattgccgctgcaggccccgtcggtaaagatatcgaccaccgcatcgtcatttttctcactcattgatttcctgttcctcgcttcgtttttgtgccacgcccaccagcgccttggcgcgctccttgcgatccttccaggccggaaggatcagccgcatgccatgccgccgcttgactgcctgcacaacatacacggcgccggcaatcggccaccagcgatcgcccgccgcatccatgaacctgaagcggcgcaaccatttttcctgcgtcaccgccggcgcatagcagccgaaggcaccggcctgcatctcgaaaccgagcagcgtcagccagtctttcagccgcggcacgctgatgtaatggccgcgccagggcggtaccccctcccgtcgcgacagcttgcgcttcgctccccacaggctgaacggattgaagccggtgatgattacatgcccttccggcaccagcacgcgttccacctcgcgcaacacctgatgcggattcgcatcgaactcgagggcatgcggcatcaccaccagatcgatgctcttcttgtcgaacggcagataatgcggatcggcaagcacctcgggatcgccgacgtagcgcccgtcatcgcagcgaaagtgaaacggcatgcgattggcgcgcaacaaatcgtggcacggaaaggccagttgcgccgcattgaagccgaacagatccgccaccagcagatcatgcttcttctgctcccaatcgagcacatactgcccggccggagtggtcagccattcctcgaaaccctgaatcgacattgaagtaaactttccgcaaatttcgccgaaccggccatgatcgaaattaccgccctgcccgccttcaccgacaactacatctggttgctgcgcgaccacggctgcgttgccgtggtcgatccgggggatgccgcaccggtgctcgcacatctcgaagccagcggcgagcgcctggccgccatcctcctcacccaccatcatcccgaccacatcggcggggtcgccgcgttgctcgcccggcatgtcgtgccggtattcgccccggccatcaaccgcatccccggcaccacccatccattgcgcggcggcgaacacatcgccttgccggaactcgggccaggactcgggcttgacgtcatcgccgtacccggccacacgctgggccacctcgcctattatggctcaactctgacggatgccggcgccgtgttttgcggcgacaccctgttcgccggcggttgcggccgcttgttcgaaggcacgccggcgcagatgcaggcctcgctggccagactcgccgtcctgccagcgccgacttttgtgtactgcggccacgaatacaccgaagccaacctgcgcttcgcccgcgccgtcgaaccggataacgcggccctcgccgcccgcagcgaagaggtggcgcaacgacgcaagctcgcgcaaccgaccgttccctcgcgcctggccgaggaactcgccaccaatcccttcctgcgctgggacgcccccgccgtgcaagccgccgcggcggcgcaactcggccatgcgccccttgacgccgtggcaaccttcgccgcgatccgggcctggaaggatcggttctgacggaaagcccccaattccaccgccgctctcctgcggctgccgcttgccatggaaaaggacaaagcgactcgtttgacgcccctctctcccgccgttaagattcacccccctcctgcgccgctcccgcggatcaaaatcttcccttcatgccgatacgccgcctgctcgtcctgctgctgttgttcgcccatgccgcgccgggccatgccgatcttcccctcaacctgacgcctgccttgcctgcagtgagcggggcaatgctgttgcccgcccgggatgccgcgctgccgctgctcgatcgcggcaaatcgcagctggtcgagaccgaggaagccattcccctgatcgatctcactacgccgccggacgatctgtggcagcgggtgcgcaacggcttttcgatgcccgacctggacagtccgctggtggcgcggcagcaggcctggttcctcaaccggccggaattgctgcaacggatcttcggccgttgtcagcgttatctctattacgtcgtcgccgaactggaaaaacgcggcatgccggccgagctggcgctgctaccggtgatcgagagttcctacaacccgcaggccgcctcgccggcgcgcgcgctcggcatgtggcagttcattccctccaccggaaaaaattacaaactgaagcagaacgcctggttcgacgaacgccgcgacatcgtcgcttccaccgatgcggccctcaactacctgcagtacatctaccagatgcatggcgactggcatctggcgctggcttcgtacaactggggcgaaggcgcggtcggccgggccatcgccaggaaccggagcaagggatcgcccaccgactacccgcacctcgccatgccggccgaaacccgcaactatgtgcccaagctgcaggcgatcaagaacatcatcgccgacccggcgctgttcggcctcaagctcgaaccgattcccaaccggccctatttcgccacggtcgagcgcaacgaaaaaatggacgtcgtcgtagcggcgcaactggcggaaattccactcgatgaattcatcgccctgaatcccgcctacagccgcccggtgatgccccgcgatgccgacagtccgctggtgctgcccgccgccaaggtggccgtctttcgcgacaacctcgaagagtacaaggcgaacaacaagccgctctcggcctggaatacgcatatgctcaagcgcggcgaaaagctcgacgccgttgcccgccgctatggcctgagcgtcgatcgtctcaagcagctcaacggcctcacccgccgcagcaaggtgcgccccggcctcgcgctgctggtgccgggcaaggatgcgaccggctatgaagccctcgccgcccatctgccgaaaactccgctcgacgcgccgcgcgccgccaaaacacgcaagcgaggccacggcgcgaaggccggcggcacgcagcggagcacggcgctccgcggcaaagtccgccggccggcggccagacacagaaagcgctagatagtgtcgtcacgagataagaaatgtgtgaagattacgccttctgaaagcatggagggtcagcgatggcagaagcgtaccggcgacacgaca

SEQ ID NO: 1851 - DNA, 19697 bp, synthetic construct
  source 1..19697: mol_type = other DNA
  misc_feature 1..19697: note = Synthetic
caaaaaacttggttggcaacaagcctcagacagtgttgtggaagcgggcttgcccgcgatgaggcgtctcaccgcaacctaggcttgatcacgggcaagcccgcttccacacggcggatgcggtccgcacgtcatctgagacttcttgatagtcaagcaaaaacaatagctgctcgcgcccgtccattcttggtttcagatgcttttctcttgaaatcaaggtgtggcgtgcgcaagccactattaataaaagagtgaccgcgcggcgcacaatgcgccgatgctgcaactcaccgacatccagcaagccgccgaccgcctgaagggccaggtgctcgacacgccctgcgtcgaatcgcgcacgctgtcgcaggtgacgggcgcgcaggtgttcctgaagatggagaacctgcagttcaccgcctcgttcaaggagcgcggcgcttgcaacaagctggcgcagctgtcgaaggaggagcgcgcccgcggcgtgatcgccatgagcgccggcaaccacgcgcagggcgtggcctttcatgcgcagcggctgggcatccgcgcggtgatcgtgatgccgcgcttcacccccggcgtgaaggtggcgcgcacgcagggcttcggcgccgaggtgatcctgcacggcgacacgctggacgccgccagcgcgcatgcgcaggccctggcgcgcgagcagggcctgagcttcgtgcacccgttcgacgacgaggccatcatggctggccagggcacgctggcgctggagatgctggccgagcagcccgcgctggacacgctggtggtgcctatcggcggcggcgggctgatcagcggcgtggccaccgcggccaaggcgctcaagcccggcatccgcgtggtgggcgtgcagacggcgcgctttcccggcgcggtgaacgcggtcaccggcagcacgcacgcgcagggcgccagcaccattgccgagggcatcgcggtcagcgcgccgggcgcgctgtgtctgccgatcctgcgacagcgcgtcgacgaactgctgctggtggacgagggcgacgtggagcaggccatcgtgatgctgctggagatcgagaagaccctggccgaaggcgcgggcgccgtcgcactggcggcgctgctgcgccatccgcagcagtttcagggccgccaggtggggttggtgctgtcgggcggcaacatcgacccgctgctgctggcggccatcatcgggcgcggcatggtgcgctcgggccggctggcgcgcatcgtcgtcagcgcgcgcgacgtgccgggctcgctggcgcgcgtcacggcgctggtggccgaatgcggcgccaacgtgcaggagatccaccaccagcgcgccttcacgctgctggcggcgcagaacgtggaaatcgaaatggtgctgcagacgcgcgatgccgagcacgtgcgcgaactgctggcgcggctggccgccgaggggcttcaggcgcgctggctgggggagcagtgagggcgggcgtcggtttgatggaactggccactcgaagtcctgttgcggtgcgcagaggcctgccatcccttgtgggagcggccgtggccgcgataaggcgccgcctcgactgaggaggccgcatcgcgggcaagcccgctcccacccggctgccatggcgccgcggtgcggcaaccatcagccgcccgctttttgggtggcaagccaaatcggcctccagcgcccggtggataagcgcaagcagctatcgaatcaggagtgatgggcgctgccgtcttcacggcagccggcgcaggtgccgtgcacggccaagtcgacccgcgccgcctggtgcccgtgctcggccagcgtgcggcgcagcgcatcggccaccgcctgcgtgggcgcgtcggccgcctgcagcggaaactgcgtgtggcaggcgtcgcattcgaagtgcggcacggcgggcgcggactcaggcgccgatgcggccacacccagccactgaaagcgccacacccgctcgcccggcgccgtgtggcgcgccagcaggccggcggcgaccagccggtccagcaggcggtacagcgtgacggggttcaccggctcgcccgcctgcgccagccgcgccgccacgtcggcatgggtgggttgccagtgcgtggcggcctgctcgaacagctcggccacgcccagcaccgcgcgcgtgctgcgcagcccggcctggtgcaggcgctggctgagggcggcggggtcaaacgtgggcatgaagctgcagggcggtcgttaatgcaactgacttgcgatatgatcgcgcactcggcggcttgatgcaagtcagttgcattttatcgccgccttccgattgccgcccatgaccccgcccccgccgctgtccaaacgtcccccgctgctgctgcgcggcgccggttggcgtctgggcgtcgcggcggtgttgagcgccgtgctgctgttgctgtggcgctgggcgctgcagggcgggggcgcgtgatggcggcgccgcagcccgtcgccctgcacgacctgacgctgggctacgacggccatccggcggtgcaccacctgtcgggcgtgatccagcccggcgcgctgctggcggtggtggggcccaatggcgccggcaagtcgacgctgatcaaggcgctggccgggctgctcaagcccatcggcgggcgcatcgacgggcttgcgggccagcgtgtggcctacctgccgcagcaggccacgctggagcgcggctttcctattctggtgggcgagttcgccgccatggggctgtggcacgaaaccggcgcgttcggcggcttttcgcgcgcgcagcgcgagcgcgtgcgcgacgctctggcggcggtggggctggagggctatgcgcgccagccgatcgacacgctctcgggcgggcagttgcagcgtacgctgtttgcgcgcctgatgctgcaggatgcgcccatcttgctgctggatgagcccttttcggccattgatcagcgcacttgcgccgatttgctggccttgctgcaaggctggcagcgccagggcaagacggtgctggcggtactacacgacctgcaccaggtgcgcgaggctttccccgaaacgctgatgctggcgcgcgagctggtcggctgggggccgacggcgcgggtgctgacgccggccaacctgcagcgcctgcgggcgatgccggaggcgttcgacgagcgggcgccggtgtgcgaggtggagggtgcaggcacggggcacgacgggcacatgcatgtcctccctcatgggcatgaacatgttcacgagagcggtcacgcgcatgcgcatggtcacgcgccggcccctcacaccagccctctccccagaggggcgagggagcaatacccatgacgcccgagacgatggacaccggcctgtgggcgctgctcgtcggcccgctgaccgaattcggcttcatgcgccgcgcgctggtggggtgcatcgcgctgtcgctcagttgcgcgccggtcggcgtgttcctgctgctgcgccgcatgagcctgaccggcgacgccatggcgcacgccatcctgcccggcgcggccatcggctacctgctgtcgggtctgtcgctgacggcgatgacgctgggcggcgtggccgccggcctgctggtggccgtgggctcggggctggtggcgcgctccaccgtgctgcgcgaggacgccagcctggccgccttctacctgctcagcctggcgctgggcgtgctgatcgtcagcacgcgcggcagcagcgtcgatctgctgcacgtgctgttcggcaccgtgctggcgctcaacgacgcggcgctgacgctgctggtgggcattgccgtcgccacgctggcggcgctggcgctgatgtaccggccgctggtgctggagtgcctggatccgcagttcctgcgcagcgtcagccgcttcagtgcgctggcgcactacggttttctggtgctggtggtcatctgcctggtggccggctttcatgcgctgggcacgctgatggccgtgggcatcatggtgctgcccgccgccaccgcgcgcctgtgggtgcgcggcgtgccggcgctgatggcgctggccgccgcgctggcgctggcggcctgcgtggccgggctgctgatcagctaccacgccgactggcccaccagccccaccatcgtgctcaacctgggcgcggtgtacctcgtctcgctgctcgtcggccgccacggcgcctggcgcagtgggcagcatgggcgccagcggcatctgcgggcgtgaacgttttcttcctcgtcattccggcgaaagccggaatccacaccgccgcgccagcaaacgccacgttcatgcgagcgaagcgcagcacggatcccggctttcgccgggaggacgacctgttggatgggcggaccaccgcagccaatcgaaattcaagaagaatcaaccgctaacgcttgtctggcaagcgcacacagctatcaacaaaggagtaactcaagatgtcatccctcacccgccgcaccgccctggccgccgcgctcgtcgccttcaccctgcccgcccacgccgccgagccgctgcgcgtggtcgccagcttcagcctgctgggtgacctggtgcagcaggtgggcggtgatcgcgtcgccgtcaccacgctggtcggcccgggcgccgatggccacgtcttccagcccacgcccgcgcacgcgcgccaggtcgggcaggcgcaactcgtggtctccaacggcctgggctacgaaggctggatgccgcgcctgctgcaaagcactggctacaagggtccgcaggtggtcaccacgaaaggcgtcaaacccatcgccggcacgcgcggccacaaccatgaccatggccacaagcacgaccacggccgccacgacccgcacgcctggcaaagcgtgcccaacgtcatcacctacgtgaagaacattgccgacggcctgtgcaccgccgacgccgccggctgccccgcctaccgcgccaacgccgagcgctacaccgctgagctgaaaacgctcgacgccgacatccgcgccgcctgggcgcccatccccgccgcgcagcgcaaggtcatcacctcgcacgccgcctacgcctactacggccaggcctacggcgtgcgctttctgtcgccgcagggcgtcagcaccgagagcgaagcgtccgccaagggcgtggcacagctggtgcggcagatccgcaaggaaggcatcaaggcgctgttcgtcgagaacatctccgacccgcgcctgatcgagcagatcgggcgcgagaccggcgtcaagccctcgggcgagctgtactccgacgcgctcagcgcgcccggcgccgacgccgaaacctacgtgcgcatgatgcgcaccaacaccgagcggctggtgcgcgcggtgcgcggcgactgacaccgcggcccaacggcgcgacgcggcaaggggctttggcacggcctagaatcgcgccttcggctgccaaggagcgttgcagcgccagcggcgcggttttttgaagaaaccgcgccacaagcggcgtcaggcttgcgccgaatgctattgatctcgaatcaatggcgcgggtcttttgttgcaacgacgctcacctgaaacttgatttgcaggtgagtgccgtgtccgcagcttctctttcttcttctccgccgccgctccagctctcgggcctggagccgctggtcatcggccccggcgcgctgttcgtcaacatcggcgagcgcaccaacatcaccggctcgaaggcgttcgcgcgcatgattctgggcggccagtacgaagaggccctggccgtggcgcgccagcaggtcgaaaacggcgcgcaaatcgtcgacgtgaacatggacgagggcatgctcgacggccaggcggcgatggtgaagttcctcaacctgatggcgaccgagcccgacatcgcccgcgtgccggtgatggtcgattccagcaagtggagcgtgatcgaggccggcctgcgctgcatccagggcaagggcatcgtcaactccatcagcatgaaggagggcgttcatgaattcaagcgccaggcgcgcctgatcaagcgctacggcgccgccacggtggtgatggccttcgacgagcagggccaggccgacacctacgcgcgcaagatcgagatctgcgagcgcgcctaccgcatcctggtcgatgaagtcggctttccgcccgaagacatcatcttcgaccccaacatcttcgccatcgccaccggcatcgaggagcacgccaactacgcggtcgacttcatcgaggccacgcgctggatcaagcagaacctgcccggcgccaaggtgtcgggcggcgtgagcaacgtgtctttcagctttcgcggcaacgacccggtgcgcgaggcgatccacaccgtgttcctgtaccacgccatcaaggccggcatggacatgggcatcgtcaacgccggcatggtgggcgtgtacgacgacctggagcccgagttgcgcgagcgcgtggaagacgtggtgctcaaccgccgccccgacgccgccgagcgcctgctggagatcgccgaatccgccaagggcgccgccaaggacgacagcaagaagctggaatggcgcggcacgccggacaagccggtgggcgtgaacgagcgcctgagccacgcgctggtgcacggcatcaccgagttcatcgtcgaagacaccgaagaggcctaccagcagatggtggtgcagggcggcggccgcccgctgcacgtcatcgaagggccgctgatggacggcatgaacgtggtgggcgatctgttcggcgccggcaagatgttcctgccgcaggtggtgaaaagtgcgcgcgtgatgaagcaggccgtggcgcatttgctgccctacatcgaggccgagaagaaggccatggccgacgccggtgccgacgtcaaggccaagggcaagatcgtcatcgccaccgtcaagggcgatgtgcacgacatcggcaagaacatcgtcaccgtcgtcttgcagtgcaacaacttcgaggtggtgaacatgggcgtgatggtgccggcccatgaaatcctgaagaaggccaaggaagaaggcgccgacatcgtgggcctgtcgggcctcatcacgcccagcctggaagagatgcagcacgtggccggcgagatgcagaaggacgcgcacttccgtgagcgcaacatcccgctgctcatcggcggcgccaccaccagccgcgtgcacacggcggtgaagatcgcgccgcactacgatggcccggtgctctacgtgcccgacgcctcgcgcagcgtgggcgtggcgcagggcctgctgggcgagcaggccgcgcaatactgggccgacgtgcgcgccgactacgagcgcgtgcgccaccagcacgccaacaagaagcaggtgccgctgtggccgctggcgaaggcgcgcgccaacaagacccgcatcgactgggccggctaccagccaccacagcccaagttcatcggccgccgcgtcatccgcaacatcgacctggccgagctgctgcccttcatcgactggacgcccttcttccagacctgggacctggccggcaaattccccgccatcctgaccgacgaggtggtgggcgaggaagccacgcgcgtgtacaacgacgcccaggccatgctgaagaaaatcgtcgaaggccgctggctgacggcgcacgccatcgtcggcttctggcctgccaacaccgtgcgcgacgacgacatcgagttgtacgccgacgaatcgcgccgcgacgtggccctgacctggtacggcctgcgccagcaaaccgaaaagcaggaagacgccaacgaccagatgcgccccagccgctgcctggccgacttcatcgcgccgcgcaatgctattgattcggaagctgctcgcgcagaccagacgggcgctgaaggccaaaatggcttgaaagaccacatcggcgccttcgccgtcaccgccggcatcggcgtggacaagaaggtggccgaattcatggccgcgcacgacgactacagcgccatcacgctgaaagccctggccgaccgcctggccgaggccaccgccgaatggctgcaccaccgcgtgcgcaccgacctgtggggctacgccgcccaggagggcctgagcaacgaggagctgatcgccgagaaatacctcggcatccgccccgcgcccggctacccggcctgccccgaccaccgcgtcaagaagccgctgttcgacctgctgggcgtcgatgagatcggcatgtccatcaccgaccacttcgccatggtgccgccgtcgagcgtcagcggcttctacttcagccaccccgacagtacctacttcagcgtcggcaagatcgaccagacccaggcagccgacatggccgagcgcagcggcgtgccactggccgacgtggagcgggcgctggcgccgaatttggggttgtgagcgtgcgaccgcatgcctagtctggatccatacctgtgaacgacatcatgaagggtaatgcgccgaccgtattgaccaaggccaccatccgggccgccgatatgctgggcctgcagagcaccgacctggccaggatccttggtgtcaacactgcaacggtgtcgcgatacaagtcggcgtccgcctgcatcatgccggcctccaagactggcgaactggcactgttgctgatacgcgtgttcgaatcacttgatcgattggtcagttccgacagcgagaagcgcaaggcttggatgtgctcatccaacaagaccttgaacggagtgcctaccaagcttctccagcggcctgacggcctagtcagaacactggattatctggacggtatgcgtgtagaggcatgaacagggttgccttggcggaggctgctgcttgaaaaaggtggcctgaacgctgttcttccgcatcttgttcccggtcggtgttgtgggcagcggcgaaccgagccgccttgctggccacatggaaggagctaaatccatgcacaagcagttcacgttaaaggctgtcaaggctctggcgggctccgtgctgcaactcagcttcgcggacggcgcatccatgcaggttgaccttgcacccatcgtcaagcgctcacctgcgctggctctgcttctggatccgacggtgttcaagcgcgcgaaactgggcgaatcgggcggcgccgtgacacggggctccgatgcgttggagctggcggctgacaacctgcgtgctcgtgccatcgagcaggctggtggatttccgcacgagatcatcatggagtggatgcaccgcgatggcatgacgcagcaggccgcagccgatgcgctgggtatctcgcgccgcatgctggcctactacctgagcggagaaaagccggtgccgcgcacggtggcgttggcctgcgtagggtgggatacggcggtcgagcgcagcgatccgcggttcattcttgcggcgtgagcgtataaagatgggatcgccggggcggagtattcctcttctcgcccataccagatggcctttcgtctgatgcccttacgcgcttgcgcggctatttgagttgggcaacgggcacatgcgttggcaggcggttggcgcagaaaatacgaaagccgggcatgcccggctttccattttttgcatctagctaaaagcatcagcttgttagcggctagagcacaaatcccagtgatctgctcacagaaattatagtcttgccggaacaaccccacacatggtttccacgcccacgatactatcaataaatttctaaccccacaagccaccaggtcatgcatgatagaatgcaagaaaagcccccagcggttccagcgctgggggctccgtagcgcgcaactacctggcaggcacttggcaccttgagccaagaaggaggtaaccgtgatggctagctgccgtctcttcagaagcgttccttggcccgctcatccaagaggttgagcgggccatattttcttccatcttgaacaactctgcattcgaaggaaaaatggttgcatgccgaagctatcaaagcccgttcgttaccgcctcgcacttgacttgggctccacctctcttggatgggccatattgcgtctcagcaccattgatgaccctaccgccatcatcaaggccggcgtgcgcatcttcagcgatggccgcaaccccaaagacggctcctcgctggcggtaacccgccgcgccgcgcgtgccatgcggcgccggcgcgaccggctgctcaagcgcaaggcgcgcatgatgaccaagctggtggagtacggcttctttcctcgggatgacgctgcgcgcaaggagctggaacgcctcaatccctatcaacttcgcgctaagggcctgcacgaggcgctgacgccggccgagtttggccgcgcgctgttccacttgaaccagcgccgtggtttcaagagcaaccgcaagaccgaccagaaggacaacgacagcggtgcgcttaagacggccatcaagaaactccgtgaaacgctggccgccagtgactgccagaccgtgggggagttgctgtggaaacggttgcaggcggggcagggcacgcgggcgcgctaccgtgagacacgttacatcgaggacggcaagaacaagatcgacaagagctacgacttctacattgatcggcagatggtggcggatgaattcgacgctttgtgggccaagcaggccgcgctgaatccggagcagttcaccgaagccgcgcgcgccgatctgcgcgacaccctgctgtaccagcgcaaactgcggccggtcaaacccgggcgctgcacgctactgccggaagaggagcgtgcaccgctggcgctgccgagccagcagcgctttcgcattctgcaagaggtgaaccatcttcggctgctggacgatcgcttgctggaaacgtcgctcacgttggctcaacgcgatgccatcgttgatctgctggagcaaagcagcaaagtcagcttcaagtcgatccgaaagaaactcaagctgggtgatgcggtgcaattcaatctggaggacgaaaagcgcactgaactcaagggcaatgccaccacggcttcgctggccaagaaggatctgtttggctcggcgtggcacgatttcgatgacgccttgcaagacgagatcgtctggcgattggtgacggaggagagtgaggaagccctggtgcgctggttgtgcgaaaccactggggtggatgagacgcgcgccgctgccattgccaacgcaggcttgcccgagggttacggcagtctgagccgcaaggcgctggcgcgcatcgtgcccgcgctgcgcgccgaggtcatcacctacgacaaggccgtgcaagcggcgggctttgcgcaccacagcgcgctgggtttcgagttcagcggtgaagaggtggacgattggatcgaccccgtgagtggtgaaatcaagcctgtcttcaagcaactgccctattacggcaaggccttgcaacgccatgtggcgttcggcagcggcaagcccgaagacccggatgagaagcgctacggcaagatcgccaaccccacggtacacatcggcttgaaccaggtgcgcgtggtggtgaacgcgttgatccgtcgttacgggcgcccaaccgaagtcgtggtggaattggcacgcgatctcaagcagagccgcgagcagaggatggaaacgcacaagcggcaggccgagaaccagaagcggaatgcgcgcatccggcagtccatttcagatgcatttcgatcacaaggcatcttcgtggcgcctgacaacgtcaagcacgctgacgtacagaggtggattctttgggaagaactgagttttgacgcggcggaccggcgctgcccctacagcggcgagcacatcagcgtggcgaaattgctcagcgatgctgtggagattgagcacatcctgccgttctcgaaaacgctggacgacagcttgaacaaccgcaccgtggcgatgcgccatgccaaccgcgtgaagcgcaaccgcaccccttgggacgctcgcgctgatttcgaggcacaaggctgggcgtatgacggactgctgctgcgcgccgagcgcatgccgctgcgtaagcgctaccggttcgcggccgatggctatgagcgctggctgggcgaggataagggctttctggcgcgtgccctcaacgacaccaagtatttgtcacgcatcgccaaacaatacctgcagctagtttgcccgggcagcggggtgcgagtgattgcgggtcagctcaccggcatgctgcgttggcatctgggcttgaacgacgtgctaggcctggatggcgaaaagaaccgcaacgatcaccgccaccacgccgttgattcctgtgtcatcggcgtgactgaccaggcattgctccaacgttttgcacgagccagcgagttggcgcatgacgaggggcggggcaagctggcgaaggattttcagccgccgtggcccacgtatcgcgagcacgtcaagcgagcagtcgggaacatatgggtgagccatcggcccgatcatggctacgagggcgggatgatggaggaaacgtcctatggcatcggcaaagatggtgcgatcaagcaaaggttgaaagccgacgggacgaaaggtcgtgaaatcagcaatctgatcaaggtcagcgaagcttcacagccgacacggcatggcgttgatgagcaaggcgtgccgctgccgtacaaaggatacgtgggtggcagcaattactgcattgagatcatgcgtaatgacaagggaaagtgggagggggaggttatttcgacatttcgagcctacgagatcgtgcgagcaaagggcgaaaagtgtttgcgcgattcaacgcatgcgcaagccaccgattcagccggaaagcgaaaaccacttgtgatgcgcttgatgattggcgacacggttcgtctcgactttggtgatggcaacgtagtcatgcgaattgtgaaaatgtcaggagccgggcaggtgtttatggcgcctatccatgaagcgaacgtagacgcccgaaacagtgacaaaaacgacccgttttcctactcttcaaagatggcgggttcgttccaaaaagctcacgctcgacgggtctcgatttcacccattggcgagttgaacgaccctggtttcaagagttgaccggtaagcactatgattggccgtatcgtcgaaatcgcggacgaccggcggcatctctttgccaatcgtggcttcatggtggtgcgcgacaccgagggggagcgcaaggagctgggccaagtgcccctggacgacatcgcagcggtgattgccaacgcacatggcatcacctacaccaacaatctgttggtggcgctggcggaacgcggcgcgccactcgtgttgtgcgcggccaatcacaacgccgtgggcatgctactgacgctggatggtcaccatgtgcagtccaagcgcatcgaagcgcagatcaacgccagccagccgacacgcaaacggttgtgggcggctgtcgtcaaatccaagttggagcagcaagctgctgcgctcgaagctgcgggggcgcctaccgcgccgctgaccgcattgatacgacgggtcaaaagcggcgatcccgacaacgtcgaggggcaaggcgcgagaaggtactggaacctactgttcggcagcgacttcaggcgcgatcaggatggcgacggcgtcaacgcattgttgaactacggctacacgatcgtgcggtctgccacggcgcgcgctgtggtggcggccggtttgcatcccagcatcggtctacatcaccgcaacgacggtaacccgatgcgcttggtggatgacttgatggagccgtttcgacccatcatcgacctgaaagtctggcaattgaagcgtgcgggcgagggccacgtgactcccgaaaccaagcgcgcattggtgcgcaccctgtacgacgacatgcagagttctgctggtgcgacaccggtcatggtgtgcatgcaaaaactggcggtgtcgcttgctcaggtttacgtgggtgagcgcgagaagctggatctgccgctgcccggtctgccgctggccttggccggcagcctggacggcgatcagtgacgcgcggccatgctgtcgggatacaggctcatgtggatgctggtgatgttcgacttgcctgtgctcgaaaaagccgaacgcaaggcagcgaccgacttccggaaagccttgctcgacatgggcttcgagatgagccagctcagcgtataccttcgcttctgtactagccagacccaactcgacacctattccaagcgtgtcgaagctgtgctcccagccggtggtaaggtgaacgtgatgcagttcaccgacaagcaatacgagcggatcattaccttccacggccagaccaagcagcccccgctgaaaacgccggatcagttcgatcttttctgagccatgacgcctttttttgtagcgtgcggaagcaacaaaccccttgtgggacaaggggttgctgctgatggattttagatcactgggatttgtggtctagccggaactgcgctgaacgtggccctgggcgttgaaaaattttagatcactgggatttgtggtctagccggaaccataatcggcggctgcgatacgctgaccgtattttagatcactgggatttgtggtctagccggaactgactgtgatgttgatctcagggtggttgtattttagatcactgggatttgtggtctagccggaactccggcgtagagttcaaaatggtcgatgcgattttagatcactgggatttgtggtctagccggaaccgctggcgcgcgcgcttctcccgaaacgcaattttagatcactgggatttgtggtctagccggaacaagaacgcctgcttgtcgttctggtcgaacattttagatcactgggatttgtggtctagccggaactcgagcgtcgggcggtggatcagggcctcgattttagatcactgggatttgtggtctagccggaaccacctcagtagctgatcgcacgcagccatgattttagatcactgggatttgtggtctagccggaactattgggaaagtttttggcgcggcatcgacattttagatcactgggatttgtggtctagccggaactcagccgagtcgctggccgacaagctctaaattttagatcactgggatttgtggtctagccggaacactggccgacagcggcacatctcgcgccgtattttagatcactgggatttgtggtctagccggaactgtctgcgcaccaccggcgcaccctgtcggattttagatcactgggatttgtggtctagccggaacggcgtgttccacgtaccgcataacaacatgattttagatcactgggatttgtggtctagccggaaccttgccagcgacagacaccatggcgcgccaattttagatcactgggatttgtggtctagccggaactgtaactgttgctcatgtgcagcgcgaccaattttagatcactgggatttgtggtctagccggaactagtagaatgccggcaccgatggcactggcattttagatcactgggatttgtggtctagccggaacggatagcgggacatcacgcctgatggccgaattttagatcactgggatttgtggtctagccggaacctgatttactatgaggactaatgaaaatttattttagatcactgggatttgtggtctagccggaacgcaggtggtgcgctggtcgatgacctcgcgattttagatcactgggatttgtggtctagccggaacccggcacggagtcgatcaaggccggcgcggattttagatcactgggatttgtggtctagccggaaccccgggcaaggcccattggccgggcgcaggattttagatcactgggatttgtggtctagccggaactaagcgtcgatgcgacaggcaggatcgatcattttagatcactgggatttgtggtctagccggaacttggcgcgctcgcgctgcttttcctgcttcattttagatcactgggatttgtggtctagccggaacttgttgccgtcgcggatggcctggttgatgattttagatcactgggatttgtggtctagccggaacaaaccaccgcgttctggtgctgtcgctgcaattttagatcactgggatttgtggtctagccggaactgtagtcgtcctccgcgccgtcgatggtgcattttagatcactgggatttgtggtctagccggaactccaacacgcgcacgcgcagctggctgaggattttagatcactgggatttgtggtctagccggaacatacggcagccacataagtccagcatctcgattttagatcactgggatttgtggtctagccggaacataaagcgatgcagctccgccccagcgccaattttagatcactgggatttgtggtctagccggaactcagcatcgctcaaatgcggagacgcgcgcattttagatcactgggatttgtggtctagccggaactacgcctcctcgccatcgcgctcgatgacgattttagatcactgggatttgtggtctagccggaacctgacagccgcgcaggtagataccctgcgcattttagatcactgggatttgtggtctagccggaacccttgtcggcggcgctcaagctggcgtcgaattttagatcactgggatttgtggtctagccggaacgaaatcaaagcgctcatcgaagcccaaggcattttagatcactgggatttgtggtctagccggaacctttgctggtgggcagcgaatagcccaacgattttagatcactgggatttgtggtctagccggaaccccgagggcggttcagttgttggtggtgttattttagatcactgggatttgtggtctagccggaacgatggcaaagttcgagagcagaagcgcgtaattttagatcactgggatttgtggtctagccggaacttggccgcgttggtggacgcctgctcgaccattttagatcactgggatttgtggtctagccggaactgtacggccagccagagcactcggcggcgtattttagatcactgggatttgtggtctagccggaactcgtcgggcgctgaactcatgtcatcgagtattttagatcactgggatttgtggtctagccggaaccccggccgcttcgtgcgccgcaccgatggcattttagatcactgggatttgtggtctagccggaactccagcaccatgcgcatcaccacgcggtcgattttagatcactgggatttgtggtctagccggaacacgccgggcttgcattcattgcggaatgacattttagatcactgggatttgtggtctagccggaactctcgcgcttctcgatgcgcatctcgagccattttagatcactgggatttgtggtctagccggaacttagcgcgctcgcgctgcttttcctgcttcattttagatcactgggatttgtggtctagccggaactggctcagccattcgtcggccacagcacgaattttagatcactgggatttgtggtctagccggaaccgagggcgcctacgataccgcgcgcggcgtattttagatcactaggatatgtggtctaactggaacggcagataacaggagaggccgaaattttttggcctgggatcccgagcgagatacacattattcgaagtcagaacgtctattgacaaactgctggggccgtaaggcgtcgctcaggatcaccgcacccgctcctacaaccccaccgccactgccctcgcccgtgtgcgcgagaacacgccggcgggcacgtccagggcgatcgacttcacctggcgcagggtgcgtgagtcgaataccgccaaccggccggcggcgctgtggctgcggtcgccgcggtagcgtgcgctgacgtagaagaagtcgccgcgcgcggtgtattcggggaagtgtgagtggctgagcgtgccttcgacttcgatggtgcgcaccacttcgagcgattccttgtcgatgaactgcagcttgctggcgttggggccggtgccgacgatgtcgaccacgatgtagggcgcgtccgggtgggccgccggtgactcggtggggccgatcacggggatgcgcttgacgagttcgaaagtgttcatgtcgaacaccgtgacctcgaatgacttgcagtccgcctcgccgatgttggtgccgatgccgagcaggcgctcgcccacgcgcaccaccgcgcccgagcccaggtgcggctggcagccggccgggatcttgcgcacgatgcgggcctcggccaggtcgatgacggcgttgaggtggtcgtcgtaggacgagacgacgaaatggcgcccgtcgggcgagaggaagccgtcatggaggtgccggccgacgttggcgatgggggtgatcggcatgccagggcggtccaggtcaatgatccagacctggccggcctgctccagcgccaccacgaagtagttggcgaacggggtcgacaggatgatgccggcgtcggcctcgacctgcttgccgtcggggtcgatgccggacaggtcgatctggcgcaccggctccagcgtggcggcgtccaggatcaccatggtgtgcggcacgtacgagccggccgccacgtagcggccgtcgcgcgagatcgccagcgaggtgccgttgaggccggcgcgtaccttgcgcacggtctgcatcgagtacaggtcgatcttgtggacccagccggcgtcgtcgcgcacgtaggcccagcgcggctcggttgggtggaagtccatcaggtgcggcgcgaagccggtggccacctcgccgacctggcggtgcgtgcggccgtcgaagaacagcaccttggcctcgttgcccgcgccctggcggctgcgcgacatcacggccatcaggtcgtcgatgtggtcgatccggtacttcggcttggccggcagccgcgattcgtccttgaccagcacctgcagcgattggcgcgcctcgtcgatgctccagccgagcgtgcgcctgggctgcgtggtgatcagttcggccagcagctcgcgatccttgccggagagcgcgccgcgccagcttgggtgctgcggcatcagcgtcggcgggctgccaccgaggatgatcttggccacgtcggcgcgcgacagccgcgcaccgtcgatgaggcaagcgtggttgagcgcatcggagaagatcgcatctcccgggccgaccagctccggcacgatgccgatgttggtggcgtagccggcgtagaaatacagcgcgcgcggcaattgcacgaactgttcgagctggcgctggagtcgcccgttggcggcgctatggccgctgaccagcggggagccgccggagccgatgccgtactcgcgggcaccggcgcatgcggcctgaacgagggccggatggctggagggccccaggtagtcattgctgcagaaggccagcatcggctgcccgtccaccagcagcgcggccccgccggcaggcacgacctcgcggatgcggcggcgctggtgcgctgcgtcgagcgccgcgatccccgccggaaattcgtcgatccaggacatgatgtctcctcgtcagggccagtcggggggcagttgcatggaagccgcgcgcggatcgggcgcggggctgaaggcaatatccgccagcagcggcgcgcccaggtgcgtcttcaggta

SEQ ID NO: 1852 - DNA, 18500 bp, synthetic construct
  source 1..18500: mol_type = other DNA
  misc_feature 1..18500: note = Synthetic
cggtttgggaatgatcggaatggaagcgtcctgcatcaatgctgttcgcaaggtttgccattccggttttttatttcaggttcatgcgcaatgcctgttaacgataacagttatgcattatctgcttaataaccggctatccctgtgcgggattggtttatggatcaaataatctggtttcgcggcattaatctccccggtccggcttatgccccatattcccaaaccaagctgccatgcggcttgcagacggatggtgacagagattggacaaacattctttggggcttgcaaactgatgtattttggtatagcgcagatttaatctgccgccgtctggatgattaaccaaaatactcctaggagaaattatgagtaatacaactatgtgggggccgaaggaagatgacgactatcttgctacgtccgcccaacgcgccatgtttgatatgcgcgaacaatggggaaatgacaatgatccccatcctgtgacccaattctttcaaaaaacggcgggaatattgcctcaggtattttcaaggccagaaccactcacggaaccaatgggaacaatacaatatgccgctcccaaaacaacgcttacccaaaagataaatcagcaagaattcatatcaaataccgataaatagggcagcgcattcatgcaggcgctggattctgccggagcaggttcgcataattcgggtttgatggattatggcttaaccggcaagacggcaaagtctcaattgcagccagtgccttttaaggcgaaacaacagcaggcggcggcccaaacatggcctaaacagggcgatttggccatgcggcaggccattgattctttagcaaccgcaaacctgtgcaacgaggcgttttctttcacgccggactttctcagggaaagcgtcggcgggtatcttaaacatggccgcgcggatatgctggaagcaagtaatcaggccgaggcaaacttcactgcaaatatcctgtcccaaacaggacgggcgatggttgaacatggaacggacaaggccgcgcatgacagccatacgccttatcaattacgcttccaggatgaaatgaaggattatcaaaacctgctcaacaacgcgatgcaacctggcgggcaggccgtgcatgactggaatatggaacctgtaagagatttcgatagaaaaggcgagctggccctgcaaggcagcagaaacctcttcaatcaattaaaatccaacactgccaaaggggcatttgcgataaatgaggctttgtcagaagcgcatgataaggcaaaaaacagatcggtattggccggtttggtattgaaaaatcatgacgcaagaaaggagagcgaaaaggcgttgatcaagccaaaagacatctatgacgagcggccggaagtgatggttcaaaacgcctttgactactggcagcaaaacgcgataagcactcaccttgttaaaattctgtatacccgcgccatgcggggcacaaacagcgttaccagctatatggttgacattgctgatgaaaccatattatcaatggcaagacaagtgaagcaaaccggcgattacgaattattgcaggcgcttcaggacggcattgaaaaaggcgcgcccggaacagatcagttgcttgtcgatatgatgtccaacatgcttgggccgaatgccggcacagcctttcttgtcgcctggcacttcctgacggaatttgaaaaaagagccattatgcaagggctaaaggagcggcaaagtcagaggtgacaaaagccgcctgtggtatttgcacaggggaaggcaaaacttcatgccttccctttttaggctaatcctgaacacaatcacgcctgagtccgttatgataacggcatcccaaaccagccaaaaggatttgccgtgaaagccaaacgccttttttccatcctgtttttcatcgccgccagtgtgggaatgcaagcctttgccggcgacaaggaagacgcgctccaattactcaagaataagcaaccgaaaaaagcctttgttctcatgaaaaaagcggcggaagcaggggaggcggaagcgcaagcctatttgagcatcatgtatcaaacgggaaaaggcgtcaaacaggatcacgccgctgcgatgaagtggatgagaacggcggcagatcaaggccatcttatagcaatccacgatgtcggcgttttttatgagcagggaattggggtaaaacaggatttcacggaagccttaaaatggtacaaaaaagcggctgaaaaaggcgatcccgatgcggaagaccgcgtgggcgcgtattaccggtttggcctgggcgggcttaagcaagactatgccgaatccttcaaatggtttatgaaggctgccgaaaaaggcaatgccaaagcccagtttcatgtgggggtttcatttgatgccggtcagggcgtccaaaaggacaacagggcagcggtatactggtatgccaaagccgcgatgcaaaatcaccccgatgcattgaatagtgttggactcatgttgctggaaggggttggcacggaaaaaatgcccaaagaggggctggagctgatagaggacgcggccaatcttggcgtcgccgaggcccaatgcaacatgggcattgaatacgaaagcggccgatatctgaaagccgacaaagccaaagccagggaatggtacgaaaaagcggctgcccaagggaatcaggaggcgaaacaaagattgaaagatctaaaataaagtcacttgttttattgaaattagttatttaattggctatttgcaaaaatcggttgaaaaaactcgtttatgcattactactttgggcttgcaatgtgccaagactgtttaaatactcactttaagacttttgggtacgcttcataaaaatagacatgcatgagtgatgttcacaatccatatactagcattatcccgattcctgaattattccgattttcgccaagctaaggctggggataccagtacgatcaggagcatttggctttttcactaaaaaattatcggcaagctatcttggactctgaagcagaaggtggcgggcaagagaatataaaagtcagacacgacgagcaacttattgataggtttggtgtaagccgccagtttgatgtgctgtgggaatatgaacaagcggggatacggcataaaacgataattgagtgtaaggactatagctcttctgtatcaatagataaagttgacgcattatgcggaaagttggttgattttcccggcgtaagaggcattatagcaacgacaaaaggctatcaatccggcgcaaaagaaaaagcaaaaaataataacattgaacttttatgtatcagagaacaaaatgattccgactggcagacctcggaaggtgagcctttgattagaggaatacaccttaacattactctagatatgccaatcaggatattagagttcgttccagttgttgatggagcatggatagaagaaaacacaaatcttaataccacagagcctgtatctgtcggggctttaaccaatcagatatttattgacgacaaagaagcaaacgaaaggtattcgctccacgacttgtcgcaaaaaataaaaatcccggaaggagtttcagaagaggagccatttgaagttataaaaaagtttcccaatgcttttcttgaatgtcccaatatgagattaaaactgattgggtataaaatgaagtgcgtaaaacctgaaacgatagaggaaaaatctgaaattgatttttcccgtatgctaataggagtggttgaatatcttaatcaaaacaagaaaaaaatgattatggataacggtgtggttaaagatatagatttagaggttaaaaaataaacgaaaatacagaacgcttgaataacgccatgtccttgcacaagctgtagacggaagcggtggaaacatggaattgcatccagaaatctgaatcgccgcataatgggtctgtaggttctcgtgattgtggtggatgctgaggcaatgaacatacgaaacgggtaatttacaaaaggcaataaaggtacaagcatttcaagtattaaaagtgcaaaagcgtgcgtaaagcgtgtgcaaaaatccttttatagatagtcgcaaaagaaagtaatcatactcatcacagagtacgctaactcaagaacaaatcaaaaaagctatttacaaaatgtgattgaaaatctctactaagaacatttcaaaaatatatgaatcccatttaatttaaaaacccggcatatgaaatggattacgctctctcaactggaaataggggcaaatgccatccctgcgcaaaccaattttccagggaagggtaaaaccttggtgaggttgccggtttgtgcggattttggacatgttgatctgttattgtttacgttgtgcgtttgataacctgcgatgatttcgatatgaatacgtcaactggaaaaactttatctgaattttcggtacatttgcgctcctggggggcgatggcgctgccggcaagccagctcagggtgaatatggattttggggagaaaatgaatcgagtcttgtcagattcccatatctatgtgttgtgcaaaagaccggtattttcgtttgatcccgatactttcttatggtcacaaaatcgggtgacttgcgatctggtgtgcaaggtaaagggagtctcgacgtccattcatttcgaatttgatttgccgctgaaagagaatgaggcaatggttgcgcttgcgccttcgccgcatcgggaaatacgggtactggatgaaaaaggcgagtgcgttcgcattctgaccgcgatgggcctttcccagcatcctgctatcctgaggaaagacccttttcccaacgatctggaagtgctgtatgtcggcaatgtattcgaggaaggaaaaacatcggtttttgaacggatttgccgaaatgagccgttgcaaaacctcgtggtcgccatgcagcaggcgttgccggatgatgaaattatcatttacgtgtttgaatatctgccttatgaactgctcgccttgttcggccgtctacagcaccagagtaaagaggaggggccgggtgagacccgttttgtttcgattaaggatcatcctttgacggaacatcagaaaatctgtcttgcacagggcggactgatttattatttccggccggattggcaggagccaggcgggaaaatgatgccggatgccggccaggctgtttttcaggcatgtgaaaagctggatatggcgggcctggtcgtggaaatttcaaccgtacgcagccatttcaggctgtattccgcaagctccgctcttttgcctcatcacatgaccatgatcaatttgtccgattccgatagtcgggcggcttttttttcaatgaaaatataatccgctgacagaattttggttggatttgatggcagtaccctgaggcggctctgctgcttttttgcaggtgtaacggcggctgaggaaagggcaggatattatttccaaccgtgttcatgccggtttgtggctacggcatgtatgcaaaccggtcagtgcagcgtgttactgagttcggataccatcaatgcttgttccagcggaagattcgatgtgacaagatcacggtctttttctgatattttcagcagggcattcccgatctttattgtcagctcgtaatcaggcttatttttgtccgcgttattaaggcacaattgaatatcattgttttcaagattgccgttttcgacgacgatgtgtaactgacctccgtcagggcatatcttgtacaggtcggaaatatcgtcacgaatgccttgccagagttcttttttgtgattttccatatggcctcaaaaaaaagctatattatgccgtcaaaacgggcatatccataagcttttgttccgttaatggtggacaagggcctggttggttgggttacaatttccatccgttttgccggttttttgctctgcgccttaaggaggtgccatgacttctgtaccatgtctccttgattttcgggttgttgccggatatttcctggtgtgtatgacgtttttgctgtccggttgcggcgggtcggctcagcaaccgggttcgcaggatgcacagccgcctgacggcacgctgcggttttcggcaacgctgtcttatgaggaccggcagatgatgcggcgtcatctggtgcgagggttacatgacgggattattgccacggctgagatgcaggcgaggattgactgtagtcatagctatggttgcccacaatcagatggcaaaagcggtgctcacagggcaggatgcggatatgctgaacaattatctggcaggacggaggttcatgctgattacgtcttgagttgcctggagataaagagtatcttttcagaaaaacaaaagaccgcatatagcggccttttcatctgatgcatttttcagcttgttagcgtccaaagctcatatcccaatcaactggttctttgtatcttatgcggatttatcttaaaggtcaatcatgcgtaaaaagaaaaacaaaaggaaaggtaaaaaaagatgtttcataagatgaattaccgtctggcgcttgatttgggcagcacctctttaggctggtgtatggtgcggctggataaggaaggaaaaccgtgcgccgttatcaaagcaggggttcggattttttcaagcggacttgatcctgaaaaaggaacttctttagccgttgcccgccgtcaggcaagaggcatgcgccgcaggcgggatcgtcttttaaagcgcaaggtgcgcatgatgcggatgctgattcaatatggtttttttccggaaaatgaagcagagcgcaaagcattggaaaaattaaatccctatgcgcttcgggcaaaaggtttggatgaagcgttggcgccttcggaattcggccgggcattattccacatgaaccagcgcagaggattcaaaagcaaccgcaagacggatgataaaaaaaatgacggcagcgtgataaaggcggccatcagcaatgcgcgtgaagcgatggagcgtgaaaattgccggacggtgggggaatggttgctccggcgggacgaacaggggcaaactgttcgtgcgcgctatcgggaacagccggttatgcgtgacggaaaatcccgaaaagataaaagctatgatttatacattgatagagcaatgattgaagcggaatttgatgcgctctgggcaaagcaggcggaattcaatcccgggcagtttacggaacaggctcggcaagacctcagggggacgttgctataccagcgcgacttaaagccggtagaccccgggcggtgcacctttttgccgaatgaaaagcgcgcgccgctggctttacccggcgcccagcgttttcgcatgtaccaggaagtaaacaaccttcgtatcctgcaagatgacttgagagaattgccgctttccccgtcacagcgtgatgcggttattgaggcgcttgaaaaaaataacaagcggacttttgctcaaatcaggacattgctgaaactgggcggcgcaagcaaattcaatctggaagatcccaaacgaaccgaattaaaaggcaacgcgacaagcgcggttctgggcaaggcagaatattttggaaatagctggttccaattggatgaagcaaaacaggatgcgattgtaatgcaattgctgggggaggaaaacgaggctgacctgattggctggttacaggaaggaaccggtgttgatgcgtcgcacgcaaaagcgattgtcaatgtcagcctgccggaagggtatagcaatctgggcatgacggcactgaacaggattttgacggaactcaaaaaaaacgtggtggtttatagcgatgctgtccgtcatgccagttttaatcatcacagtaatattgacgcttctgctacgggagaaatatggcctgaattaccgtattacggtttggctttgcagcgtcatgtcggatttggcacaaataaccctgccgacccggatgaaaagcgatacggacgcatcgccaatccggttgtgcatattggcttaaatcagattcgtgtcgttgtgaatgccttaatcaagcgatatgggcatccgactgaaattattgttgaactggctcgtgaattaaagcaaagcaaggaaaaacgcgatgcccaaaacagggaacaggcgacaaggcaaaataagaacaaggaacgccgtaaagctattgccgatattctcggcaatagcgaggacagcgtaggggattcggatcttcagaaatggattttgtgggaagaattgaatcctgctgattgtgcggagcggctttgcccttattccggtgaacggatcggcgcggacagacttttcagtccggaagtcgaaattgagcacattttgccacttgcccgaacacttgacaatagcctcaacaacaaaaccgtctccatgtggaaggcaaaccggataaaagggaatcaaacaccctgggaagcgtttggcgacagcccggggggatttgattatgacgccattttgcttcgggccggtttaatgccgaaagagaagcgttatcgtttcggcgaagacggctatgcacgctggctgaaagaggacaaggattttttggcgcgcgcgttaaatgatacgcgctacatgagccggattgcgcgtgaatacctgggcttgatcaatccttcaggagtccgtgttattacaggaacaatgacagcgatgctgcgcaggcatttcggcttgaataacctgttgggattgcaaggagaaaaaaatcgcaatgaccatcggcatcacgcggttgacgcctgtgtaattgcggtgacggatcaatcgatgctccagaaatttgcgacagccagtgcgaatgcgcgggaagagcaacttggccgtcttgtcaagggcctggagatgccgtggaaaagttattctgaccatgtgaaaagagcaattaatcatatcaaggtcagctataggccggatcataattatgagggtgccatgcatagggctggggcttatggtttaagagcgaatggtaacgtcagtttccgcaagatagtggatggcagacggcaacgcatggaagaaaatcggaaagtcattcctgtcaccagcttaaaagcgtctgcaaggcatggattattgccggatggcagtcccaggccttacaagggctatgatggcaatagtaattactgtattgaaattgtgcgaaatgaaaaaggcaaatggacaggcgaagttgtttctacatttgaagcgtatcaggttgcaaaaaaatacaggaaggaacggttgcggcatcggacgctaagcataagcggaaaaccattaattatgcggctgatgaggaatgattgcctgcaatttgaaaataatggcgaattgcagataatgcgagtcgtatcaatccgtactgatggcgcaattacgttcgcagcgccggttgaagcaaatgttgatgcaagaaatcgggataaagaagatcccttttcatatttccgtaaaacggcaggcacattgcaacaggcaaaagcgcgtcttgtaacggtttcgccgattggtgaactaagaatttacccttttaaggggtgaaacccgatgattggacgtattgttgaaattgctgatgacaaacgtcatttatccttatccagaggatttcttgtcatacaggatacggaaggcaaatgggaaaagctggggcaggttcccctggacgatatgaccgcgctcattgccaatgcgcacgggctaagttatacgaataatttacttgttgcattgagtgagcgatgtattccgtttgtattatgcgcagccaatcataatgtggtcgggatgcttttgcctgttgatggtaactttcaacaggccaagcgatttgatgcacaaatttcagcgggtttaccgttgagcaaacggctttgggccgacattgtaaaagcaaaactccaacagcaggcagcatcgttaaaagccgtgaatgcgcctgatattccgcttttatcgcttgtcaggaaagtgcgttccggcgatccggataacatggaagcgcagggcgcgcgacgttattggggattattattcggtagggattttcgccgtgacaagcaggcggacgggataaacgccatgctgaattatggctataccgtgcttcgcgcggcgacagcgcgggctgttgtagcggcaggattgcatccgacaatcggcatccatcacagcaatgaaagcaacgccatgcgtttggtagacgatctgatggagccgtttcgtccgatgatcgatttaaaggtctggcaattatacagacgcggagaaaaagacgtgacgccagagaacaagcgtattctggtacatacgctttatagtgatatgcaaacaaatttgggagtcactcccatgacagtttgcatccagaaactggcaatttctctggctcagatttttatgggtgaaagaaaaaagcttgatttgcctatgccgggtttgccgattgatttggcggctgatttgcatgacgggtagtgtattatgcttagtgggtatcgtatcatgtggctcgttgttatgtttgatttaccagttgtggaaaaaaaagagagaaaagccgcatccgattttcgtaagcgtttactggatatgggttttgaaatgtctcagttttcggtttacatgcggttttgcaccagtccggcacaagtggatacttattgtaagcgtgtagaagaaaatttgccgcaaggaggtagagtgcatattgtgcaacttactgacaaacagtatgagaggattattacttttcgtggaaaaaccaaacagccagctcaaaaatcaccagatcaatatgtacttttttaatgaaaaattaatttttaaaatcttaaaaagcaataaacccatgaaaaatcatgggtttattgcttttggattttaccagattgggatatgagctctggccggaacaatctctttagctaattcaatttgcaaattattttaccagattgggatatgagctctggccggaaccagattgcccgcgccggttgaaacaatgccgattttaccagattgggatatgagctctggccggaactgtatgccgatacggacgcgcaaagcctgtattttaccagattgggatatgagctctggccggaacaaaaatggggtatagtccttagcgatgaaaattttaccagattgggatatgagctctggccggaacataaggctgctgatcatgtcatagacaaggattttaccagattgggatatgagctctggccggaacagctcgggctgctggcagatgtgctgggaaattttaccagattgggatatgagctctggccggaacaggctgagcgaaaactatatttgggtggcaattttaccagattgggatatgagctctggccggaacggatccttggcgcacctgggctggacaatcattttaccagattgggatatgagctctggccggaacggatccttggcgcacctgggctggacaatcattttaccagattgggatatgagctctggccggaacacctgcatctagaaataggacatacatctaattttaccagattgggatatgagctctggccggaacaaaatatacaaacgcattgtattgatggtagattttaccagattgggatatgagctctggccggaacaaaacagcaagcgttctttgtggctaaaagattttaccagattgggatatgagctctggccggaacataaaaagcatgttacgttctgcacgtgttattttaccagattgggatatgagctctggccggaacatcaatagcacttaggacgatgggtgaagcattttaccagattgggatatgagctctggccggaaccagtatcgggatgcacgcgctaatgggaaaattttaccagattgggatatgagctctggccggaacacaatgatttatcagcacataaatgctttaattttaccagattgggatatgagctctggccggaactaaggatgttaatcaggtgatgattgagctattttaccagattgggatatgagctctggccggaactagcgcgagatagggctatggaggccaatgattttaccagattgggatatgagctctggccggaacttctgccatccgcacttgtggagactgacagattttaccagattgggatatgagctctggccggaacaaagcctgcccaaacgagccttgtatgctggccctgatcgctaaaccgatgaggagttgaccttttggcgtacctagctttcctgatttgttttataatcgccacatggatacattcataaaaaaaatggagctggacgataaagtggcgactgttatttatgcagtcatagtggtcgcctgggcgctcgcaattttttgccttgtcttttccgtcaatgagggcgtgcctttcgctggcgtcctcgttgcggccttcgtcgttttccttctgaccctcccggtctggatgctcctatttcccctcctggccgcgccgattgcctttgtcatcagcgccgttatgttccgtttttgcgtctgatttgccgcgccgcgcgttcgctccactcgacaaactcctccatgtccagcgcattttaccggattgggatatgagctctggttggcagacctgatgcaaggcaaaaagctttttttacccggaatgggtttcgttaaagccttgaataatttccctcggccttttatttctgagcccgtacatggcggggacatgcttgatgttgcgcgtacggtttgagtatcgttgcgggctgcctggcttttcggttaagggcacgttccagtcgtgatcttcatcgagtaaaggcgcaagcatgcataccagcaagcttgtcagcacagtggtatttttcgctttttggatgatgtgagaacccatgatgatggttttcttctcgaaatcttttaaaaacaacattgtagcagatatggattgatcttgcttgatctacctcgtaagcgcctgccgggatgcggtaaggcagatgagagaggaacggttcttaacgtatatcgagccttgcaattgcaggatgaattgttgtaaattgcagtggttttggctttttccctgtttttgattcttttctgacatacccaatggctgtggcgtgtgtctgatgtcttcggctggcgttatatacatgcgatgttacgagttattttcctcttttcgatgatgttttttctggcgggatgtgcttcgcgtgtgccgagcgatacgatccgttcttctctttcgacgggctatgtgagtgatttgtgtcagaaaatggaaaaaacgcatgaatcagcgagggaatttgtaacagcgttaaaccttgcccgtttgctgcaaatggaagggagatggaaagaatctatccgtcggtatgatgaggcgctggctatattggaagagtatgaggcccgtgcccagatcaatgtgcgggaagttgcagctacggcgggaacgatcctgctggcgcgcggggcaaagcagtattatggaacagggtatgagcgctcgcttctccatacttttaattcgcttaattatgtcatgctgggcgattttgccggtgctgctgttgagatgcgcaaaatggacaagcggcaggaatactggttgcaggaatcccagtcgcggattgagaaaaaactggatagcagcaggtatgatactgcggcgttgccgatacagtacagtatgcgtgaaatgttgcaggatgaggcggtgcgcagtctgatcaacaattatcaggaccctttttcctatgcgttaagcgcgatcctgttccgcattgccggggatatgcaggcttcagaagtgaatatgcgccgcgctgttgcgttagacggcaaggcaggggagcttttccggtatgcctggccacaatcccggatgcagtcaagccaaaagaaaaaggcgggtaaaaaggaagcgggtaatgatgatcatatcatcctgccaggactggcgccggttagagcggttgcgtctggtgcagaggcgccccaatcaggagatgcggcgataaaagaagggcatgtgcaggaagttaccatcgtcgctttgagcgggatgacaccttctcttaaggttgagcatgtgcggatggggtttccaaaaataggttatgtcttgcttgatttgccatcgtatgcgggcgcagtgcctggacgggcgcctcatgctgttgttgcgcctgcggctccggttgttttttatccgctgcttcggacggataggctggcttaccgtactttgcaggatgagctggattttgaaatgggatcagcgatcagccgggccgctgtcagggcaggcatatctgcggcggcttatgcaggtgtccaatcaaatgacgataggcggcaacatgcagaggcggcgggcgtgttggcgacggttttgcttgatttgtggacgtattcgatgtcggtttccgtccggaattgggaaacgcttccgaacgagggttatatcggcatgacaacggttcccggcggcagcaccatcacggtcggggaaggcggtaaccagaaaagtttatccttgccgagcgatattcggggggttattattatgatgacctatttttccaacactaacatgaagatcgattatgtcacgtattagcatacttttctttgttctttgtcttggatttttagtttcctgcggcagatccacacacgagtatctggacaataaagacgtcaaaatcaaatccatccagcatgcgaaagacggcgaatttcttgtcgtaacagccgtgctggtgaataacgatggggatagcgtccagcacagtgtgtaccgcatgctctggtttgacaaggatggcgcgcttttagagcagtccgcctggcggcctgttatcgtgaagggcaaggcgcctgtttatgtcaaggagcgttcaaccataccgggcgcaaaagaatataccctgattatttccaatgatgcgagctagattatgaaaaaacgactgcgttatgcttttcatttcagttttattgcgctggcagcggcgcttgccgcttgcagtgggccgcaaaccggacgcatcagcggcgatggccaagtggtgtacgaagatgcccaggcgaccgaaaccgtgacgacaaaatgggggtcaacggatttgcagtcaacggcggagagcatggcgcaatcattgctggcttcgaaatggattgcccaggcttcaagttctcccaaaatccgcctgcgtgatgttaaaaatttcacggatgagcatatcgataccaaaggcatcacggacaagattcgtatcaagctccttcaatcagggcaggttcgctttctcacggataaggcaaatatggatgatgtctttgatgagcgggatttgaacgaactggctacgaagagaaaagaaaacaagctgatgatggatgcggattacatcatcaccggttcggtgcgttcaatcagaaagcgcacgcagagtgtgggtgacgtctatttccagatcacgctggagttggttgacccgcaaagcggcgaaatcaaatgggcggatgaaaaagaaatccgcaagcatacaaccaaaccgaaaatcggctggtaagccggagggtttcctatgcggatgaacctgcgccggatattgctgtggggcctcttttgcgtgctggcagcgccgtttgcggcgtcagcggcttcagtgccggatggggcggttatccgggttaagccatttgcttttccgcaagcggcttatataggggcagaggaggaggctgagaggctttcagccgcgtttggtaatcagcttatatcggcattacagcaggcgggtttggcggcttcggttttgtcagaaaaaaaaggagtgcagggcgatacgcaatctgtgcctgataaacagcaaaagaccaaaccggtcccaaccggaaagaaagggcgttcaacccaggaggcgctcgctgatggggaagatgatctgtttgccgatgaagaagatggtgtaaaggatgcgctgatggcggccgttgaggaagcggaaggtgtcaagaaagaagagccggaacgcgaagcggcggcgggggctgaaaagggaaaaatgaagccttctgcaaaatccgatgcgtatatcataaccggcacggtcacgcagtatgaggagcatgtcggcgtaccggtcaaaagcggcgcaacaaggcgttcccgtgcggaggtgacgctgcgttgttcctaccaggtcaaaaatccagccggcaggaccatcctatcggaagaaacagccgcttcttcctccagagtcgttacagaaacggtggacatccatgccgccctgcaaaatctcagcaggaaggtattttttgaagcaagctacaatatcgccgagcgggtatccggcaaaacgcgggtaaaaagcaaggataatgccgaatccggcagtgaagatgatgaatatgctgattctcccggcaaacgccttcagcaaaaagccagatagggaaaataatcagccagccttttccagttcgtaaaaacgttccaaaaaccgtttcctggcaagggagggcggccagggcgtgatcgtttctttcatcgcttcaatgcctttcaaatagtgccattgcgtttcaatatgcggcatcaaatcccgctgttcagttgcaagcaggattaggtcggcctgtttgatttcatgtggcatcgggcagggaatgccgtattgccggcagatggcccgctcgatatttttttcaatacgccggaattcgggaaacatctcttttaagggctttgtcatatcaccgacaaaagcttctgtcgcgtcgtgcaaaagcccggcaagctgcatgccgggcggcacaagatggctcacgaggatgctgtgctgtgccacagaataaaattcagacgtgtgtccggtaaagcggcagagatgggatagcgcgtgggcaatggttttaatatcgaaatgataggcatccggattgatgaacgagaaatagttacccgcgcaagtgaggatttctgattttgccgagatgtgttcggctatggttttttcttgatacatgatgcaataagttatactgtaaataattacagtataactcgttttgccggtaaagggaagcaacatgcaccccgatcaatgattaatcgcaagcctgtcctattgatatagctaaaaaaaggggcttgccgcgattgatccggtcattggcagaaaaaaacgcgattgggaaaagggattggaaattttgcgtgttcggctattttccagatattgtgcgtcaatccttttgcttttatcgaccatgccggtctgctgcgtagggcaatagcctcgttttcacccttgtaagatcagcagatgacaatggacggcaagactacacattcaaaacgtttgacaatcctggcgccggttgatggacgtgttatgtaacaggtgttgcagggcgcgtttatgaacatgctgcatatcgaaatcagcacacgggtaaattttgttgcaagttaattgcctacttgggattttgcgcacttttttcttaaaaccaaaataaggcagtggctgataaccggttttctatcgggttgttattttattttgttatatttttgttattaaaaaatatataaatttctatatgcaaaatttatatataaaattatgcgcatattattttttgctatattaaattacaaaaagatattttaatatattgaactataaaaaatattttaatatattaaaaaaatatttatttggatcggttctgcattaaggttgagattgatgtaaatgaaactggtagataataaatgtaatcaaaaatattatctctttctaagagattagaaatcaatactgtttgttttgtttgttaaagtcatgcaggaaagatataaaacatattgctgaaatgattattgattaattttattaatcgatttgtttttatagatggatttgattcattatttaaaaataaataaactggtatatttatttaatcattttttaatatttttaaaaaaaattatattcgattaagcagagtttaaataatgattgtaatatttatgggagagtataatgtcgcaattaaataaatctcgtgtaaaaaaaataaaaaagaatgcgacaaattcttcttctgtgagtacaaaaagaagaggtcttggcaaaaaagaccgtaaccgggaaataaccggttccaggctaataaacaagattcggattcgatcaatcgaattaggtattcaggatcgccacattgccgatatgattggagtaacgccgatttactggtattcaattgcaaatgggcatagaaaaatttcttctcttagtaaagaaaaactaaaaaagattgcggaatttcttaatattcctaccgtgcaaatcatgagtttagccgatgtgctt

SEQ ID NO: 1853 - DNA, 17679 bp, synthetic construct
  misc_feature 1..17679: note = Synthetic
  variation 15968..17206: note = n is a, c, g, or t
  source 1..17679: mol_type = other DNA
  variation 14428..15741: note = n is a, c, g, or t
ccgatcgagatgacgacgccgccttcctaccgcaaggtcaatcccgcggaggcgcccatcgtctacctggccctgacctcgccgtcgatgtccctgttcgacctgaaccgctacgccgaggatctcatcgcgcccacgctctcgacgatcatgggcgtcgcgcaggtccagatcagggggcagaagaaatatgccgtgcgcgtgcgcgtgaacgcggaggcgctcgcggtgcgcaacctgacactggacgacgtcgccggcgcgctgcgcagcgccaacgtcaacacgcccgtgggcacgctcgacggcccgcgccagagcctgaccatccaggccaaccgccagctcgccagcgccgccgagttcgcgcagctgatcgtcgcgacctctcccagcggcaatccggtgcggctgtcggaagtggcggacgtggaagacagcgtggagtccatcaagaccgcgagctgggtcaacggcgagcgcgccatcaccctggcggtggagcgccagccgggcgccaacacggtggcgaccgtggataccatcaaggcgatcctgccggaactggtcgagcagatgccgtcgtccgtccagctccggctgtacagcgaccgctcggtgtcgatccgcgagtcgatacacgacgtgcaggtcaccctgggcatcaccatcgtgctggtgctgctggtgatcttcctgttcctgcgcaaggcctccgccaccctgatcccggcattgtccctgcccatttccctgctcgggacggtcgcgatgatgcgggccctcggctacagcctggacaacatctcgctgctcgccatcacgcttgcggtcgggctggtggtggacgatgccatcgtcatgctggagaacatcgtgcgccacatggaactgggcaaatccccgctgcgggcggcactggacggctcccgcgaagtgagcttcaccatcatgtccatctccctgtcgctggtcgccgtgttcatcccgatattcttcatgcccggcgtgatcggcctgctgttccacgagtttgccgcggtcgtgggcatcgccgtcatgatgtcggcggtggtgtccctgacgctggtgccgatgatgaccagccgctacgtcgtcgggcatgaatccgaggccggcagcctgcggtggaccgaatggttcgaacgcggattcgcctggctcatgggcatctacgagcgcgtcctcgaccaggcgctgcgccatcgccgcctggtgctggcgatcgccgtgggaaccttcgtcgccagcggcctgctgttcatgatattgcccaagggattctttcccgacgaggacacgggacaggcgctgatcacggtggacgcggtggaggacatttcgtttccggccatgtccgagctcctgctgcgcgtcgacggcgtcatacgcgccaatcccgcggtgcatacgctcaacgtctacgccagcgacagccatagcgcacgcctgttcatgacactgaagccgcgcggcgagcgcgcctccatgacggaggtcatcggggaactgcggcgcgaggtgggcgccatgcccggtgtcagcattttcatcaattccctgcagaatctcaggctgggcggccgcctcagcaagagccgctaccagtatgtcctgcgcagcgtccattccggagagctgtacggcgtgtcggagtcgctcatggcgcgcatgcgccaggacgccatcttccaggacgtcaccagcgactcgcagctgaaggggctgcaggcggtgctcgccgtcgaccgcgacaaggccaacctgctgggggtgcagatcgcggatatccgctccgcgctctacagcgcgttcggcgagcgccaggtctccaccatcttcacctcgatcgaccagtaccaggtcatcctgcagatggccgacgaggatcgtgccgacgagaccgccttcggcaagatctacctgcgcgcccgcaacggcgcactggtgccgctgtcgagcgtcgcctcggtgcggcgcgaggtcgggccgctcgcgatcaaccatgccgggcagctggaggccgtcaccgtctcgttcaacctggctcccggcgccgccctgggcgaggcctcggcgcgcatcgagcagttcaagcgcgaattgagcctgccggccagcatactcaccagctacgccggcgacgcggcggcgttcgagtccacgcagaccagccaggtggtgctgatcgtggcggcactgctggtcatctacgtgctgctcggcgtgctctacgaaagctacatccatccgctcaccatcctgtcgggcctgccctccgcggccgtgggtgcgctggcgatgctgtggctgttcggcatcgagctctcggtgatcgccatgatcggcatcctgatgctgatcggcatcgtcaagaagaacgccatcatgatgatcgacttcgcgcttgaggcgcagcgtgacggcggcatggcgccgttcgaggcgatccgcacggcctgcctgctgcgcttcaggccgatcatgatgaccacgctggcggcgctgatgggcgcgctgccgatcgccctgggcctgggcgcgggggccgaggtgcgccagcccctggggctcgccgtggtgggggggctgctgttctcccaggtcatcacgctgttcatcaccccggtgatctatctctacctggatcgcttctccggcacggggccgctcaagctggagacggatccggatttccggcaggacgagggcggccgcggacgggagggagcatgacgggcgcactggggaatccatcatgaacctggtcaggctgtcgctgaggatgctgcgccgcgactggcgcgcgggagaattgcgcgtgctgggcttcgcgctggtgatcgccgtgggcggcatgaccaccgtggggttcttcgccgatcgtgtccaggcggcgctttcccgccagggcaaccagctgctgggggcggatctgatcatccactcggaccatccgctggcgccgggctttcgcgaagaggcgttgcggcgcgggctggcggtgtccaccgcggccaggttccccagcatggccgtgaaggacgagaacagccagctgaccgagatcaaggcggtgaccgaaggctatcccctgcgcggggacctgcgcgtcagcggcgagttcggccaggtgcagggcctccgccccgaccgggtcgcgggcgcgattcctccctcgggatcggcgtgggtggacgagaagctcatggcgcagatggcgctgcggcaaggcgacagcatcgagctgggcgcgacgcgcttcaccgtggatgcattgatcaccgaggagccggaccattcgatcggcttcatcaatctgcggccccgggtactgatcaacgcggcggatttgcccgcgaccggcctgatccagcagggcagccgggtgggctaccgcctgctggtggcgggcgaggacggcgcggtggagaacttcagggcctgggcgcagccgcgcctggcattgggggagcgcatcgagggcatccgcgacgcccgtcccgaaatcaagtcggcgctggagcgtgcggagaaattcctgagccttgctgccctggcgagcgtggtgctggcggcggccgccgctgcgctcgcggtacggcgcttcacccagcgccacctggacggatgcgccgtgatgcgctgcctgggggccagccaggcggcgatactgggactctatctcctgcacttcagcgtgctggggctggtcgccagcgggaccggctgcctgctcggctttttttcgcaggaggtgctggcgctgtggctggccgagatggtggagacggagctgcccgcgccgggcatctggcccggcgtgcacgggctgctgaccggaatggtgctgctcatcggctttgcgctcccgccgctgatcaacctgcgcagcgtgccggcgctgcgcgtgctgcggcgcgacatcggcacgagcaacagccacagcctggcaggctatgcgctggggctggcggcactcacgctgttgttcgtatggaaggccgacgacgtgcgcctggggatttccgtgatgggtggattcgtggcggcggtcggcgtgttcggcatgctgggcctgctgctgatcagggggctggcgcgcatgcgcagccagacgggcggggcgctgcgctacggcctggccagcatccggcggcgcgccgccgccagcgtggtgcaggcggtggcgctggggctggggctgatggcgctgctggcgctgacgctgatccgcgacgacctgctgcagaactggcgcagcagcctgccgccggacgcgcccgatcatttcctggtcaacatccagcaggaccagctggagccgctggccgcattcttcgaccagcacggcctcgagcgtcccccgatcttccccatggtgcgcgggcgcctgacggcgatcaacggcaatcccatcgtcaccgaagactatgccgacatccaggcgcggcggcagatcgagcgcgagttcaacctgtcgtgggcacaggagatgcaggatgacaaccagatcgtggaaggccactggtggaacggctcggacgcgggcagggcggtgatgtcgatggaggagggcatcgccaggcgggtgggcgtgggcctgggcgacaccctgacctacgatatcgcaggatcctcgctttccgccaccatcaccagcctgaggaaggtgaactgggatacgttccgcgtgaatttcttcgtgctgacgccgccgggcgtgctggaagcatacccggcgacctacatcaccagcttctacatgccgccggcgcacatggacgtggcgaacaagctggccaaggcgttcccgaatctgctggtgatcgacgtggcgaccatcatcgcccaggtccacaagatgatcgggcaggtgacccgcgcgatcgagttcgtgttcctgttcaccctcatggcgggcctggcggtgctgtatgccgcgatcgcctccacccaggacgagcgcatccacgaagccgccattttccgcaccctgggcgcgcggcgcggccagctcgcgcgcgcctgggccgcggaattcgccgtgctcggcggcctggccgggctgttcgccgccgccggcgccagcgcgctgggctatgtcatcagcgaatacgcactgaacctgccctatacgcccaatccctggatagggttgatcggcgtgttcgcgggcatggcgggcgtcatgcttgccggactcatgggaacgcgctccgtgctgtcgactccgcccctggtggtgctgcgccggctctgaagcgccatgaggccatgccaggcgcatttcgggcaggcgggatgacgcggcgcatcgcccatctcgacatggacgcgttctatgcgtcggtcgagctgctgcgctatcccgggctgcgcggggcgcccgtcgtggtcggcgggcgcaatgagcggcggccggcgccgcggcgggagggcggatgggccttcccgcgcctgcgggactacgcgggacgcggcgtggtcaccaccgccacctatgaggcccgggcgttcggcgtctcttccggaatgggcctcatgaaggcggcggcgctggcgccggaggcgatcctcctgcccgccgacttcgccgcctaccgccaccattcgaatctgttcaaggccgccgtggcgggcatcgccccgcgcatcgaggatcgcggcatcgacgagatctacgccgacctgagtgacctgtcggaggaggcgctgccgctggggcggcgcatcaagcaggcggtgcgggcggccacgggactgtcctgctccatcggcattacgcccaacaagctgctgtcgaagatcgcctcggatctcgacaagccggacggcctcaccctcctggcgccggaggatgtcccgcggcgcatctggccgctgccggtgaggaaaatcaacggcatcggccccaaggcggcggccaggctcggggaactgggcatcgccaccatcggcggcctggcgggcgccgatccgcatttcctggcgcggcacttcagccccggatacgtccactggctgcaggaggcctcgcacggaatcgacgcgcgcccggtggttacggatgcgcagcgcaagtcgttcagccgcgagaccaccttcgatcgcgacctgcacgcacgccatgaccgcgctatcctgggcgagatcttcacggcgctgtgcgtgcaggtggcgcgcgatctccagcgccgggactacctcgggcgcaccatcggcatcaagctgcggtatgccgatttccgcaccgtcactcgggatctcacgctgcccggccctacggccgatgccgccgccatccgccgcgcagcggaggagtgcctgcggcgggtgccgctggatcgcaggctgcgcctgctgggagtgcgggtcggggggttggtctgcggcagcgatctgcgtgcgggcttcgatccgcccagccaggcggaactgccgttcgccgtttccgccgggaggccctaggatcgcaggggaatcacgcgggtcgtccgggcatcagggctggcggtttccgcgcagccagcggaagaagaccacgtagatgaaggcggggacgaaagggagcacccaggggaacatctggcccagccaggccgcgtagaagctgtccgcatagcgcccccgggcggcagcgcacgccgccgcctccggcaggcggcaggcgagatcgatttccagcgacacctgcacatgggcgcgccagagccagtacgccatcgacgcggcgaagacgaccagcaccaccgcgaacaacgtgatgccgcctttctgcctcgatggggattgcagccgctgcatcgcgaaccctccttccattacccgccgaatgatggagggcgggtgtggcattgtcaagccggcgggctgctcaggcgttgcggaagcgcgtttgccgcagcagcaggatggacagcatgggcatcgcgaagccgatcgccgtcaccgtgatgagcaggatgcccagcgcgccgtagtcggcgggcacggtgacggcaccgctgagcgggtctttcacctcgcgcgcgacgacgaagatctgattgatgtgcttggtggcgagctgggaggcggacagggcgagattggtgaacgaggccatgaccgcgaagaaggtcgccttgagtttttccggcgcggaattggcgatccacgccagcatggggatcatcgcgatctgccccaggggcgactccagcgccgtgtcgatgacggcgatgaagcgggcatccacgacgccgccggtgacggaggcggtccagtggtgcagcccgaagtacatcccgatgatcggcagcgacaggatcgtccccgcgatggtgagcgcgccgatgatgtaggcgatcgagcgctccgccatgaagcggcggaagatgaacatgccggcaagggtcagcaccgcgccgatcagcgacagcgtcgcgaggaacgactggtcgaagcccagttcgtcgatcatccaccaggtggagcctgcgcccggccccggcacggcgcggaagacgaagatcagcacggcggtgcccaccagcacgttgcgcgcgtccggctcgagttcccccgtgaggcgccacatcaggaacagcacgatcgccatcgagacgaggaagatgatctcctccccccaggcgatgcggctgaggccgacgctcagcgaaacaacggtaaaggccagccccccgcccagtatccaccagttgaccggtggcggttcgttgtggaggccgagcagcgcctcggaggcctcgcggctgtgcccctgcgcggccagccgcgccatttcctggcgccgcagccaggtggcgagcaggacgcccagcaccgacacgacgggaatgatcagcgccagctcgtacacgaacaggtaggtcgcggccttgtccgcctccggcagctcgcccacgccctgcagcaggaacacgttcatgaccgagaccaggacgccgccgctgatgatggccacgcgccccagcgtctgcatggtgacgtgcatcgacttgcgcgcctccagatccagcggctgcccctgcccgtccacgcgcggcaccgcttccaccgtcatggcgtccgccaccacgtcctgcagcacgtagccgatgggcgcgagcagggcggaggtcacgtaccaggcctccaccggcgctagggcgtgcatggcctcggtatgcccgagcaggccgatcatgatcagcaggctcagcgcgatgagccccgcccccaggtagaccagcaggctcttccagcgccacacgagatccaccaggtggccgagcggcatcttcagcgcccacggcagcatcatccagaaccccagcgccgccaggaactcggcggacagtcccaggcgctccttgacgtagaaggtgcccacgattcccgtcaggccggaaatcccggcggcgacgtagaccatcagcggcggcaggtacgacaggcgcatctcccggcccagcgagaggatgttgtcatccagccagcggtgcaggccggcgatcaatccggggggcgtgggtgtcgtattcatccttgtggcatattctcaggcgatgcgcgcgcggatcccgttccaccaggcggtggccaccgttccattggcggcggtgagggccgtcaccgccatcacgcggtacaccgtgctgcggggggccttcacgttgacggccgggttgagcaggccgggggcggccgccacgcgccacagcgtctcgcccgccagcaggatgggccacatgcaggccagccgctgacgcacctccccggccgggatcgccagcgtataggcccagcccgcgtccaggtgcgccaccgcgagccggatgattcgatccaataccggccggaaggcgggcaggctcgcctcgtccagcaggtcatgggctttcagcccggcctcgtgcaggagctcgtccggcatgtagcagcggccgttgtgcaggtcgcgcgcgatatccttgacgatgttggtgagctgcaggcccttgccgaaccgcacccccagggcggacatctcctcgacattccagcgcgccatccccgggctgtgcgcgcacaccatccgggtccagaattcccccacgcatcccgcgacgtgataggtgtagcggtccagctcctccagcgtggacagcgccaccggccgccccggcacatcggcggggaagcgggtgaggtccatctccatgccctggggcagcacctccatcagccagcggatgcgggcgcggtcgcctgcctcgtagccctcgtatatcttcaggcagtcctccagccgctgcagcaggacgccctccgcggaatcgcgctggtgcgggaccagcgcggcctggatctcccgcaccgcctgccagtctatcgcatcattccggaactgcgcctggaaccggtgcaggtaggccaggcgccggtcgcggtcgatcagatccgtatcggcgatggtgtcggccgcgcgcgcgaacaggtacgacagccccatctggtcccgcaccggcgccggcagcacccggagcgtgaggtagaacgagcgcgagacctgcctgagaatgccgtgcagcagctcgtgcgcgatggggtcggtgctcaagggatggaaggttccggagatgctcgatcagggccgaacgttacacggcgccgaggcagggcgtcaaatttctgtatttctatgcttcaagtcctgattggaggtgtctgctattgtcgacttgaaaaaggataggtcatgaatgttggggtggaaggcaagactcataatccagaaaagctggcaacgaatcgcttcaaggataaatgaaataaggccgcatatagcggccttatcatttagtgcatctttcagcttgttagcgtccagagcgcaaatcccaacttactagcgtattgatgactataatggcaaaatgctgaggcgtcaagggataatagggattcgaagaaagtttcataggttcccagcaaaagaggaggggtgcgaaccatgttacataaaatgcgctatcgcttgggcctcgatttggggtcgacatcgatcggatgggcgctggttcgcctggatacgagcgatcagccctgtgcggtaataaaaaccggggtacgtattttctcagatggccggaatccaaaggatggatcttcattggctgttacgaggcggaaggctcgagccatgcgaaggcgtcgtgatcgcttcttgaggcgtaggtgccgaatgttgaatgccctgatccaatacggattttttccttcagagaaggctcaacgcaaggcattggagcttctggatccttattttctgcgggcaaagggattgaatgaggcactcactcccggggaatttggtcgtgcattgtttcatatcaaccaacgacgtggattcaagagcaatcgtaaaacagaccaaaagaacgatgactccagtgtattgaagacggccatcactcgtttgagaaatgcccttgcatcggagaattgtcgcacggtgggcgaatggttgaacaaccgccataaattgggatggggtgtccgagcacggtacagagaaaaaagaaccatcaatgatgatgggaaaacgcgtattaacaaaaattacgatctttatgtcgatcgtgccatgatcgagcaggaattcgatgttttatggaagagtcaatccgaattcaatccggtgttgttcaatgaagcggcacgtatagaactcaaggatatattgctttatcagaggcctctcaaaccaatcagaccgggtcgttgtacattcattcccgatgaagagcgtgcaccgatggcgttgcccagcgtgcaacgttttcgcctgtatcaggaagtgaataacttgcgtattctgggcgaaaatttgaaagaggaaacacttacgttaaagcaacgtgatgatctcgttggatctcttgagagatatggtaagcgtacgtttcccgagataaagaaattgttgggaatgaacggctcggtacaattcaatctggaagatcagagacgccaggaactcaaaggcaacattaccaatgctattttgagcaaagataagtatttcggagaagactggttctcatttagtgaggaaaaacaggatgagatagttctaaagctgtgtaaagaagaaaacatgagccaattgatttcctggttgcgtaatgaaacagatgtggatgaggagcgcgcggaagccattgccaatgttggattgccggaaggctacggaggattatgcaagatagctatagatcgcattcttccagagttacgcagagaggtgattacgtatgacaaagcggtgatagctgcaggttttgaacatcacagtcacattggtgcatcagtcaccggcgaagtactgttggaattaccctattatggaagagccttgcaacgccatgtcggcttcgggagcaacgatcctcaggataaagatgaaaaacgctatggccgaatagccaatcccaccgtacacgtttgcttgaatcaagtacgtcttgttgtgaacgccctgatcaagcggtatgggcatcccagtgaggtaattgtggaggtggcccgggacttgaagcaaagtaaggatcagcgtaatgaggaaaataagcgtcaggctgagaatcaaaaacgtaatagacgattacgtgcagagattgcgcggattctgaatgtcgatgaggaaagagtgagaaatgcagatattcagaaaatgattctgtgggaggaactgggatcggatccagcggatcgtcgctgcccttactcagggacacagatcagtgtgagcatgctgctaagcgacgaagtggaggttgagcatattttacctttctctcaaaccttggatgatagcctgaacaataaaactgtctgtcttcgtcttgccaatcgggccaaaggtaatcgcactccctgggatgcttttggggcacaaaatccaagtggttttgattattctgatatcttggaaagggccgagcgtatgcctaaggccaagcgctatcgctttggcgaggatggttatcggaattggttgaaagatgatgctggttttcttgcacgtgcgttgaatgacacgcggtatatgagcagggttgccaaggagtatctaagcttgatttgcccgcatacccgtgtcattcctgggcgaatgacagccctattgcgtgcaaagctggggttgaatggtattctggggttgaggggtgaaaagaatcgtaatgatcatcgtcatcatgcggtggatgcttgtgtgatagctgtaactgaccagggtttgttacagcggtttgcatccgccagcgccagttcacgagagagccaactagatcggcttgtggcgaacatgcccttgccgtgggagagttatcgggaacatgtggaacgtgcgattaggcatacttacaccagccataagccagaccatggtcatgaaggtgccatgcacaatgatactgcatatggcctgctcggcgatggaaaaattggctttcataaggtggaaggggggcaacgtatatatatagaggagaacttgaaggtcatagaaatcacggataccggcgtgggggatcggcatggcttcttaccgaatggagagccgcgtccttataagggttacaaaggagatagcaattactgtatcgaaatcatttgcgatgaaggtggaaaatggaaagggaatgtcatttcgacatatatggcatatcaaatagtgcgtaagggtgggattgcaaagctaagagattctcgcacgggatttaacggagaatcactggtgatgcggttgatgatcgacgatacgattcgattgcatattgatgggatattgcgggtaatgcgagtagcgaagttgagtagtaatggacaagtatttatggctgatataaatgaagcaaatgtcgacgcgagaaacagaaacaaagaagaccctttttcgtatatctcaaagaaagccagctctcttcaattgctcaaagcgcgccgtgttacgatttcaccaacaggaaagctccaggatcctggttttaaaggatagtccgagtgataggacgcatcgtcgaaattgctgatgaccgccggcatctgtttctttctcgaggttttctggtggtgcaggatacacagggtgagcgcaaggagctcggtcaggttcctctggatgatattgttgcgcttatagccaatgcacatggcctcagctacaccaataacctgttggtggccttaaccgagcgctgtgttccttttgtattgtgtgccgcaaaccataatgctgtaggcatgctggtgactattgatggaaattatcagcaggccaagcgtttcgatgcgcagcttgcggccggacaaccattgatgaagcgtttgtgggctgagattgtcaaatccaaactgcaacagcaagccattgttcttgaagctaccggtgcaccagatataccccttcgatatttgatccgtaaggtgcggtctggagatccggataatctcgaagcacagggagcacggcgttactggggcctattatttggtagtgattttcgacgcgatcagcaggaagggggattgaatgccatgctaaattatggatatacagttctgcgggccgctacagcgaggtcagtagtggcggcagggctacacccaacccttggaatacatcatcggaatgaggggaatgccatgcggttagtggatgatctgatggagccttttcgccccatcattgatctgaaggtgtggttgctgaacagaaatggagagagattgattacatctgagagcaagcgcgcattggttaggacgatatatgaagatatgcaaactggtatgggagcaacgcctgtcctagtttgcgttcagaggctggctacttcattggctcaggtatttataggtgaaagaaacaagcttgatttaccccttcccggattgcctatagatatggcttccgcactaaactgagaaatagtccgaaaaatgttatctggatatcgactcatgtggatcatggtgatgttcgatttgccagtgattgagagagctgagcgtaaggcagcgacagaatttcggaatgcgttacttgatatgggatttgagatgtcgcagttttctgtttacatgcgattttgtaacagtcaaggccaggtcgatacttattgctcacaagtggagaggtgtttgcccagtggggggagggtaaatattttgcaatttacggataagcagtacgaacgcattattactttctatggaaaaatcaaacgagcgtccaaaaaatctccagatcagtactgtttgttttagagattaccatggctctggacgcccgatattcaccatcctctatatttatcaagaggatggtgagtttcgagtatagcaggttgggatttgcgctctggccggaacnnnnnnnnnnnnnnnnnnnnnnnnnnnnnnnnnnnnnnnnnnnnnnnnnnnnnnnnnnnnnnnnnnnnnnnnnnnnnnnnnnnnnnnnnnnnnnnnnnnnnnnnnnnnnnnnnnnnnnnnnnnnnnnnnnnnnnnnnnnnnnnnnnnnnnnnnnnnnnnnnnnnnnnnnnnnnnnnnnnnnnnnnnnnnnnnnnnnnnnnnnnnnnnnnnnnnnnnnnnnnnnnnnnnnnnnnnnnnnnnnnnnnnnnnnnnnnnnnnnnnnnnnnnnnnnnnnnnnnnnnnnnnnnnnnnnnnnnnnnnnnnnnnnnnnnnnnnnnnnnnnnnnnnnnnnnnnnnnnnnnnnnnnnnnnnnnnnnnnnnnnnnnnnnnnnnnnnnnnnnnnnnnnnnnnnnnnnnnnnnnnnnnnnnnnnnnnnnnnnnnnnnnnnnnnnnnnnnnnnnnnnnnnnnnnnnnnnnnnnnnnnnnnnnnnnnnnnnnnnnnnnnnnnnnnnnnnnnnnnnnnnnnnnnnnnnnnnnnnnnnnnnnnnnnnnnnnnnnnnnnnnnnnnnnnnnnnnnnnnnnnnnnnnnnnnnnnnnnnnnnnnnnnnnnnnnnnnnnnnnnnnnnnnnnnnnnnnnnnnnnnnnnnnnnnnnnnnnnnnnnnnnnnnnnnnnnnnnnnnnnnnnnnnnnnnnnnnnnnnnnnnnnnnnnnnnnnnnnnnnnnnnnnnnnnnnnnnnnnnnnnnnnnnnnnnnnnnnnnnnnnnnnnnnnnnnnnnnnnnnnnnnnnnnnnnnnnnnnnnnnnnnnnnnnnnnnnnnnnnnnnnnnnnnnnnnnnnnnnnnnnnnnnnnnnnnnnnnnnnnnnnnnnnnnnnnnnnnnnnnnnnnnnnnnnnnnnnnnnnnnnnnnnnnnnnnnnnnnnnnnnnnnnnnnnnnnnnnnnnnnnnnnnnnnnnnnnnnnnnnnnnnnnnnnnnnnnnnnnnnnnnnnnnnnnnnnnnnnnnnnnnnnnnnnnnnnnnnnnnnnnnnnnnnnnnnnnnnnnnnnnnnnnnnnnnnnnnnnnnnnnnnnnnnnnnnnnnnnnnnnnnnnnnnnnnnnnnnnnnnnnnnnnnnnnnnnnnnnnnnnnnnnnnnnnnnnnnnnnnnnnnnnnnnnnnnnnnnnnnnnnnnnnnnnnnnnnnnnnnnnnnnnnnnnnnnnnnnnnnnnnnnnnnnnnnnnnnnnnnnnnnnnnnnnnnnnnnnnnnnnnnnnnnnnnnnnnnnnnnnnnnnnnnnnnnnnnnnnnnnnnnnnnnnnnnnnnnnnnnnnnnnnnnnnnnnnnnnnnnnnnnnnnnnnnnnnnagtatagcaggttgggatttgcgctctggccggaaccctctgctcctgttcttcaccctctcctcaagtatagcaggttgggatttgcgctctggccggaaccctctcctcctgttcttcaccctctcctcaagtatagcaggttgggatttgcgctctggccggaactgtccttccatgcggtttcatttagccgcggagtatagcaggttgggatttgcgctctnnnnnnnnnnnnnnnnnnnnnnnnnnnnnnnnnnnnnnnnnnnnnnnnnnnnnnnnnnnnnnnnnnnnnnnnnnnnnnnnnnnnnnnnnnnnnnnnnnnnnnnnnnnnnnnnnnnnnnnnnnnnnnnnnnnnnnnnnnnnnnnnnnnnnnnnnnnnnnnnnnnnnnnnnnnnnnnnnnnnnnnnnnnnnnnnnnnnnnnnnnnnnnnnnnnnnnnnnnnnnnnnnnnnnnnnnnnnnnnnnnnnnnnnnnnnnnnnnnnnnnnnnnnnnnnnnnnnnnnnnnnnnnnnnnnnnnnnnnnnnnnnnnnnnnnnnnnnnnnnnnnnnnnnnnnnnnnnnnnnnnnnnnnnnnnnnnnnnnnnnnnnnnnnnnnnnnnnnnnnnnnnnnnnnnnnnnnnnnnnnnnnnnnnnnnnnnnnnnnnnnnnnnnnnnnnnnnnnnnnnnnnnnnnnnnnnnnnnnnnnnnnnnnnnnnnnnnnnnnnnnnnnnnnnnnnnnnnnnnnnnnnnnnnnnnnnnnnnnnnnnnnnnnnnnnnnnnnnnnnnnnnnnnnnnnnnnnnnnnnnnnnnnnnnnnnnnnnnnnnnnnnnnnnnnnnnnnnnnnnnnnnnnnnnnnnnnnnnnnnnnnnnnnnnnnnnnnnnnnnnnnnnnnnnnnnnnnnnnnnnnnnnnnnnnnnnnnnnnnnnnnnnnnnnnnnnnnnnnnnnnnnnnnnnnnnnnnnnnnnnnnnnnnnnnnnnnnnnnnnnnnnnnnnnnnnnnnnnnnnnnnnnnnnnnnnnnnnnnnnnnnnnnnnnnnnnnnnnnnnnnnnnnnnnnnnnnnnnnnnnnnnnnnnnnnnnnnnnnnnnnnnnnnnnnnnnnnnnnnnnnnnnnnnnnnnnnnnnnnnnnnnnnnnnnnnnnnnnnnnnnnnnnnnnnnnnnnnnnnnnnnnnnnnnnnnnnnnnnnnnnnnnnnnnnnnnnnnnnnnnnnnnnnnnnnnnnnnnnnnnnnnnnnnnnnnnnnnnnnnnnnnnnnnnnnnnnnnnnnnnnnnnnnnnnnnnnnnnnnnnnnnnnnnnnnnnnnnnnnnnnnnnnnnnnnnnnnnnnnnnnnnnnnnnnnnnnnnnnnnnnnnnnnnnnnnnnnnnnnnnnnnnnnnnnnnnnnnnnnnnnnnnnnnnnnnnnnnnnnnnnnnnnnnnnnnnnnnnnnnnnnnnnnnnnnnnnnnnnnnnnnnnnnnnnnnnnnnnnnnnnnnnnnnnnnnnnnnnnngaggcagtatagcaggttgggatttgcgcttattgtatccatgaacggaacatgtcgcagcctcctcaaaatccagggcaattcagaagccgcgtttgctgctatgcgtaatccagaggaggcgaggtaattgctgcattcctgtggcgtaaatgcatcgaggagacggccgatctcgttccagagtgcctcaaccgttcttgctgcgctctttcgcaataatgccttgagcttggagaacatcttctcgatcggattcaagtcgggagagtaaggcggcaggtagcgcagggttgcccccacagcctcgatggcttgcttgacgccgtcgaccttgtgacaggacagattgttggctaccaccatgtcgcctggtcgtagcgtcggacacaggaaggtgcggacataagccaggaatgccgctccattcatcgggccatcgagcaccatcggtgccgtgatctgatcctggc

SEQ ID NO: 1854 - DNA, 17619 bp, synthetic construct
  variation 14620..14823: note = n is a, c, g, or t
  variation 13285..13427: note = n is a, c, g, or t
  source 1..17619: mol_type = other DNA
  misc_feature 1..17619: note = Synthetic
  variation 4021..4284: note = n is a, c, g, or t
aacgttttggcaagtctttgccgccgccacctgggcagtttatttctagctacgaagcatttcccgtacacctctttaatgcaaaagtcgacttaaacaacttaagccaaacagccacctggttagggcatgcaactaccttagttctcagcaacggatttactttattaactgacccacatttttctgaacgtgccttccctgtacagtggattggccctcaacgcaaagtaaaaagccctgtttcagtagcgaacttacccccaatcgacgtggtagtcattagtcacaaccattacgaccacatggatcgcgattctctaattgaattagcacaattacaacctcagattttgtttttagttcctttaggggtggaaaaaacctttcttcgctggggaattacgcaagtcaaagcgcttgattggtggcaaactcttaagctgcctgatcactcaactgaactcatttttgttcccgcttaccattggtctgcacggtctttttttgatcgaaatgaatcactgtggggcggatgggtattaaaacaacccaattttagtttttattttagcggtgacaccggctacaacacccaagatttcacccaaattggttcaaaatatgggccttttgatctgagtgcaatcgccgttggagcctatgagcctagatggtttatgaaagcacaacacattaatcctgatgaagcactgcaaattcatttagatgttcagtctaaacgctcaataggagttcattggggaacatttgaattgactgatgagcccttagaccaaccaattgatgatttacagcacgcgctaattcaacgccaaattcctaaaaatcaatttatgctactgaagcaaggtgaaacaatctcgttgagtccttaaaactctccatcgtcataaccagttccaatttcactggtaaaaccattacaggtatgagagtttttacaatttaagagtaaatggtacaaatcatcaaagctgcttcgatctgagatatagtacaacccacctagattgacccaaccactgtctttaaagctaagtggcgtgtcttgaatgcaaataaatttagtgccacgccttaccatatcaaacaaagggtttaataatagcttgtttttatgaagaaaacttgagcgaacaataatcacttcgctgtgtacccaacgtgcagcattttccagttcgacatgattaaggcgaggaagaatgtcgatatctttccacaagtttaaacagacagaactcagtttttcaataaaacatttgtctgattcgactatgagaactccaacctttggtaaacgtcttgtcattcagttacccatttaatttggttttaagtccgtaacctaaggttacgatgatttactgctcatattcatttatcgaatgttttgcctaattctgtaactcatcagcgggttaacccaaagtattttcacctataaaaacatgcatacaagccaccgctttactgaacaacaaacgaagtaatatgaacatctttaatgcctttaccctctaaatttggctgctctggtaaagttaaacgcgctacattcaaagcttgattcagcaacacttgcttaccttcaatcgttttaatctcttcgactgttttagtacttaacaaaagcaaaaccctgctgcgaatcactggcaagtaggttttaagatttttttgagccacctcatccgttgtttcataagccaacgaaatttggacataacgatcaatgtcgggcggtgctaagttaacaatcatcttctctaaattaaaaaaaggaacagcgctgccgttctctgaagcatgggcaggtaaagcagacaacaccgagaaggccaccatgaatgacaattttctgaaacaaaaggtcataacgactaattccaagataaagacatgttattaatatgcatgagcgggttctctgtaggtcatcaaagaacagggatttaaatagtctattttttttatttaatcttatttaacaataaacaaaacagaataaaccaatgattttattatgtttttatatcgactctcttgaattcaatcaccaggtatacgcaatttgagctatagttaaacattctgttggtgtttgattgtttgtagaaacttatgactagtattgtgtattttttattagcagccgcattggctgtacctttgttcaaacgttttggtttaggggccattttaggttatttagtggcaggcttgctgattggccctagcatattcggattaatctcagatcccgaaaaagtcctacatttttctgaaattggtgtcatttttttactttttgtgattggcttagagctagaacctaaaaagctttggtccatgaaaaatcgtgtcattgggctaggcgctgggcaactaactgtaactgccttttgtttatatgttctttttcattatttattccaagttacatttgcactcagtgttgttattgcaatcgctttggctttgtcgtctaccgcatttgcaattcaattaatggccgacaaagggttattgggtaaaacagaaggtcgtaatggcttttcaatcttactgtttcaagatttgatggtagtacctattttatttttaaccgaagttttatctccaaactccacgcaaaacaaccaagaggcatggtggttggctcctttagttatttctggactcatcttatttgctaaatatttagtcaaccctgtgttgcgttttatggctcgacatggtggtcgagaaattatgactgtggttgcgttgctgatcgtgttggggtcggctcaattaatgcaaattgcaggtttatcggcaggtatgggggcctttatggcaggcatgatgctggcaaactcgtcttttaggcatcaattagaggctgatgttgagccgtttaaaggacttacgttagggttattttttatttcagttggtatgaccctgaatctgagcttaattgttgacagtccttttatcatcatttttggtatgctgggtttaatgattttaaaagcagcaattattacagggctgtgtttattggctaaaatgtcactgcaacaaagcgtttgcttaggtgttttactcagccaagggggtgaatttgcatttgtaattgtggcacatgcgcagacatctggtttaatggatgcaaatacctctagtttggtcagcttagttgttggtttatctatggtagcaactgccccattcttaaatcaggtagaaaaattattaggcgaagactccattcaccctatcaatagagccagtcatgatactaggcctattgaagaacccgaaattttaattcttggctttggtcgttttagccaagtgactgctcgaattctcagtgcacaccaaattccctttctagccgtagacaaagatccacaacacattgaatttgtcaaaaaatttggaagcaaagttttttatggcgatgcctcaagaacagaaattctcgaagctgcagggcttgcccgtgccaaagttgttttagtgggtttaaatcatccgacagcctgcttagaagtagtccgttatatccgaaaaaatcacccaaagattcaaattgtgacgcgtgcccataatcgcaatgattatttaaccttgaaggaggctggtgcacaggcggtgattcgggagttgttttcatcgagcgttgaagcatcgtatgaaactttgcgtttaattggttttgctgatttagctgccttagaagccaccaacagctttcgcgaacatgacttagaaatgttagaggaaaatttaaaagcaacgatggctaataaagaaaaaagccaagaagaaaagcctatttacaatcaaagtcttgagttggaaactttgtttaataaagatcagtcgcattaaatctgaaaataaactcctactcatttgggaaataaacccccaccccctttggttgctgggcttgtgtccgcgtatttccaaccgcagtcgcacaaaactgggcgtgctnnnnnnnnnnnnnnnnnnnnnnnnnnnnnnnnnnnnnnnnnnnnnnnnnnnnnnnnnnnnnnnnnnnnnnnnnnnnnnnnnnnnnnnnnnnnnnnnnnnnnnnnnnnnnnnnnnnnnnnnnnnnnnnnnnnnnnnnnnnnnnnnnnnnnnnnnnnnnnnnnnnnnnnnnnnnnnnnnnnnnnnnnnnnnnnnnnnnnnnnnnnnnnnnnnnnnnnnnnnnnnnnnnnnnnnnnnnnnnnnnnnnnnnnnnnnnnnnnnnnnnnnacttcaatcgcccagaaaccaaatgggggtgggggttatcaaacacaaggctgaaaaggtgaaagccccatatatggggctttccatctggtgcaatctttcagcttgttagcggaagatgcgcatatctcaatgaagtagttgttgaactttaaatcaaacaatgataaaaatcaagactaactaaaaaaataaggttcctcatgactcttgaccgtgcaaaactaccctacaggctcgcacttgaccttggcaccaattcattgggttgggcaattttacgacttaaaaaagatgaagaacgatacaaaccgactgcaattattaaagcaggtgtacgtattttttctgatggtcgaaaccccaaagatggaacatcaaatgctgtaaaacgacgtgaagcaaggcaagcgaggcggcggcgtgatcgtttactaaaacgaaaatcacaaatgttaatccgactcatacaatttggttttttccctaaaacacttgatgaacgaaaagcccttgaacacctaaacccgtataaacttcgtgctaaaggtttgaatgagcaactcaccgcatatgaatttggtcgcgcactatttcacatgaatcaacgtcgtggatttaaaagtaaccgaaaaacagacagtaaagaaaatgacagtagtgtgatgaaagataccattaaacaagttagcgcacaaattgaccaaacaaatacgagaacaattggtgaactactgtatcaacgacaacaaaatcagctaacagtacgcgcaagatatcgtgaacaacgtattgttacagagggtaataagacaaaaataaacaaaagctacgatctttatattaacagacaaatgattgaagatgaatttgaagttttgtgggcaaaacaaaattcatttaatccaactctatttaatgaagatgcgaagttgacactcaaagacacccttttgtttcaacgtaaattacgagcggtgcgccccggtcgctgtagcttactcccaaacgagcaacgtgctgaacttgcttacccaagcgcacaacgattgcgaatttttcaagaaacaaatcacttacgtattctgaatcaacaattaaagcccgaaccattaacacttgagcaacgcaacctgattacgggtagcctagaaaaaaatggaaaattaacgtttactgcaatcaaaaaaaaattaggacttagtagccaaacaaaatttaatcttgaagacgataaacgtactgaacttattggtaacaaaacaagctcgcttctctcagaaaaagaatattttgacaaagcatggtttgaatttaatgccagccttcaagatgaaattgttaaaaacttattaaacgaagaaaatgaaaaagaattaattcaatggttgtgccaacacactcaaattaatcaagaaactgcaaaacgaattgcccaagccccattaatcactgggcacagtgctttttgccttatagcaattaaaaaattactagactgtttgaaagagaatgtaatcacttacgacaaggctgttaaagccgcaggttatgaagaccatagcaaacttaactattcaaatagtggtgaaattcttgaaagcttgccttactatggcgcatatttgcaaaggcacgttggttttggcacaggtgcagtaagtgattcacctgaaaaacgttatggtaaaattgcaaacccaactgttcacatcggcctaaaccaagtgcgccgagttgtaaatgcaattattaagaaatatgggcaccctaccgagattgtagtagaacttgcacgcgacttaaaacgtagcaaaaaagaacgcgacaaaatcagcaaaatgcaaaaacaaaacgaaatacgcaacaaccgtattcgaaccagcattgcgcagaccctaaacatttcagaaaaccaagttagccgaaaagaccttgaaaaatggattttatgggaagagttaagtgcagaccaagcagaccgaaaatgcccttacactggcgttcaaatttcggcttctaagttactaagccctgaagttgaaattgaacatattctgcccttttcaaaaacacttgacgacagccttaacaacaaaacggtgtcacttaaaagagcaaacgcagctaaagggaaccaaaccccttgggaggcatttggccaagcaaactcactcggcattcactatgacgaagtcattgagcgtgccaaaaatatgcccaaagataaattttttcgttttgcagaaaacggcatggaacaatggcttcatgagcacaaagactttcttgcaagagcacttaatgacacacgctacttaagccgaattgcaaaagaatacctacatttaatttgccctgacgaaaatcgcattcatgttatccctgggcaaatgacagaaaaactccgagcaaaatttggtttaaaccagatactttcggataatggaggaaaaaatagaaacgatcaccgccatcatgcaattgatgcgtgcgttatcggcgtgactgatcgggggttattacagcggtttgcaaatgcaaaccaacacgccaaagaaaaaggtttagaaaagcttgttgaagaaatgcctatgccttggcctacttatagaaatcatgttgaacgtgctgtcaagtcgattattgtgagccataagccagaacacaattttgagggtgagatgtttgatgcaactatttacaacactaatggttatagtaagaaagcagcaaaaataagaaaagttattcccttccctattcagcaagagattaaaactcaaaaaccttactatgaattaattaggccttcaacacaaagacacaaaaacaagccatataaaggtttactaacaacaagtaattactgcatcgagatttttaaaaacgacgcagaatggggcagcgatgttctaagcacttttgaggcatatcaggttgttagtaaatataaaagcaaagacgaaggttttaagcaacttagaaataaaaaaaatgctcaaaatggtaagccacttattatgcgtttatcaattggcgattatgttgtagtcgagcttgaaagaaaaaaatgcttactacaagttttaaaaatcgacagcaagggtagtattacctttattaaacccaacgaagcgaatataagtgcaaggtacaatgaaaaactcaaagcagaaaaaaacaaaaaagagcaacaaaactacgatgaaaaagctttgaatgacgatttttttcaaaaagcgatgaattgcagctcactattaaaaggaaaagcaaggcaggcaaagatttcagaactaggaatactcaatgacccaggttttaaaaattaattcatgattggtcgaatcatagaaattgctgaagacaaacgccatttatcactttatcgcggatttatggttgtaaaagaaacaggtgctgagtcaaaagaaattgggcaagttccaatcgacgacatcgccgctgttattggcaattcatatggacttagttattcaaataacttacttgttgcattcgctgaacgtggcattccttttgctttatgcgctgcgaaccacaatgtagcaggttttttactttcaacaaatggtaatttatatcaatcaaaacgaatcgaggcacaaattgcagccaaacagcccactcacaaaaaattatgggctgccattattaaaaataaacttgagcaacaagcgtccacccttgaagcaattaaccaaccctctgcgccactaatatacttatcaaaaaaggttaaaagcggagactctgaaaaccttgaggcacaaggcgcaaaaaaatactggtcgctcttatttcaaaacaattttagacgtgacaaaaatgctgacggcgtgaattcattattaaattacggctacaccatactgcgtgcaacaacagctagagcggtagtagcagcagggttacaccctagcataggattgcatcacagcaacgacagtaacgcaatgcgactagttgacgatctgatggaaccatttcggccaatgatcgatttacaagtctggttactgaataaagcaggaaaaaacactgtaaacccagaaacaaaacgcgcattggtcaatgtaatgtatctagacatgcaaacaaccagtggagcaagccctgtcatgatttgtttacaaaaattagcgacttccctagcccaaatttatctcggagaacgtgataaacttgaacttccccaaaaaagaatacccgctattttagccgaaaatcagtttcaagaataatgttgtctggttacaggcttatgtggttaattgtcatgttcgatctacctgttatgacaaaacaggaaagaaagtcagcgaccgaatttcgaaatgctttactagatttaggttttgaaatgagtcaatttagtgtttacatgcgatactgtagcagttattcacaaattgacacctactgtaaaagagttgaaagcaatttaccaaatggtggaaaagttaatattttacagtttacagacaaacagtatgagcgaatcattacttaccgtggaaaaacaaaaaacccagaaaataagtgtccagagcagtaccagctattctgaagggtattttcctgaaaagggaaagcaaaaaattacaattaaatcaataatttaatgctttcctagtttacatcattgagatatgcgcaacaaccggaacacgagtccttatattgtgattttattataagtttacatcattgagatatgcgcaacaaccggaacgaaacgctctgcgaagacagcgggttaactagtttacatcattgagatatgcgcaacaaccggaacaattgcttgatacaaaaagcttggaaagtagtttacatcattgagatatgcgcaacaaccggaaccgtacatgctaacgcactgtttcgcgatccagtttacatcattgagatatgcgcaacaaccggaactatttttaaacagtgattttattgcaagaaagtttacatcattgagatatgcgcaacaaccggaacaacaacttagcccaatcttgctttttcccgagtttacatcattgagatatgcgcaacaaccggaaccgaatttagttagatgtcagattaagttaagactattacagtttaaacattcaaaactttttctctaaccattgattaagctgcgcttctgtaatacccaaaccaatcatagcgcccgcatgaagtatgcttaaatcagccagtgtcatggctgtaaattttgcagcgtcttttatagtgtactgttgacaaaaatgttcaatgaagtcctctgctttcttaccatgcaagtttttctggacgaccagccccatcacctcttttcgctgttgccggtactgaatgcgaaaggcgtcaatttcacccaacgattttttaaccaccccatattgcgcacaggaacgtagataagaccaagaaaaaagttccagcataggctcaatattatttttttcataaaatgccaacaacgccgcagtgtaatcttcccttgaaacatcgataaaactcaacgggcacaaattttctttgataaaagggatattacagcttaggcgtgaggtgcgcttgttaacatcttcaaaagcttgcaaataagaaagatgcaccagcaaaaaaaagctttgctcaaacgggtcttcgatttttcgtgctttaaataaaataagttcaaataattctttaagctgatggggattgtttattggcttataagtcgattgctcaatatcaacttcaatcgatcgaacattgccacaagcgtctggatttgccagtaaatcctgcgcaagcaaatggtgcaaattgcgaatggttaggctgttcagttcaatttcttgtgcattttccactaaaaatacgatggcctctttgtggtttaaaatcattacagcctcttcgtacactttgccttccgctgtaatgccttcttcaaccagcttttgggtgtcaagcttagaataagcattaccctccaagcggctggagttataggacaagtcgatgagaagtcgctggcaaatttgccgtgcataagttcctgctgctaacgtcttatcaaagcgtttaccttctttgaacaactgcattcgcaagctgttagggacatacgctgttttgtttgaaacataactgtccaataattcacggttataggacactttttcgcgagcataacgaggcgtgtccaaaaatttaagagatttttggctttttgagctaaaaatctgcgatgacatgtccgttaaatgtcccttaatttttgtttgagacacattggaagggtaatacttggtcgcctttttttccccttgttttgcaataagatttgcatccacaagacgggaaagacggcgctgcaatgtctttgtattgatagaaaatttcatgtactctgaaactttaccccgagacaagccttctgggtttttctgcaaaatggcgataatttcttcaatttctgcttgtaccttggataccatgcctgtctcttaaaatgtcctataaatcaatctacatgatttataggacacaatcaaccaatttatgagacaaataataatttaaggggcaattaggtcctctatagtaaagtagttgtccacgaacctgaattatttatttgaccaacaaagagggtgatatttaatcaccaggaatattgaatctctgcaagtgattgacagaaaagctaaaaaagagaataattaagtcatttggctaactttttgaaaaggcagtgcagatgaaaatatcaggcaatgattcaaaccagaaactagaatcaactactgctgacttagtcacaagtaatccaagtcataattcgccaaaattaacaagcgcagcacgtaatttattttcgaatttgttattaaattcttcccattatagcaaaaaacttttgcctgctgccgcaaaaaacggcgatgtcaaagcgattcatgaaatgctgaaaaaacataaattttcagaccaaaagattttcatcagtataaaaaatgcgttgtcaaatggtcaaaccgaggcattcaaagtcttgttccaaaaggctcaggagacaggattatcaaaagcgatttttttgaactatccaaccacaaaaaatgataacgacaaatcactgaacacattacttgcaattgcacccgagtttcctgagattcgaagccttttaagagaagcagttgttgaaacttatgcaaacccagattctaaacacgttgctctcaaattgttaaaccactttgatgaaatctttcctgcaagcgattcgattgctggccctaacacaagcgttttatacacagtagctaagcatggaaatgcagagctactcagggaaatgctcaagcaccctgtatttttttatcagggaaaaatagctcatgaacaggtatttgaacatgaggtagagattaatcccagcccaggtacttactttgacgaaaagcaaactgacacgaataaaatccgctttgtacaaaacattttgttggacatgatcgaaaaagacgaggtaccctatctaaatgatttaccaaggctacttcacgctgaatttaatcagaacacagacttttctaaacaatttgttagtcaggtagaagcaagtcaggcgcgccaaaaaaagtctattcaataacctttttcgattggctctcttcctgctcaatcatctgcgtaatccgctgaggtgatcctgttttccgtgcaagcaactgataagcaaccggcacaataaacaaagtaaacaaagtggtcacaatcataccgtataaaatgacgacaccaatcacgatacgagtttctgaacctgctccggtggctaacaccaaaggcacggcacccgcaatggtggttaaacttgtcatgatgatcggcctaaatcgagtggcagaggcttcaagcaatgcttcactaaattcgcggccttcgtcgcgtaattgatttgcaaactcgacaattaaaatgccatttttagcagctaaacccaccagcgtaattaagccaatttgcgagtaaatattcagcgaattgcctgttaagtaaaggccaagtaaaccaccacctaaggccagtggtacggtgagcataatcacgaaggggtgaacgtaactttcaaattgtgccgctaagactaaaaacacaattaaaacacccaacccaaacacaaataaaattgattgtcctgaaccaataaaatctcgactttggcccttgtaatcgataacaacttttgggggtaagtgttccttcaccaaagattctaaataatttaatgcttcccccaaactatagccttcatctaaattagcctcgatagtgattgatcgaatgcgattaaagcgggacaaactttcggctgccccatactcgtgaatgctgaccaaatttgaaaggggaatgagttgccctgttcgtaatgaacgaacataaatgttactgatgtctgcaaacgagttttgatcttccagaatgccttcaacaatcacgtcatactcttcaccatcatcgagaaaggtggtgatattgcgccctcccatcatcgtttccagcgtggagccaatttccgacacggtaactcctaaatcggcagcacgatcatagtccacattcaaatcaatttgtgggcgcgtttctttgtaattgctgtcgatcccatttaaaccagggttggattcttcaattttttgaagcaaaatgtcgcgccattgggccagctcttcgtaagtagaaccgccaatcacaaactgcactggcttactcgttgaaccggccaagccttgccgcattacaggaaatgcacgcaccccaggcaaatcagccatagattgtctaatttcttgcataatttgcgctgctggtcgacgacttgcccaatcatttaaaataataattgcaaggccgttactaaagttctcgatattaccaaatgcacgcggcgcgcgcacggacaagcgattcacttcgnnnnnnnnnnnnnnnnnnnnnnnnnnnnnnnnnnnnnnnnnnnnnnnnnnnnnnnnnnnnnnnnnnnnnnnnnnnnnnnnnnnnnnnnnnnnnnnnnnnnnnnnnnnnnnnnnnnnnnnnnnnnnnnnnnnnnnnnnnnnnnncttttcgacatacttcatgaggcgttgctcaatttctgtcatgtattcttccatgtaagcgtagctagcgccttcaggcccattcactgtaagaaaaatggcgcctcggtcttcagtcggagtaaattcttgctgaatttttgggtaaataacaactagaccaatcaacatgagtacaaataagagtatcatcaacatgggcttagccaaagctagttttagggcttgcatgtagccctctttcactcgatgaattacagcatcaatacgacccaccacgttaaaacgagcttgactaggcgtattggacaacagcactttcgaggacaacatgggacataaggtcagcgcaataaatgcggaaaaaccaacagccgctgcaatggtaatggcaaattcagtaaaaagccgaccaatgttaccttctaaaaaaataatcggaacaaataccgcaaccagcaccaaagtagtggccacgactgcaaacgcaacttgacgagcaccacgatacgacgcaataagcggggattcaccatacagctcgatacgacgcacaatgttttctagcaccacaatggcatcatcgaccactaaaccaattgctaataccaaggccaacaaagtgagtaagttaattgaaaaaccagcaacatacatcacaataaatgttgcaattaacgagacaggaactgtcactgcaggaattaacatggcacgcaggctaccaagaaataaaagcatgaccaatacaacacacgcaatagcgagaaacaaggtgagatacacctctttaatcgaagcctcgataaatacagcagcattgtaactgtcttcaatactcatgccattgggtaagtttttattcagcttttctgtgagcgcaatcacgctgttggcgacgtcaatcgtattggcggtagactgtttaatgacaccaatgccgaccattggcactccgttaccacgaaaaaaagtgcgactttcaactaaatccaaagccacattcgcaatgtcacctaaacgaacaagataaccaccttgcccttgagctatgactagcttcttaaaatcctcaggggttttaaaatgacggtctacgcgagctcgaaataatcgttgatcagattctagcgtacccgcaggcaattcaaggttttcagtacgcaaagcccgttctacatcggacacgctgnnnnnnnnnnnnnnnnnnnnnnnnnnnnnnnnnnnnnnnnnnnnnnnnnnnnnnnnnnnnnnnnnnnnnnnnnnnnnnnnnnnnnnnnnnnnnnnnnnnnnnnnnnnnnnnnnnnnnnnnnnnnnnnnnnnnnnnnnnnnnnnnnnnnnnnnnnnnnnnnnnnnnnnnnnnnnnnnnnnnnnnnnnnnnnnnnnnnnnnnnnnngttcgttctacatcggacacgctaattccgcgtgccgccatctcttggcgattaagccaaattcgcagcgcataatcttgtcctcctcccaagcgcacacgagctaccccatcaagagtcgaatattgttcaaccaaaaaacgtctcgcatagtcagtcagttcggggacgctcatggtttcactagttaaatttcgccaaataatgacatcgtcgttactgtccactttttgcacttcggggggattcgcttcttcaggcaaattatcagcaatacctgaaactcggtctcgcacatcattagcggctgaatcgatgtcgcgttctaccgagaactcaatggtgacggcagacctaccgtcttgcgaagatgattcgattaattgaatgccctcaatgcctgcgatacgctcttcgatgatttcagtaatccgcgtttcaacaatattggcgggcgctccggggtaactaacctcgactgtaacaatgggcgcattaatatcgggatattcacgcaatgacaaacgctcgtaagccactaagccaaaagcaatcagcaacagcgaaagcacgctggcaaacactgggcgtttgactgagacatcggaaagaatcatgctattggctcattcactgggggttatttaacagttgcttcaacgttttttgaccatcatcttctgctttaatcaccactgctctacctgggccaagacgcaaagtgccatgggtaacaattttttgaccaacctctagcccactgatcacttcagcaaatccttttttccgtgcacccaacataatttcaacccgactcactttgattgcctcgggtttagactcgtcgatcgcatacacaaacaatttccggccttgattcaaaatagattcttcgggtatgaccagtgcttgacgcacattattgtgtaactcaacacgcattagcaaacctggtaataattttttgtcaggatttttaataaaagcacgtacagaaatagatcgagtcattgggtcaacgcgactactcacactgaaaatttcgcccgaaaatacgtcatttggccaagcactagttttagcgttgataacatgaccttttttaagcgacgataaaaaaagttcggggaccgaaaaatcaagtttcatcacactgtcatcatcgatggtcgtaattaacgtaccaggttgagacaatgcacccacgctaatattacgcaaaccgacaataccatcaaagggggcaacaattttacgttgtttaatttgcgcctcgatcgcatttaaccgcgcttgtgaagtttgtaactgcaattgttgtgcatctagtgcagcttgagaagctgcgccccgacttgttaaaggctttaaacgttccacttgtttttttgcctcggccaactgggcaagctcttcggcttttaacgccaattcttgactactatccatttcaaccaagaggtcgcctcgttgaacacgttgaccatcagtaaaatagataccagtaatcatttctgtgactgaggaagtaagcgccacattttgaaacgcctgcaccgtacccaaggcttctacttgatcaacaaattcttgttgttttactgtagtcacaaaaacaggtacaggtgcttgttgcgcatggcttaattgaggctgtacaccacacaaaaacacaaaacaggttacaaaccaataagacattgttttcaaattaaccacctattctacgtttaattgagcaattcagaagtgtactcattcaaatttaaattaccgccaattgcccgaatgagttgaatgcgcagcgcaaccaaattgagttgttgattcacgagatcacgttctaaagcacgtaattcttgcaaggcacttagcacgggcaaataatcattcactccttgagtgtacaaaacttctgtttccgcaaaagtttctagcagcaaagttttacgagttattaagcgttttatcaattcacgctgtttttgttcttgaaccagtgcattttcaacctcttcaactgcttgaagatacaaacccgtaaagcgagcaagctgttcttcataaatggctttattttctgcaataacagctttacgctgcccccaatcaagtaaaggttgaacaaaatcggccattaacattgataaggggcccacataattgcgagtacgagtattcacaaaactggcactcagagagattgacggcaaacgttcagcaatggcctgagcaatttcagcatccgcagcaatcagctcggcccgagcagaaagtaaatcggggcgctgtaacagcaactgtgcaggtactcctagcgaaggtaattgatttgaaaagtcgagcgtttcttgttcagtgatgcgattttttccgtcaggaggaatacccaacaatacatcgagcctattttcaaagatttgataatcgctctcagccattggaattaaactaaaactgtcttgaattcggcttttttgttgcaatacctcgactttagtgccaaccccagattcgaagcgtaatgtcagcaaatcaagtagctgttgatcagtttgcacttgttgattcagcaagaccaacctattttgcgcagccaccgcactaaaataagtgtttgcaacttcggcactgagtaacaacttgagtgcatgtatgtcataggcacgagccaatgcgcgaaattcttcagcttgcgtggctgcaccgaagcggtttgataaatcaacttcccaacttaattcggcacctaatgaacttaggctagattgagattgtcggctttgccaatttttt

SEQ ID NO: 1855 - DNA, 17336 bp, synthetic construct
  variation 2903..3203: note = n is a, c, g, or t
  variation 2204..2540: note = n is a, c, g, or t
  variation 15387..15627: note = n is a, c, g, or t
  source 1..17336: mol_type = other DNA
  variation 14972..15249: note = n is a, c, g, or t
  misc_feature 1..17336: note = Synthetic
  variation 15778..16015: note = n is a, c, g, or t
atccacaatggggcggtggccgcaaaaatgatggcccacccgatctggaagatttattacgaaaactgaacgccaaggttgccaatttgctgaataacaacaacggcactccaccaaccgacaatggcggcccacgctcaccggtcggtcgtggcggcttggggctgattcttgccgtggtcgctttggtgtggctgggcagtggtttttacatcgtcaaggaaggccagcgcggggtggtattgcgctttggcaagaaagtggacctctcggaagcggggctgcgctggcatttgccctcgccgctcgaaacggtggaaatcgtcaatatgagccaggtgcgcaccgtggaagtgggctatcgggacaacgtcaaaaacaagcagctacaggaatcgctgatgctgaccgacgatgaaaacatcatcgacgtgcagttcgccgtgcagtacgccctgagcgatgccgctgactacctgtttaacaactcgctgccacgcgacaaggaagcccaagccatggcgaccaacacgctggtgcgtcaggtcgccgagaccgccatccgcgaaatcgttggcaaaagcaagatggattttgtcttgtaccaaggccgtgaggaagtcgcggatgccgccaaacgcctgatgcaacaaacgctggatcgctacaagtccggcattcggattagcaatctcaccatgcaaaacgcgcaacccccggaacaagtccaagccgcatttgacgatgccgtgaaagccgggcaagaccgcgaacgccaaaagaacgaaggtcaggcctacgccaatgatgtcgtgccacgcgccaagggcaatgcggctcgactgatgcaggaagcggaaggctataagcaacgggtaattgccaccgccgaaggtgacaccagccgtttccggcaaattctggtggaatatgagaaagcccccgctgtcaccaaggagcgcatgtatctggacatgatgcagcaggtcatgagcaacgtcagcaaggtcatggtggatcaaaagaacggcaacagcctgttgtatctgcccctggataagctggtggaaaccagccgcaaccaagccgccgcacctgcggagactgccgcaccggtggcagccccggcagcggctccggcagatagcacgagccgcacgcgcgctgacaatcctttgacccgtgatcgggaggcccgcccatgaaaaccctgcataacttttttctgctgatcgtggtggccgcgctggtgctcggctcctgcctatatgtggtcgatcagcgcaaaattgccatcgtgttccaactaggcaagatcgtgcgcgtggaaaccacgcccggcttgaagttcaagctacctctggtgcaggacgtgcgttttttcagctcgcaaatcattaccctggatacaccggatcctgaacgcttcatcaccgccgaaaagaaaaacgtgctggtggattcttttgtgaaatggcgcatcgtggatgtcgttcagtattacaagagcctgggcggcgacgaaatgcgagccaataaccgtctgatgcaaaccgtcaactccatcatgcgtcaagagttcggcaagcgcaccatacacgaagtggtgtctggcgaacgcgatcaggtgatggccgtactgcgtgccaaagcggatgccgatgcacgccagtttggggtgcaagtgctggacgtgcgcgtgaaacgggtggatttccccactgagatcagcgaatcggtctacaaacgtatggatgccgagcgcaagcgcgtggctaacgaactgcgtgcttccggcgcggcggaaggtgaaaaaatcaaagccgatgcggatcgccaacacgaagttattttggcagaagcctaccgcgatgcgcagcaactcaagggcgagggggatgcccgtgcctcggcgctgtacggtgccacctttggtcgcaaccccaagttctattccttctatcgcagcctggaagcctacaagcagagtttcaagaacaagagcgatgtgatggtggttgaccccagctcggccttcttcaaatacctgaaaggccccggcgacgcgggcaatgtaggcaacggcaaaaaataattcgccttaactgggcacgacgttatgcaaaactggttactccctgaatacattcaagacatgctgccagacgaagcctggcgggtggaaaacatgcgccgcgcctggnnnnnnnnnnnnnnnnnnnnnnnnnnnnnnnnnnnnnnnnnnnnnnnnnnnnnnnnnnnnnnnnnnnnnnnnnnnnnnnnnnnnnnnnnnnnnnnnnnnnnnnnnnnnnnnnnnnnnnnnnnnnnnnnnnnnnnnnnnnnnnnnnnnnnnnnnnnnnnnnnnnnnnnnnnnnnnnnnnnnnnnnnnnnnnnnnnnnnnnnnnnnnnnnnnnnnnnnnnnnnnnnnnnnnnnnnnnnnnnnnnnnnnnnnnnnnnnnnnnnnnnnnnnnnnnnnnnnnnnnnnnnnnnnnnnnnnnnnnnnnnnnnnnnnnnnnnnnnnnnnnnnnnnnnnnnnnnnnatggatttgcgcagcttcaagctggtggatcagctcagtggccgcaccctggcgctgcgcgccgacatcacgccgcaagccgcgcgtatggatgcgcatttgctgaaccgccaaggtctgacgcgcctgtgctatgccggtagcgtgctgcacacccagccggtgggcctgacccgcacccgcgaattgctgcaactgggtgcggagctgtacggctgtcccggcttgcaaggcgacatcgaaatccagcaactgctgctgcaatccttggcgctgttggggattgaaaacgtccatctggacttggggcatgttggcgtgttccgtgcgctggtggcggatttggacagcgaacgcgaaacnnnnnnnnnnnnnnnnnnnnnnnnnnnnnnnnnnnnnnnnnnnnnnnnnnnnnnnnnnnnnnnnnnnnnnnnnnnnnnnnnnnnnnnnnnnnnnnnnnnnnnnnnnnnnnnnnnnnnnnnnnnnnnnnnnnnnnnnnnnnnnnnnnnnnnnnnnnnnnnnnnnnnnnnnnnnnnnnnnnnnnnnnnnnnnnnnnnnnnnnnnnnnnnnnnnnnnnnnnnnnnnnnnnnnnnnnnnnnnnnnnnnnnnnnnnnnnnnnnnnnnnnnnnnnnnnnnnnnnnnnnnnnnnnnnnnnnnnnnnnngatttggccgagccagtgcgcaacgccctgctggccctgcccaccttgtacggcgaagtcgccgacgtgctggcccgcgcccgtcaggttttgccggccaattccgccattacccaagcgctggacgagctgtccaccgtcgcagcgcagttgaacgtcgccagtctgggcatcgacctggctgatttgcgcggctaccactatcacagcggcatggtatttgccgcctatcaccccggcagccacgacgcaattgccctgggcggtcgctacgacgaactgggcaagagctttggccgcgcccgcgccgccaccggcttcagcatggatttgcgtcagttgtaccgcttgttgcccggtcaaagcctgcccgccggaattttggccccacaccgtgacgatgcggccttgcaggctaaaatcgccgcgctgcgcgccgccggtgacatcgtggtggtcgatttactgaatgatacaacgcaccatgccgaactgaattgcgaccgccaactgctgttgcaggacggggtctggcaagttgcaaaacgctaaccaattgaataaacagaatttaggacgaacagtcatggcaaaaaacgtagtggtaatcggcacacagtggggtgacgaaggcaagggcaaaatcgtggattggctgaccgatcacgcccgtggcgtggtgcgctttcagggcggtcacaacgccgggcacactttggtgattggcggcaaaaaaaccgtgttgcacttgattccgtccggcattctgcgcgatggcgtgcaatgctacatcggcaacggcgtggtgctgtcgcccaccgcgctgctgaaggaaatggatcaactgcaagccgctggcatcgacgtgtatagccgcttgaaggtttctgaagcctgcccgttgattctgccctaccacgaagccattgataaggcccgcgaaattgcccgtggcgcagccaaaatcggcaccaccggtcgcggcattggcccggcttacgaagacaaggtatcgcgccgcgccattcgcttgcaggatattttctacccagaacgttttgccgaaaaactgcgcgaggtactggattatcacaacttcgtgttgcaacactatttcaagactgacacggtggattaccaaaccgtgtatgagcaaactttggcgctgggcgagcgcatcaagccgctagtggtggacgtgccgcgtgccttgtacgaagccggtcaagccgggcaacatttgttgtttgaaggtgcgcaaggcgcgctgctggacatcgaccacggcacttatccttacgtgacctccagcaactgcgtggccggtgccgccgcccccggtgcgggcgttggcccgcaagcgctggattacgtgctgggcattaccaaggcctacaccacccgcgttggctccggccccttccccactgagctgtacgatgccgtcgaaaaaaacgacccgattggtgcaggcttggcgcaacgcggccacgaattcggctccaccaccggtcgcgcccgtcgctgcggctggttcgacgccgccgccttgaagcgctcgattcaaatcaacggcgtatccggcctgtgcatcaccaagctggacgtgatggacggcatggacgtggtgcgcctgggcgtgggttatcgcttgaacggccaggattgcgacatcctgccggtcggcgcggacatgctggcgcaatgcgagccgatttacgaagaaatgcccggctggagcgactccaccgtcggcgtaaaaaactacgcagacctgcccgccaacgcccgcgcctacctggagcgcatcgccgaagtgtgccgcgtgccgattgccatggtctccaccggccccgaccgcgacgaaaccatcgtgctgcaacaccccttcaacagctaagaagatggactatctgttcttcgacccagagctacaagcccgcttcactcgccgtctggccgacaacgacgtgccctggcaagaggaagcggacaaaatggtcggcaccatcgtccgcattgccgacgatctggacgaagaactgagcgatgagttggaagacttgtacgaccaactgtttgacgaacaagccgtcttggccgccgagcgcgacggctgggtgaacaagcgcctggctggggtgcaagccttcttgccggatggacgcgaaatcaccgtcgccctaccgccagaccttgccaaccgcctgctgacccactttcaggtcgaagaaatcgccgccatcgtcaacgccgtcgccaatagcctgcaacaggactacaacggcccgctatgcaagcatccgctgggtgattctgacttttctgatagatacatctccgcgcattctaacttttcataggcagactagacatgaacgacacggtgtacgaaaacatcctgattggaaattttttatattttcttggctatcaatcgtgtctaatccatcatcaaaataaacaggaaaaacctgaaaaagtatccgcaaactcggcgcagaaaactccagcgaaggatgtccaccgtgccataaacctttttcagcaaactccaacggatcgtctactaggggatgttcatcttaattttggtggtcgaaacctgttgattgaattcaaagccttcaataacgaatctgacacaaaggagaataacaaacgagaatcacttattgacaaaataaaacagttagagccgaatgaaagaaaggacatgctgtctttctctcataagtgccactacttgggctaccagagtgatcctgaaagattcacattggattttgttaaatatgtcgacctacagtcaaaatttccgccgtgtgaaatgttaagtttctcaaataaaattctcactgataacgacacgggcgtggagcgagataattttaaaagatacctcgaaattcttaaggcggccttagtcaagagcggaagatccttcagtacggctggaatacatataaatatcagtgacgacgaccaatttacattcacgatatgttccagcattgaggaactagtggatgcaatctctgatgccctagaaaacactttaacagccgccccgcaaggataataaaagtgattcctcttctgatagttgacgtgcaacggggttttattaacgaacacacggctcacatccctaaactggttgaacgactacagcacgaatatgaatacgtgtttgccacccaattttacaacgaaactccctctaattaccggcgtcttctcaactggcatcgcttctcagaaaacagtgatgatctggaattcgcattcaatctcaaagagggcgttcagataataaaaaaatcgatatacacctgcgtttctccctcgtttttgtttcaactagaagagttaaatgctcgtgaagttcacattgtcggaatagatacagacatctgcgtcacgaaatctgctgtcgatttgtttgaggtaggaaaaacacctgttgtgttgggaggatattgcgcaagccacgccggcaacgacatacatttagccgccttgagaattctcgaaagatacattggaataaatcaagtaaaaggatattgacttgccactaattcgtgtctcattgattccagtcgaattttttgaagtatcaatccgagaaaaatttgaacactcacttaaacaagatgctcaattcaaatcgagtggggagggttcttttcaaataacctttaaagagttatgcgacttttcacctagcgttttgaaagctcaaggaaatggtgagaacaccctagtcacatttcatggctcctcagcctgttttgtgaaaatcactgaatacaaaaattggacgccgacacttgaatccgtgcttacggagctaaaaacacgcggaaatttacatagggagtacatcagttcaaaaacacttctaggtgtacccttacacgacatattggcacaagaaatagccacaaaaacttatgaaatagtgccgcactacgtgttttcctactatatctatcgcccacaatcggaaccgaccctagaagacatcaactacttaaaactattagcagaaccatccttggttgatcttgatgacatgctgtccgccaagaattacgacgaatcaacagtagttgattttcctgctgacaaggtaagcgccattcttcgaagcatgacggattgtgacatagccccagacgtatctacctacgtaacatgggcatctattctttgcatcgacaaaagcacagacaatcgctgttccaaaacattcgatattctcctcgctctagaaacgagattgcagatggtatggaatcgttgctactcattcagcaacttgggggatgctgtacttgcacaaaatatgaagctgaaaattgatgtcggcaaattttactgggaactagcacgcacttttgacgatgcacaaggaattcttgctgcgacgtcctcatccagagcgaataaaatgtttgaggtcatgcttcaaacttctgccctcgaacgcgaaatagcacgtttacaagggaaggtgaacttgttggatcggtatattgcatggcgaaatgagcaaaaagattctcgctatcgaaaaatggtggagatacttttattttttgcggcgctcagtcaattagtcccaattttcttcgcgctaccgattatccataatgaaatagctggatatgccaccataagtttacttttggtggcaggcttgctggccatcttgcttcgcaaggcttaacgaccatgcaattaacggtaacaccacgccccatgtccgacacccattggctcatgccgcccaaccccgccaaggcgctgatgttggcaaagcgccaactgggcgttctggtgtgcgatgcggtcaatctggaaggcatccccatgaccttgccagaggtgcaaaccttgctggaaggcattactgtcggcgggcacaaactctccgaccagcaaattgccgtcaatcaagggcaggcttggcggcaattgtttgactggctggcgcagggaaatttttccctgtctgctgcctccgcctgtgccctgcatgccgtggcgggcaaggaggaagccttaacctggggacagtttcgcagtggcggcgtgctgattgccgggacggatttcatcccgccgccagtggcggaattacccagccgctatgccgccatgctggccgatttagcgcatctgcccgacatttatgaccaggccattcacatttttctgaccatggcgcgctgccagtttttttacgacgtcaacaagcgcatgggacgtttcatgatgaacggccacctgttgcagcacggctatccggtcatcaacctgcccgccaaacgccaactggaattcaacacccggatgctggatttttatgcgtctggagacgaacgcgccatgaacgcctttctgcgttcttgtctggaacccggcgttatcgccatcatgcgggaagagggctaatcccgcccccgtttaatccgcgctgcggcgcgactggaaaaagaatcatgcaattctccctactgcacacctctggcctcgcccggcgcggcacgttgaccttggcccacggcacggtcgaaaccccggcctttatgcccgtcggcacttacggcacggtcaaggccatgtcgccacaggaaatccgcgacatcgaggcgcacattgtgctgggcaacacctttcacttgtggctgcgccccggattggacgtgattgccgcacacggcgggctgcaccgttttatgggctgggacggcccgatcctcaccgactccggcggttttcaggtcttcagcctgggcgcgctgcgcaaaatcaccgaagaaggcgtgcgctttcagtcgccggtgaatggcgacaaactgatgctgacgccggaagaatccatgcgcatccagcgcgtgctgaattccgacatcgtgatgattttcgatgaatgcacgccctaccccgccaccgagcgcgaagcagcggaatccatgcgcctgtcactgcgctgggcggcccgctccaaagccgcgcatggcgacaatcccaacgccctgttcggcatcgtgcaaggcggcatgtatgagcatctgcgcgatgaatccttggctggtctgaccaacatcgcctttgacggctacgccatcggcggcctttcggtgggcgagcccaaggaagacatgctgcgcatcctgcaacacaccgcgcccaagttgccgcaagacaaaccgcgctacctgatgggcgttggcaccccggaagacatcgtggccgccgtcagccaaggcatcgacatgttcgactgcgtcatgcccacccgcaacgcccgtaacggctggctgttcacccagcacggcgacatcaaaatccgcaacgccagccataaggccgacacccgcccgctggacgccgattgcagttgctacacctgccgcaatttcagccgcagctatttgcaccacctgcaaaaagtcaacgaaatcctcggtgcccgcctcaacaccatccacaacctgcactactaccaacaactcatgcaaggcatccgcgccgcgattgaagctgggcgctttgccgaatttgcgacggaattccacgccaaacgcggcacccagccagcctaagaacctactccaagccacccaaaaacaaagcgccgcatatagcggcgctttcatttggtgcatctttcagcttgttagcgttcagagcacaaatcccaatctggtggtggcgcggatcgtaacgattcacgccgattacgtcaagcattcgtactagaatggcggccttgccaatcaatgggagaaatcatgccacctaagatgccataccggcttgcgctggatttgggaaccacttcactgggctgggccttgctccgtctgaatgccaaccaagcaccctgcgcggtgattaaggccggttcaagaattttctcggatggtcgccatcccaaaaccggcacctcgctggccgtggcccgtcgagaagcccgtgccatgcgccgccgccgcgaccgtttgctgaaacgcaaggcccgcatgctgcgggctttgttgcaatatggctttttcccggccaaggtggaagaacgcaaagcactggaaatcctcaacccatatgccttgcgcgccaaaggactggacgagcaactaaccccggcagaatttgcccgcgccctgttccacatcaaccagcgacgcggcttcaaaagcaaccgcaaaactgaccagaaagaagccgacagtggcgcgctgaaatccgcaattcaaaaagtgcgtgaacaaattgacgcggaagattgccgcaccgtgggtgaatggctgcacaagcgtgataaacgcgaccaacactaccagcgcaacgaggccaacaccaccagcttgccggtacgcgcccgctatcacgctgataaagtcgttggcgaaaacggcaaaagcaagctcaacaagtattacgacctgtatatcgaccgcgccatgattgagcaagagtttgacgcactgtggcaaaaacaggccgaattcaatcccgccgtatttaccaacgcggggcgggttgaactgaaagatgtcctgttgcaccagcgcaaactcaagcccgtcaagccgggacgctgcacctttctgccggatgaagaacgtgcacccttggccttgcccagcgtgcaaggcttccggatttatcaggaagtgaacaacctgcgcatcctggatgcggatttgcaggacacgccgttaaacctcacgcaacgcgatcaggtcatcgctgcactggaaaagagcgccaagcaaacctttacccagcttcgcaagttgctgcgcctgagcggcagcagcacattcaatctggaagataaaaaacgctcggagttaaaaggcaacaccaccagcgccgtgctgtccaaggccgaacattttggcaagcagtggtttgaatttgaggccgaattacaggatgaaattgtctggcaattactatcggttgaaagtgaaacgcaactcatcgactggttgcaaacgcacactggcatcgacgaagagcgtgccgaaaaaattgccaatgtcggcttggccgagggctatggtagtctgtcccgcaaggccttggcgttgattttgccggagttgcgccgggaggtggtgacgtatgacaaggccgccaaagcagcgggcttccatcatagtcaatttgagcatggcgaagtagaagggtgcacctttgcagttgaacgcgttttgaccgaaaccggcgaaatcaaaacccttcacctgcatcacaaactgccctattacggcgagttcttacaaggtcatgtcggcttcggcacgggcaatcccgaagatacccccgaaaaacgctacggcaaaatcgccaaccccacggtgcatatcgggctgaatcaggtgcgactggtggtcaatgccctgatccggcgctacggccaccccagcgaagtgattgtcgaagtcgcccgcgaattgaaacaaagcaagcaacagcgcgacgaaacacaaaaacgccaggcggacaatcaagcgcgcaataaacgattgcgcgaattggctgctggtattctggacattgccccggaacgggtaaaacgtgacgacattgaaaaattgattttgtgggaggaacttaaccccggcaacgccgctgaccgccgctgcccctattctggtgcacaaatcagccaggccatgctgttgagtaacgccgtggaaatcgagcatatcctgcctttcgcccgcaccctggacgacagtttgaacaacaaaaccgtgtccatgcgccaggccaaccgcatcaagggtaaccgcacaccgtgggaagcgcggcaggattttgccgcccaaggctggttgtacgaggagattctggagcgtgccgccaatatgccacgcgccaaacgggagcgctttgccgaaggcggctatgaaaaatggctgaaagaggataaggattttctggctcgcgccttgaatgacacccgccatctgagccgggtagcatttgaatacctcaaactggtcagtcctaatgtgcgcgtcattcccggccagatgaccgccatgctgcgcgccaaatttggcctgaatgacattctgggactgagtggcgagaagaatcgcaacgaccaccgccaccacgccgtggatgcctgcgtaattggcgtcaccgaccagggcatgttgcagcgctttgcccgtgccaatgccagcgcacgggaacgccaattgtcacggctggtggacaatatgccactcccttgggacagctacccacagcacgtccagcgcgccattgacgccatttgggtcagccacaaaccggatcacagccatgaaggaggcatgcacaatgacacggcctatgggctgcaagacaatggcaatgtgcatttccacaagattcaggatggcaagcgagtacggattgaggagtctttgcaagtgatttccttcacctccccccacccgcgtcatggccaactgcccaatggcgaccccaaaccctataaaggctacaagggcgacagcaactattgcatcgaaattgtgcgcaatgaaaagggcaaatggcagggcgaggtgatttccactttccaggcctatcaagtcatccgccagcatggtgaagaaaaaggcaaagccttgctgcgctcacctacgcaaagcttgtcgggtaagccgttggtgatgcggttgctgcggaatgatattgttcgacttgtgaatgaacaacaagccatcacagcacgtgtttgttggataagaagtgacacgcgtattgcatttgcacctgttcatgaagccaatgtagatgcacgagatcggagcaaagatgatccattcagctatttgattaagaacgccagcgtacttcaaaaactaaatgcccgccgcatcaccatctcctccattggtgaattgcgcgaccccggtttcaaggcttaaatcatgctggggcgcatcgtggaaattgccgaagatcagcgccacttgtccgccgagcgcggcttcatgctggtgaccaatctccagcacaccattctgggccgcattccgctggacgatattgccgccgtgattgtgcaagcgcacggggccagctacagcaacaatctgctggtcgccctggcgcaacgcggcgcgccgctagtactgtgtgccgccaaccacaatgtggtcggcatgttgatcagcgtggatggcaattttcagcaggccaaacgctttgatgcccaaattgccgccacccagcctcgcatgaaacggctgtgggcggagttggtcaaggccaagttgcaacaacaagccagcgcattggaggcagtgggcgcgccgtcagtaccgctgtctgccctggttaccaaggtacgctccggcgacccggataatgtggaagcccaaggagcgcgacgctattggggactgttatttggcgacaccttccgccgcaacagcgatggcgacggcctcaatgccttgctgaactacggctacaccgtgttgcgtgccgccacggcacgggcagtggtggctgccgggctgcaccccacgctggggctgcatcacagcaacgcgggcaacgctatgcgcctagtggatgatttgatggagcccttccgcccgctggtggatttgaaagtctggcacttgcaacgacaagggcaatgtgaagtcacccccgacaccaagcgggcactggtacgcaccctgtatgacgacatgcaaaccagtctgggtgccaccccggtgatggtctgcctgcaacgcctggcggtctcgctagtgcaggtctttttgggggagcgagacaagctggacttacccctgccgggtctgccgctggatttggcggctgatctcacctgagccgcgcatgctctccgggtaccgtctgatgtggataatcgtcatgtttgatttacccgtggtcgaggccaaagagcgcaaagccgccaccgcatttcgcaacgccttgctggatatgggtttccaaatggcacagttttcggtatatatgcgcgcctgcaccagccagacccaggtcgatacctactgcggtcaagttgccaagaccttgcccagtggcggcagcgtcagcatcctgcaattcaccgacaaacagtacgaacgcatcatcacctattacggaaaaagcaaacaaccgcctaaaaaagcgcccgaccaatacgaccttttctgaattatccgcatgatttcaaccaccaaaaacacaacaaccacctgccgaaacaagtggttgctgtgttggtagtttaccagattgggatttgtgctctgaccggaacatcatctacgccgatttcatcgatcacataagtttaccagattgggatttgtgctctgaccggaaccggtgaagctggcggtcgatgactacttgaagtttaccagattgggatttgtgctctgaccggaactggccactggtaatcagccatgagcatcttagtttaccagattgggatttgtgctctgaccggaacactggcactggcaccaacaaccaaaacggcagtttaccagattgggatttgtgctctgaccggaactcgccattcaacattcagcacacttatgaaagtttaccagattgggatttgtgctctgaccggaactagcttcgatgtccatcacgccctggatgaagtttaccagattgggatttgtgctctgaccggaacgcaggatgacagcgccaaactgatgcgcttcagtttaccagattgggatttgnnnnnnnnnnnnnnnnnnnnnnnnnnnnnnnnnnnnnnnnnnnnnnnnnnnnnnnnnnnnnnnnnnnnnnnnnnnnnnnnnnnnnnnnnnnnnnnnnnnnnnnnnnnnnnnnnnnnnnnnnnnnnnnnnnnnnnnnnnnnnnnnnnnnnnnnnnnnnnnnnnnnnnnnnnnnnnnnnnnnnnnnnnnnnnnnnnnnnnnnnnnnnnnnnnnnnnnnnnnnnnnnnnnnnnnnnnnnnnnnnnnnnnnnnnnnnnnnnnnnnnnnnnnnnnnnnnnnnnatttgtgctctgaccggaactccgcgctggtgttcggtgcggattggtcgagtttaccagattgggatttgtgctctgaccggaactcgctctatgacattaacgctcacgacaacagtttaccagattgggatttgnnnnnnnnnnnnnnnnnnnnnnnnnnnnnnnnnnnnnnnnnnnnnnnnnnnnnnnnnnnnnnnnnnnnnnnnnnnnnnnnnnnnnnnnnnnnnnnnnnnnnnnnnnnnnnnnnnnnnnnnnnnnnnnnnnnnnnnnnnnnnnnnnnnnnnnnnnnnnnnnnnnnnnnnnnnnnnnnnnnnnnnnnnnnnnnnnnnnnnnnnnnnnnnnnnnnnnnnnnnnnnnnnnnnnnnnnnnnnnnnnttaccagattgggatttgtgctctgaccggaactggccggggcaaatggctctctacgcggatagtttaccagattgggatttgtgctctgaccggaacattttgcccagcgggttgtcgaaaactgacagtttaccagattgggatttgnnnnnnnnnnnnnnnnnnnnnnnnnnnnnnnnnnnnnnnnnnnnnnnnnnnnnnnnnnnnnnnnnnnnnnnnnnnnnnnnnnnnnnnnnnnnnnnnnnnnnnnnnnnnnnnnnnnnnnnnnnnnnnnnnnnnnnnnnnnnnnnnnnnnnnnnnnnnnnnnnnnnnnnnnnnnnnnnnnnnnnnnnnnnnnnnnnnnnnnnnnnnnnnnnnnnnnnnnnnnnnnnnnnnnnnnnnnnnngatttgtgctctgaccggaacggctttgcgcacatagtccagggtgcggatagtttaccagattgggatttgtgctctgaccggaacctggcgcacctgttcgcccctcgtaccctcagtttaccagattgggatttgtgctctgaccggaactctttgtatgatattaacgtgcacgataaagtttaccagattgggatttgtgctctgaccggaaccggaggcttgttgtacttggtgatggaaaaagtttaccagattgggatttgtgctctgaccggaacatacaaggcgtaggtgtagcatccggtgttagtttaccagattgggatttgtgctctgaccggaacatcgcaatcgtcgcggtcatcgtcggcaagagtttaccagattgggatttgtgctctgaccggaaccaaaaggcggatgcggaggtgcgcgccctgagtttaccagattgggatttgtgctctgaccggaactacgctcgtggcaccttcgcctcgcggtcaagtttaccagattgggatttgtgctctgaccggaacacccaccgcactgtgtgaagagccacctcaagtttaccagattgggatttgtgctctgaccggaacctcgattaagtcctgaaccatgttcgcgtcagtttaccagattgggatttgtgctctgaccggaactgtggcgctacatcaaagagggacattttagtttaccagattgggatttgtgctctgaccggaacgtggggacgtagtacaggaaagcgtcggtgagtttaccagattgggatttgtgctctgaccggaactgcaggacaatggcaagcaaaacaaggggcagtttaccagattgggatttgtgctctgaccggaacataacggcttgtaatgcaggggttgctgccagtttaccagattgggatttgtgctctgaccggaacagtcgcgtaccgtctgtggatcaactccctagtttaccagattgggatttgtgctctgaccggaacctgttcggggtgtgggaatcgcagtaccgagtttaccagattgggatttgtgctctgaccggaacttatcaaacacctcaaacttttctgacgatagtttaccagattgggatttgtgctctgaccggaactcagcaattgcacggtgttcgttcaacgtaagtttaccagattgggatttgtgctctgaccggaacattgaagcggcaaaggattctgctcaaaaaagtttaccagattgggatttgtgctctgaccggaacgtgcgcgacgaactcaattccgcaatcggcagtttaccagattgggatt

SEQ ID NO: 1856 - DNA, 17142 bp, synthetic construct
  source 1..17142: mol_type = other DNA
  misc_feature 1..17142: note = Synthetic
ggcatgcgggcctgacgcccagccgtcacggagccttcacggagccgaggccgcgcagcagccggggccgctcaggccgccttgtcctgcccgccgccctggcgcttggccgccagggtctggcgcgtgcgctcgttgatgaagcgcagctccgtcagcgaggcctcgatctgggcgcgcttggcttcgagctcggcgatggccgcgtccgtcttctcgatcacccaggtcagctgctggatgcggccttcaccgtgctggccgtacatgtccaggtagtgcttgatctcggccagcggcgtgcccagcgacttggcgcgcaggatgcgcatcaggcgggcgcggtcgatctggctgtagacgcgggtgccgttgatgcggcgcggcgccagcaggcccttggtctcgtagaagcgcaaggcgcgcggcgagaccttgtagcgctcgcagacctcggcgatgcccatgatggcgtcggtgtcgcggtcatcgtggtcttccagggcccaagacggcggcacgccgtcacctgcggcttcaccgatggattgttctggcttggatttcacggagcgccccactgctttgacctggctgattcgctggaagtgccgatggtacgacaagcacgacaccgcgctgccgcccaccgtcaccggttgacccgcaagaggttaagggaagcccctgcactgcgacataggtagctcacctcataggcatgcagatcacgcgcacgtcacccaccggctcaagccgggctcggcgttgtgcgctgcgtcacacgcaggcatgccccatggcggcctcaggcacgtaagatcgcctcatggatcctgccctgaattccgagctggctgcagaactcgccgatctgcgcgagcaggtcgcgcgctaccgggcggccttcgcgctttcagcgcccggccaggccatgctcgacctcggcggccgcttcatcgaggtcaacaccagcctgtgccacttcctgggccacagcgagcacgacctgctcaagctgcgcttcctggacatcacccaccccgacgacctcgccctcgacgcccagtgcgtggccgacatgaaggccggcaccgtggcccagttccgccgcgaaacgcgctacctgcgcgccgacggcagcaccgtgtgggccctggtcacctcccggctggcgcgcgacgagaacggccagccgctctacttcgtcagcgtcatcgaggacatcaccgagcgcaaggcttccgagctggcgctgcgcgagcgagaggccctgctcagcagcatgggcaagttcgtgcccggcctcatccacaagatcggcttcgacgccgatggccgcgcgcgcttcctctacatcagcgaccgggccatggagatgttcgagctgccacacgagctgatggagcgcgactaccacgctcaccacgcgcgggtgcaccccgatgacctggcctacgtcaggcgactggccaccgcgcccaagcccggcgccctgctgcgcccggtggacttcgagtaccgcgtgatcctgcccagcaaggggctgcgcgtgtacggtggccacgccatcccggtcacggaagaagacggcagcgtggtctggtacggccacaccgccgacgtcaccgacaagaaggcgctgctgaaggcacgcatggccgcacaggtcgcgcaggacgccaacctggccaagaacgagttcctctcgcgcgtgagccacgagctgcgcacgccgctgaacgccgtgatcggctttgcgcagttgctgcggctgagctcgtccggccacctcaatgccacgcagcgccagcacgtcgagcacatcgagagcgcgggctcgcacctgctgggcatcatcagcgatgtgctcgacctctcgcgcatcgaggcaggcaacctgccgttgtcgctcgagccttgccgggcgtccgtgctgctcaacgaggcctgccacctggtcgcgccgctcgcccggggcagcggcatcaccttgcacgccgccacggtcgatgaccacaccctgatccaggtcgaccccatgcgcttgcgccaggtgctggtcaacctcatgagcaacgcggtgaagtacaaccggccccagggccacgtcacactgcgcgtctgggccgagggcgatcagctcgccatcgcgatcgacgacaccggtgtggggctgagcgtcgagcagcaggcgcacctgttcgagcccttcaaccgactgggggccgagcgcacaggcgtggagggcaccggcatcggcttggtgatcgtgcgcaagctgctcgaagcgatgcaagggcggctggaggtgcgcagccagcccggacagggctccagcttcatcgcgtgggtgcccaaggcgcaagccacgtccaccgcggcaagccccgccaccgattcgggccacctcgtcgcgcgtgaggccggtggcaacgagctgcgcgtgctctacgccgaggacaacgacctcaacgccgagctggtgctggaggtgctcaagctgcgcccgggctgcctggtgcgcgtggccaccagcggtgccgaagccgtggccatggcgcgcgagcaggtgcccgacctgttcctgctggacatgcacctgggcgacatgagcggcttcgagctggcccgccagctgcaggccgaacccacgctgcaaggtgtgccccgggtggcgttttcggccgatgccatgcccgaccagatccaccgcgcgcgcgaccacggcttctcgggctacctgaccaagccactggacgtggccgccttgctggcctgcgtggacgagcacaccgagcgcgtgcgcagcctgcgacaagctaggtagttcacccaagcaggatttggttgacgttaacgtcaaccacgcatacattggcggtgactcatcacggatcaccctcaagatgcccgccctgcgctccgccctcaacccgcagtccgacgccttccaaagcaacaccgcccgcatgcaggagcggctggatcaggtccgcgccctcgaatcccaggtgcgcgaaggctcggcctccaagcgcgacaagttcgaaaaacgcggccagctgctgccgcgcgaacgcgtcgcccgcctgatcgaccgcggcacgcccttcctggagctgtcgatgctcgccggcctgggcatgcacgacgacgatggcaagaagagcgtgctgggcggcggcaccatcatcggcatcggcgtggtggccggcaagcgctgcctggtcaccgcctctgactcggcgctcaagggcggcaccatctcgcccatgggcctgaaaaagggcctgcgcgcacaagagatcgcccgcgagaacaagctgcccctgatcggactggtcgagtccggcggcgccaacctcatgtaccaggccgagatcttcgtggacggcggcaagagcttcgccaaccaggcgcggctgagtgccatgggcatcccgcagatcgccgtggtgcatggctcgtccacggccggcggcgcttacctgcccggcctgtcggactacgtggtgctggtcaagggccgctcgagcatctacctggccggcccgccgctggtcaaggccgccatcggtgaagacgccaccgacgaagacctgggcggcgccgagatgcacgccagcgtgaccggcctgggcgagtacctggccgacaacgacgcccacgccatcgcactcacccgcgacctgctcgacaaactgcagtgggatgccgtgcgcgagcaacccaccgtgcccgccccgctgtacgacgagcaggagctgctgggctgcatccccgccgacgaccgcgagcccttcgacacccgcgaggtcatcgcccgcatcgtcgacggctccgacttcctggagttcaaggccaactacggcagcgagacgctgtgcggccacgcccgcatcaacggccacctggtcggcatcctgggcaacaacggccccatccagccgcagggctcgaccaaggcggcgcagttcatccagctgtgcgaccaatccggcacgccgctggtcttcctgcaaaacaccacgggctacatggtgggctcggcggccgaacacggcggcgccatcaaacacggctccaagatgatccaggccgtggccaacgcgcgggtgcccaagttcaccatcgtgctcaacggctcgttcggcgccggcaactacggcatgtgcggccgcggcttcgacccgcgcttcatcttcagctggccgtctgcccgcgtggccgtgatgggtggcgcgcaagccgccaaggtgatggagatcgtcacgcgcggcaagatggaacgcgccggcatgcccgtcaacgacgcgatgctcgaaggcatgtcggccgagatcaagaagcgcctggacgccgagagcaacgtgctgttcgggactgcccgcctgtgggacgacggcgtgatcgacccgcgcgacacccgccgcgtgctctcgctgtgcctggacctggcacgcgacgccgaccagcgccagctgcgcggcaacaccttcggcgtggcccgcttctgagccgcccgccccgccccttctgcaccgattcactggccatcccgccaccacgaccaggcgccccccacaccacagagcgccatcctgcagacccgaggagaacccgcatgcaattcaccgccgaacaccgcgccctggccgaaaccgtcaagcgcttctgcgaacaagagatcaacccccacgtcaaggaatgggaggccgccgagatcttcccggcccacgaggtgttcaagaagatgggcaagctgggcctgctgggcgtcaagtacgacaccgcctacggcggcatgggcctggacttctcctactcgatggtggtggccgaagaactgggcgccatcccctgtggcggcgtgcccatggccattggcgtgcagaccgacatgtgcacccccgccctgcaccgcttcggctccgatgagctgaagaaggaatacctggcaccggcgattgccggcgacatggtgggctgcatcggcgtgagcgaagccggcggtggatccgacgtggccgcgctgaagaccacggcccgcaccgaaggcgacgactacgtcatcaacggcagcaagatgtggatcaccaacgccacgcaggccgactggtgctgcctgctggccaacacctccgaaggcccggtgcacagcaacaagtcgctgatcatcgtgccgatggacgccaagggcatcaccacgcagaagatcaagaagatcggcatgaactcgtcggacacggcgcagatcttcttcgacaacgtgcgcgtgccccgccgcaacctgatcggcaccgaaggcgcgggcttcatgatgcagatgatccagttccaggaagagcgcctgtacggtgcggccaactccctgaagatgctggacaagctgatcgacctgaccatcgagtactgcaaggagcgccacaccttcggctcgcccttgatcaacaaccaggtcatccacttccgcctggccgagctgcgcaccgaggtcgagctgctgcgctcgctgacctaccgtgcagttgacgagtacgtgcaaggcaaggacgtcaccaagctggcctcgatggccaagctcaagtgcggccgcctgatccgcgaggtggccgacagctgcctgcagtactggggcggcatgggcttcacctacgacaaccccgtctcgcaggcttatcgcgacggccgcctggtctcgatcggcggtggcgccgacgaaatcatgctcgggatcatctgcaagttcgaaggcaccctgcccaagaaggcgcgctgagccccaccccaaggccccgtcagagggccctcccccttcacgacgctgtcaccttcaaccgaccgcctccatgtcctacaccaccatccaggtccagaccacgcaaggcgtctgcaccctcacgctcaaccgccccgaggtgcgcaacgccatgtcgctggccatggtcagcgagctgctggccgcgctcaaggccgctgaacaggaccccagcgtgcgcgcggtggtggtgcggggcagcggcggtcacttctgcgcgggcggcgacatctccgacatggcccaggcgcgcatgaagctggcgcagatgcaggccgcacccgatccggtcgaaggcctgaacccggtggcagaaaccaacgctgccttcggccgcctgtgcctggcctacgctcgctctcccctgcccatcgtcacggtgctcgaaggcacggtgatgggcggtggcttcggcctggcctgcgtgtccgacgtcagcctggcgctggacaccgtggccttccgcctgcccgagacctcgctgggcatcatccccgcgcagatcgcgcccttcctggtcgagcgactgggttacgccgaggccaagcgcctgtcggtcaccggcgcgaaggtcaacgccgccgaagcgctgaccttgcgcctggtgcacgaggtgcacggcaacgccgacgagcttgaaggcgcgctgcaacgcacgctcgccagcatcctggcctgcggcccgcaagccatcgccaccaccaagggcctgctggcccgcgcccgcctgaccccgccggaacaactggtggacgacgccgcgcagctgttcgcccaagccgtgctcagcgaagaaggccaggaaggcaccggcgccttcatgcaaaagcgcaaacccaagtgggttccccaacaaggctgatcacaccatgatcaaaaagatcctcattgcgaaccgtggcgacaaggccgcaggccttgcggcgaagccaaattgcatgcgcacgcgaagcgggctgcaggcgatttccacgcggagaaccgcatgatcaaaaaaatcctcattgccaaccgcggggaaatcgcctgccgcgtcatccgcaccgcccgcaagctcggctaccgcacggtggccgtctacagcgaggccgatgcgcaagcgccgcacgtgtcgctggccgacgaagccgtctgcatcggccccgccgccgcggcgcagtcctacctcaacgtgggagccttgctggccgcttgccgcaagaccggcgccaacgcgctgcaccccggctacggcttcctgtcggagaacgccgacttcgcgcaggcctgcgccgacgcgggcgtgaccttcatcggtccgggccccgaagccatccgcgtgatgggtgacaaggccggtgccaagcgcgccatgatcgaagcgggcgtgccctgcgcgcccggctacctgggcgacaagcaggacgacgccaccctgatcgagcaagccgagcgcatgggctaccccctgctggtcaaggccgtgagcggcggcggcgggcgcggcatgcgcctggtgcacgagaaggccgaactcgcgcaagccatcaccagcgcgcgccgcgaagcgcaaaacgccttcggcgacggcacgctgatgctggagcgcctgatcctcgacggccgccacatcgagatccaggtgttcgccgatgcgcacggcaacgccgtctacattggcgagcgcgactgcacggcccagcgacgccgccagaaggtcatcgaagagtcgccctcgccagtggtcagccccgccatgcgcaagcgcatgggccgcgatgccgtgctggccgcgcaagcgattggctaccgcggcgctggcaccatcgagtacatcgtcgaccaggacctgaaccactacttcctggagatgaacacccgcctgcaggtcgagcacccggtcaccgaaatggtctcgggctttgacctggtcgagtggcagatccgcgtggccgaaggccagccgctgcccgtcaagcaggaagacatccccctgagcggccacgccatcgaggctcgcctgtacgccgaagacccgtacgcgggctttgcgccgcagaccggtccggtgcagtggtggcgccctgcgcaagcgctgtatgagggcgtgcgcatcgacgacggcatccgcgaaggcggcgaggtcaccccgcactacgacccgatggtggccaagctcatcgtgcacggccgcgaccgcgccgacgccatccgccgcctgatggccacgctggacgatgcgccgctgctgggcctgaagcacaacgcccgcttcctgcgcgacctggtcgaccacccgcgcttccgcaccggcagcatgacgaccacgctgatcgaccagtggcagaccgatggcgcccccatcctgcaagccccggtggcctcggacgaggcctggctgatcgcgggtgccctgttcggtgcgcgccagcaaggcacggcccacctgctgcgcgccgacagcgtcagcgcctgggacctgcccctgcaacaagacagcgtcaagcgcacgctgcgcgtgagcgctgcctcaggcggcctctacaacgtggcgatgaacccgcaagccgcccccgtcgccgtgaagctgctgagcgaagacgccacgcgcggcgaagcccgcatcgaactcgacggcgtgcaacgccgcgtgcgcgccgtgtggctgggcgactccctgaacctcgtcatcgaggcggccgtcttcaccttcgccgaggtctcggcctggccggacgcgggcaacgccctcgaccccagccgcgccctggcccccgtggccggcaccgtcacacaggtgctggtgcaggcgggtgacgccgtcaccgaaggccagccgctgttggccatcgaggccatgaagatggaaatgtggctcaacgcccaggcgccgggcgtgatcaaagctgtgtacgcgaaagcgggcgaccaggtgcaggccaaggccctgctgatcgacatcgaactcaacaaggaagactgacatggacaaggccatcctgacctgcgcgctcaccggcgtgctcaccgacccggcgcagcaccccgtgcccgtgctgcctaaggaaatggccgccgccgcgcgcgaggcctatgacgcgggcgcgtcgatcatgcacgtgcacctgcgcaggcaagagcccggcatgggtcgcttccccagctgggacccagacgtcgctggcgagatcgacaccgccatccgcgaagcctgtccgggcgtcatcatcaacctgaccaccggcgtggtcggccccgacatcagcggcccctctgcctgcatccgcgccgtgcgccccgaaatcgccgcctgcaacgccggcagcctgaactacctcaagatcaaggacaacggccagtgggcctggccgcccatgctgttcgacaacacggtcgacaaggtcaaggccatgatcgaggtgatgaacgagagcggcacgcgccccgagttcgaatgcttcgacgtgggcatcgtgcgctcggtgggcatgtaccagaaggccggcatggccgagcacctggagtacaacttcgtgatgggcgtggcctcgggcatgccggccgacgccgagctgctcaagctgttggtcaagtaccgcgagccgaacaccatctggcagaccacgctgatcggccgcgaagagatctgggccgtgcaccaggccaccgccgacctgggcggcatgctgcgcaccggcgtggaagacaccttctacctgccggggggtgagaagacatcgggcaacgggcagttgatcgaggcgctggccgcttgcgcgaagcgcgccgggcgcgaggtggcttcgccggttgaggcgcggcagatgctgggcttgcgtgaggccaagttccatggcgtgggggcgttgccgctggcggcttgagcaagcacgaacccaaggcccacaaggcctgctgcagaaagacagaaggccgcatatagcggccttctcatttggtgcatctagctactaaagcatcagcttgttagcgtccagaacacatatcccgatgatcaatgtggcgaatgctagcacgcgcctgacatcaatgtaaacgggatgcggccggccggaacctgaaaccacatgcgctttacagcctcaaatttacacccctgaaaccacggtacggacttgacgattgaaacgagttgcatctaggatgcacctgaataaatgaacatcttcagggaacagcatggccaagatgcgctatcggctcgcactcgatctgggctcaacctcactcggcttcgcgctgcttcgattggacgaagcatccaacccctgcgccatcatcaaggcaggcgtgcgcatcttctccaatggccgcgacccggatggcaactccctcgccgtcacccggcgcatggcgcgggcgatgcgccgacgccgtgatcgcctgctgcgccgcaaggcgcgcatgatgcacctgctcatcgaacacggattctttccgaaagacccagaggcgcgcaaggcactggagacgatcaatccatacgaattgcgagcccgaggactggatgagtccctcacgcctgaagagtttgcccgagctctgttccacctgaaccaaagacgtggctttcagagcaatcgaaaaaccgacaagaaggacaacgacaacagcgcactcaaaagcgccatcaaacgactgcgggatgccttggcagaaggccaaggccgcacggttggcgaactgctgttcaggcgcatgcaaaccggccagaccgtgcgcgcccgctatcgggaaagcaaagcgctcaaacccgacggcaaaaccaagatcgacaagagctacgacctgtacatcgaccgcgccatggcgatcgatgagttcgaagccttgtggagcaaacaagcctcactgaatccagacattttctgtgcggccgcctaccacgaactgaaagagtgcttgaccaagcaacggcccctgctcccggttcgccccggtcgttgcactttcatgcctgaggaagagcgtgccccgctggccctgcccagtacgcaacgctaccgcatgtacctggaggccaaccatctgcgcatactgcgtgaaggcctgcacgaggaagtgctgacactgacacagcgagatgcactggttcaagcgctggagcacaacccaaaacgcacattcgttcagatcaaggccttgcttggtctcaaaggcgccgtgcagttcaacttcgaagaccccaagcgacaagaactcaagggcaacatcacgaatgccatcctcagcaaaccaggtcattttggccaatcttggtttaccttcgatgaggccaagcaagacgatatcgtcagccgcattctcagtgaagaagatgagtctgcactgatcaagtggctcctgcttgaaactggcgtcaatgaagcgcaggccgaagccatcgccaatgttggattgcccgaaggctatggcagcctgagccgcaaggcactggctcgcattgtccccgcgctcaggcaagaggtcatctcctacgacaaagctgtgcaagcggccggattcgagcatcacagtcaactcgatgcgtcagccatcggagagcaacaccccaccctgccctactacggcgaagcactgcagcgacatgtcagcttcggcacactcgacgcaaacgacccggacgagaagcggttcgggaagattgccaacccaacggttcacatcggcctcaatcaggtgcggaccgtggtcaacgacctgatcaaacgctacgggcaccccagccaggtggtggtcgaggttgcccgcgatctcaaacaaagtcggcagcaacgcgaagagaccaacaagcgccaggcagacaaccagaaacgaaacgcacgcatccgccaggaagtcgctgaagcctccaatggcagcatcagcccagaacgagtcaaggtggcggacatccagaaatggatcttgtgggaagaactcaacgagaacgatgtgctcaatcgatgctgcccatactctggcgcacgcatctccgccttggacctgctcagcagcgatggccgggtcgaaatcgaacacatcctgccttacgcacgcacactggacaacagcctcaacaacaagaccgtgtccatgcgctgggccaaccgcatcaaaggcaacaagacgcctgcggaagcattcggtcaaaaccaggttgaaagctgcaactatgaggccatcctcaagcgtgccgaacagatgcccaaaggcaaacggtatcggtttgcgatggatgccatggagcgttgggacaaagagggcaatgggttcctggcccgcgcgctcaacgacacccgatacctgtcacgcatcacccgtgagtacatcagcctgatatgcccgcacgccacccgtgtcatccctggtcagatgaccgcgctgctgcgccaccaattcggactcaacggcatcctggggctgcgcggagaaaagaaccgcaatgatcatcgccatcacgcggtggacgcctgcgtcatcggtgtgaccgatcaaaagaccttgcaagaactgtccaacgccagcaaacgcggtcgcgatcaacacatcatggactgggccgagagcatgccggacccatggcccacttatcgcgaacaggtcaagcgcgccatcaaccacatcctggtcagccacaaacctgaccacagccatgaaggtgcgatgcacaacgacaccgcatacagtctgcttggcaatggtcgcgtgggtgtgcacaaattggtagatggcaaacgaacgctggttgaagacacgttgaaggtcatcgagttcgattacgccaaagccaagcactcaaccaacgagccctggtttgactccgatcacaaccaccgatccggcgcgtacaaaggctacaagggcgacagcaactactgcattgaaatagttagcaacgacaagggcaagtgggaaggcgaagtcatctcaacctttgatgcttaccaactggtgcggaaagagcggaatgctggccgcgatggcgtctcgcgactccgacaccccacattgagcctcagtggtaagcccttggtgatgcgattgatccgggacgactacgtcaagctcgaaacagacgaaggtatgaaactcatgcggcttgccaaattggcggctgatggccgcatgttttgggttgaacacaacgaggcgaatgaaagcgcccgcgcccgcgacaaggaggacgcctttacctacacagtgaagacacctgtcggtcttcagaaagccaaaggtcgccgcgtcaccgtttcgccaattggcgaattgcgcgacccgggcttcaaagggtaagtgcgatggtcggccgcattgtggaagtggccgatgaccgacgccacttgttcgtgtcgcgcggctttctggtcgtgcaagacacagaaggtcagcgaaaggagttggggcaagtaccgctcgatgacatcgcagccgtcatcgccaacgcgcacgggctgagttacacgaacaatctgctggttgccctggcagaacggggcgctccatttgtgctgtgcggatctaaccacaatgccgtcggcatgctgctgagcattgatggcaacttccagcaagcaaagagactggacgcccagattgcagccagcaaacccacgcacaaacgtgtctgggctgacatcgtccgctccaagttgcagcaacaagcggctgcactggaagctgctggtgcgcccaccgcaccgctgactgcactgatcaacaaggtcaagtctggggacaccggcaacattgaggcacaaggcgcccggcgatattggagcctactctttggcaatgagtttcgccgcgatcaagatggagatggcctcaatggcctcttgaactacggctacacggtcttgcgtgctgccacagctcgatccatcgttgctgcaggcctgcatcccacgctcggtgtgtttcacagcaacgagggcaacgccatgcgattggtggatgacgtcatggaaccgttccgcccggtgatcgacctgaaagtgtggcaactggcgcgacagggcgagcgccatgtcacccccgacaccaagcgcactttggtcagaaccttgtatgacgacatgcagaccagcatcggcgccacgccggtgatgtcttgcatccaaaagctcgctgtgtcactggcccagttgtacatgggagagcgagacaagctggaactgcccctaccaggcttgcctttgtcattggcggccagcattgcggacgatgagtagctagggcgtgttaacacatccgaagtccatcagcgaccagcacaaagttgatgaagccaaggaacatgatgtccaatttctcgaagcgagagaagacgcgacggtaacctttgaggcggcgaaacaagcgctcaacctcgttgcggcgccggtacatctcgcggttgtattcccagggctgcacgcgcttggccgatggaggaaccactgggatatagcccagatcaagcgcaagttgtctggtctcattgccttcgtaggcgcgatccatgagcagatgcagaggccgttgcagtaccccaaggcgacttagcagtgccctaccttctggtgcgtcgtgagcttggccgggcgacagtgagaacgttatggctgttcgagcatccgcggcaaccatatgaatcttggtgttccatccccctcgagatttgccgatagcttgtggtccgtttttttgagggcaccagtgccatcaggatgcaccttgatgctggttgaatccaaggagatcgcttcgatctttatgcgcacaacctgagcccgttgcagttcttcaaacatccgatcaagaatgccagccttggtccagcgattcatgcgggtgtaaattgtgtgccaatttccgaatcgcttgggtagacctcgccatttgcagccgtgttcagcgacatacaagatagcgttgacgacttgcaggttgctaagactgacattgcctcgttggacaggcaagcaatgctcgatcttggcaaattgttctggggtgatctccatgcctgaactctaccggctgagcagggtcttagacaatagtgttaacacgccctagaccctcaacctctcaacactcatgctcagcagctatcgactcatgtggatgatcgtcatgtttgatctgccggtggtcgagaaagccgaaagaaaggctgccacgggattccgcaatgccctgctcgacatggggttcgagatgtcccagttctccgtgtacgctcgcttctgcaccagcttgtcccaagtcgagacctacagcaaacgtgtggaaagcagcttgccagaaggggggaaggtcaacatactgacgttcaccgacaagcagtacgaacgcatcgtgacgtactacggcaaggccaaacaagccgcaaaaaaagcccccgaccagttcgatctcttctgatgttgcgccacttttttgccctccaaaaagagaaaaaccccttgacgaatcaaggggttatctcatctggagtctagatcatcgggatatgtgatctggccggaacaggttctgctgcaactggctgtcctgcttggcagtctagatcatcgggatatgtgatctggccggaacagcactcgtgtttggcggaacgttgttcctagtctagatcatcgggatatgtgatctggccggaacccgcctggccaacgtcatcagcacggtggaagtctagatcatcgggatatgtgatctggccggaactcgcgcaggaactgcacgccgcgcaggctcagtctagatcatcgggatatgtgatctggccggaacactgcgcctcggcgatgtaccagccgaagtagtctagatcatcgggatatgtgatctggccggaacactcgcagttcgtccttgcgtgcaaaatttagtctagatcatcgggatatgtgatctggccggaacgcaacagcgccgaaacactggttcgggaatagtctagatcatcgggatatgtgatctggccggaacctcggggccatgtgttcgtcggctcggacaagtctagatcatcgggatatgtgatctggccggaacaagggcgacattgacggctcgaaggtgtggagtctagatcatcgggatatgtgatctggccggaaccacattcgcgcacatgcttgggcagtaacttagtctagatcatcgggatatgtgatctggccggaacctctttggtgccctgacgcaagccgacaggagtctagatcatcgggatatgtgatctggccggaacgacacagccacacgatcgccgtctttcaggagtctagatcatcgggatatgtgatctggccggaacagatgcaaaccgcttgcgtcttccacggcgagtctagatcatcgggatatgtgatctggccggaaccacacaaggacgaaggatgaactacgaactagtctagatcatcgggatatgtgatctggccggaactggtggcttcgttgcgtagcaatagagcccagtctagatcatcgggatatgtgatctggccggaacggccatcacgggcgaatggcgcggcgccacagtctagatcatcgggatatgtgatctggccggaacacaccggcaacacgttcaacatcaccaccaagtctagatcatcgggatatgtgatctggccggaaccggagcaggcattggctgaggcgcgagcgcagtctagatcatcgggatatgtgatctggccggaacaggtcggcgagaagggcgcggaggtctggcagtctagatcatcgggatatgtgatctggccggaacgcgcgctgtcgaggcaaaagacgaatgggtagtctagatcatcgggatatgtgatctggccggaacagacggagcgtccctacgtcgaggagttgaagtctagatcatcgggatatgtgatctggccggaacccgaggccttgtcgctggctacggctcgcgagtctagatcatcgggatatgtgatctggccggaacggttgtcggcgccgttgcccgtcgggtcatagtctagatcatcgggatatgtgatctggccggaacctacagcgacctgatgtggcgccgcctggaagtctagatcatcgggatatgtgatctggccggaacgctcggctgcaggccaaccccaaagggcacttcgcgtaacccgttcttcgcggcgatccggcgcgaagtgacccacaagtgccaagtcagagggttttgagaacgcaggcaggacgtgacaaggcccgcagtggccgcaggcgccctgcaaaaccccatttggggactctgcgggcgcacctcggccctcatggcgctctcggcatggggtcatggctgaccagccagacaagacgct

SEQ ID NO: 1857 - DNA, 17095 bp, synthetic construct
  source 1..17095: mol_type = other DNA
  misc_feature 1..17095: note = Synthetic
tgctgcgcaatattgcaagctggcgcgtgaaggaaaccgaccggctcgccgccatggccacggaactgcgcaagctcggggccatcgtcgatgaaggcgctgattttctgcgcatcacgccgccggcctcgccggcccactggaaagccgccagcatccacacctacgacgaccaccggatggccatgtgttttgcgctggccgcgttcaacgcggccggcctgccggtgcgcattgaagacccgcaatgcgtcgccaagaccttcccggattatttcgaagccctgttttcgctggcgcatgcgttccccgcccgcatcccggtgatttgcgtggacgggcccaccgcctcgggcaagggcacgctggcggcggcgttggcgcagcggctcggctaccgctatctggactccggcgcgctgtaccgcgtcaccgcgctggcggccgtgcgcacgggcctggcgctggatgccgcgcacgaaaccgccatcgccgcgctcgcgcagcgcctgcccgtgcactttgccgacggcaagatctggctggacggcgccgacgtcaccgatgccatccgcacggaacaggccggcatgaacgcctctgccgtatcggccctgccctccgtgcgcgtcgccctgctggcgctgcaacacgggtttcgccaactgcccgggctggtggcagacgggcgcgacatgggcaccgtgatctttcccgacgcgccgctcaagatctacctgaccgcgagcgccggacaccgtgccgagcgccgttataagcagttgatttcaaagggttttccggctatacttgacagtcttcggagcgatctggaagcgcgcgatgcccgggattcgtcccgcactgcggcgcctctcaaaccggccgaagatgccttgctgctggacaattcggatttgacggttcaggaatccgtcgatcgggtgttggactggtggcagggcaggcagccgttcggggcatcctgagcggcggtttggcccatacggcccgcagcgcgccaccgcggcgcaccggtcgtctggtttttcaactcaacccgcgacctgcacgcttgtccggccgcaaaaaaactgccacagccagccctagaaacgacagcaatcccgcgctcgtgaatcctgcctgtgtgcctccaaggaaactgaatgtctgaatctttcgcagccctgtttgaagaatcattgcaacgctctgaaatgcgcatgggcgaagtggtcaccgctgaagtcgtgcgcatcgagcacagctttgtggtggtcaacgccggcctcaagtccgaagcctatgtgcccatcgaagagttcaagagcgacaagggcgaactcgaagtccaggtgggcgacttcgtttcggtggctatcgacgccatcgagaacggctatggcgacaccatcctctcgcgcgacaaggccaagcgtctgtcctcctggatggcgctcgaaaaggccctggaatccggcgaattcgtcaccggcaccaccagcggcaaggtcaagggcggcctcaccgtgctggtcaatggcatccgcgccttcctgcccggttcgctgatcgacacgcgtcccatcaaggacctgtctccctttgagaacaagacgctggaattcaaggtcatcaagctcgaccgcaagcgcaacaacgtcgtgctgtcgcgccgtgccgtggtcgaggccagcatgggcgaggaacgcgccaagctgatggaaaccctcaaggaaggcgccgtggtgcatggcgtggtcaagaacatcaccgagtacggcgcgttcgtggatctgggcggcatcgacggcctgctgcacatcaccgacatggcctggcgccgcgtgcgccacccgagcgaagtggtgacggccggccaggaaatcaccgcgaagatcctcaagttcgacaccgagaagaaccgcgtctcgctgggcctcaagcagatgggcgacgacccgtggatgggcgtgagccgccgctacccgcagggcacccgcatgttcggcaagatcaccaacatcgccgactacggtgcgttcgtggaactcgaacccggcatcgaaggcctggtccacgtgtccgagatggactggaccaacaagaacgtggccccgagcaagatcgtgtcgctgggcgacgaggtcgaggtcatggtgctcgagatcgacgaggacaagcgccgcatcagcctcggcatgaagcagtgcaaggccaacccctggcaggagttcgcgcaggaaaccaagcgcggcgaccgcgtcaagggtccgatcaagtcgatcaccgatttcggcgtgttcgtgggtctggccgctggcatcgacggtctggtgcatctgtccgacctgtcgtggaacgagcctggcgagtccgccgtgcgcaactacaagaaaggccaggaagtcgaggccatcgtgctggcggtcgatgtggaccgcgagcgcatctcgctgggcatcaagcaactcgacagcgatccgttcaccacgttcaccacgctgaacgacaagggccacaccgtgaccggcaaggtcaagacggtggatccgcgcggtgccgagatcgatctgggcgacgacatcatcggctacctgcgctcctccgagatcagccgcgaccgcgtggaagacgcgcgcaacgtgctcaaggaaggcgacgaggtcacggccgtggtgatcaacgtggatcgcaagacgcgcaacatccagttgtccatcaaggccaaggacatggccgaccagcaggaagccatgaacaacctgagccagcaatccgcgcgtgaaaacgccggcacgaccagcctgggagcgctgctgcgcgccaagctggacaacaacgagtccaagtaaccttgcgggacggaccacgtggcgcacagcgctgcgtgctccgtccccaacttgctaggcaaatgacccgctccgacctcgtcgaagaactggctgcccgtttcggccagctcacgcaccgcgacgccgaatatgccgtcaagaccattctcgacgcgatgagcgacgccctggtgcgcgggcaccgcattgaaatccgcggcttcggcagtttctcgatcaaccgccgctcgccgcgcatgggccgcaacccgcgctcgggtgaaagcgtcgccattcccgagaaacgggtgcctcacttcaagccgggcaaggcgctgcgcgaagccgtggaccagcgcacgcgcgagctggaagaggccgccgcggccaggccgggcgctgcgaatccgtcggtagaatcgcctcgtcactgaggaagattcatgaaatacctcatgtggctgctcaaggcagccattttttttaccttgttcgcgttcgcgctgaacaaccagcaggacaccacggtccacttcttctttggcgcccagtggcaagccccgctggtgctggtggtgctggcggcctttgcggcgggtgtcgtgctcggcgtgctcggcatggtgccgcgctggtggaagcaccgcgccagcgccaaggcggcgcggcgtgcgaacctgccggccagcggctttgctcatccggcccgccccagcgaacacgatggactttgacctgacctgggttcttttgggcctgcccgccgcgttcatcctggggtgggccgcgtcgcggtttgacctgcgccagctgcgcatggaaaaccggcaggcacccaaggcctatttcaagggtttgaattttctgctgaacgagcagcaggaccaggccatcgatgcctttatcgaggcggtgcaaaacgacccggatacttccgagttgcactttgcgctgggcaacctgttccggcgccgcggcgagtacgagcgcgccgtgcgggtgcatgagcatctgctttcgcgcggcgacctgagccgcgccgaccgcgaacgcgcgcagcacgcgctggcgcaggacttcctgaaggcgggcctgctcgaccgcgcggagcaggccctgcgccagctcgaagacaccccattcgaggcccaggcgagcctggccttgctggcgatcttcgagcgctcccgcgactggccgcaggcggcccggatcgcgcaaaaactcgaagacgctggccagggcagcttcagcgcgcgccaggcccattacctgtgcgagcaggctgcctccgaagtttcccagggcaacaacgccgcggcgcagcgactgctggagcaggccatcgccaccgcgccgcaggcaccacgcccgcacatcgatctggcggccttgcatctgcgggttggtgaggccgccagcgcgttcgagaccctgcagggcctgctggatgtggcgccccgctcgctgccgctggcggcgcgcctgctgcgcgaagccgggctggcgtgcgggcgcggcgcccaaaccctgacgctgctgagaaccagttacgcccacgaccccggcctggatgtgctggacgcgatcgtggcgctgagcgcggccgaggcgccgggcggcgagacgcagggtggccgcgactggtacgtcaaacatctcgagcacgagccctcgctggttgccgccgccaaatggctggccggcgagaagctggaacacgagcagtttcacccccaggtccagcgtgcgctggaccgcgcggcgcaaccgctgctgcgctatcgatgcgccgcctgcggcttcgaggccacgcagcatttctggcaatgccccggctgccaggcgtgggacagctaccccgcgcgccggatcgaagaactctagctacgaattcaccagcgcgatcaggtcggtcaccccgacatccacgccggcctgcatgagcagggtggtcgcttgcccgcggtgatgcgtctgatggttgaagaaatgcgtcagcgcctgccacatcggatgtgcgcgctgcacgcccttgctgttgctgtagcgcatgatgcgcgtcgggaaatcgcccggcatttccagcacccaggcttcgatggcggcgtccagccgctcgcgctggccgcgcaggccgctccagtcctcgtgcaggatcgtttcgtagcgcgctcccgccggcaacgcaagcaggtccgcgggcagcgctgcgaacgcatggccctgggccgcaaaccggccgagccacatcgtgtcgccccagatcaggtgattcagcgtgccgtggatggagccgaagaacgcgccccgatcgcgcttgcgctcctcgtcgcccagtttttcgcaggcatcgtacaggcgcgcgttgaaccagcggttgtagcgggccagaaagcggtaattgtcagagaagctctgctccatgatcagtaatcctttattgatagcaagctattgttttctacaaagggctaaatgtcattttcattcatgatcccgggtccgtactgcctccagcacggccgaacccgccgccgcccggcgtgtggatttcgaatacgtcccccggctgcatctgcacttggccgatgtgccccagttcctgcaccgtcccgtccgcgcgcagcacgcggttgattcccacctgccctggcgcgccgcccgccatgccgaacgccgggtagacccgcccgttcgacaggatgctggccgtcatggcctgcaggaattgcacgcgtcgcacgccgccgtcgccaccgtgccagcgtccggcgccccccgaggctggccggatttcatagctcaacaaccgcaccggaaagcggaactccagcacctcggggtcggtcaggcgcgagttggtcatgtgcgtttgcacgacgctggtaccgtcaaagccgccgatcaaggcaccgcccgcgtcgaactcgccgcccgcgccgctgccgcccgaaacggtttcgtaatattgatactgcgcgttgccgaaggtgaagttgttcatggtcggctgtccgcccgccatcacgcccagggcgccgaacagcgcattcgtgatgcaggtcgatgtctccacattgcccgccaccaccgaggccggcggattcgggttcagcatgcagcccggcgggatgatgacgcccagcggcttgagacaacccgcgttgagcgggatgtcgtcatccaccagcgtgcggaatacgtacagcaccgccgccatgcacacggccgtgggcgcattgaagttgttgtcctgctgctttgaggtgcccgtgaagtcgatcaccgcgctgcgcctggccgcatcgacccggatcgcaacctggatgcacgcgccgttgtccagcggcaaggtgaattcaccattcttcaaccgcgtgatcacacggcgcaccgactcctcggcgttgtcctgcacatggcccatgtaggcgtgcaccacgtccaggccaaagtcccgcaccatcctgcgcaattcctgcacgcccttctcgttggcggcaatctgcgccttcaggtcggccaggttctgctgcgggtttcgggacggatacttgccgcttccaagcagcgccagcagttcggcctcccgcagcacgccgcgctccaccagcaggaagttgtcgatctgcacgccctcctcctccaccgtggtggagaacggcggcatcgaacccggtgtgctgccgccgatgtccgcatgatgaccgcgactgcccacgtaaaactggggcgcgcccgcaggcccttcgacaggcccggacgcatcggactgccgcaggtacaccggcgtgatcaccgtgatgtcaggcagatgcgtgccgccgtggtatgggtcgttgagcacatacacgttgcccggctgcatggtcgcagcgttttcgcggatcacggtcttgatgctctcgcccatgcttcccaggtgcaccggcatgtgcggcgcgttcgcgatcaggttgccgcgggcatcgaacagcgcgcacgagaagtcgagccgctccttgatattcaccgagtacgcggtgttctgcaactgcagccccatctgctcggcgatgttcatgaacaggttgttgaagacctccagaaggaccgggtccacctgcgtacctggcgcgaacgcaatggcacgcgccgcgcgacgctccagcaccaggcaatcgaactccgacaaggcagcctgccagcccggctccaccacggtggtggcgttttgctccgcgatgatggccggccccgcaatcacgtcgccggcttgcaggtcctcgcgcaccaccagggccgcgtcgtgccagcggccatccgaatacatggccacggtatcgcggcgcggcacctcgcgcgcctcgtggcgcgcccgccgcggctcgaacggcacatcgcccggcacgaacgcctccaccgagaccgcctccaccaccatgcccttgccctgcatcagaaaagaatagcgctggcggtacgcggcctcgaagcggcccgcgagcgttgccacggccccgggccatgcgctcgccgaagcgcccagcgtggcggcctcatcccagcgcacgatcagcgcactgtcggtcccctcatagcgcacatgcacgcgccggtgcgtcgtcatggcggcgccgccggcttgctggcccgccagctcggcctgtgcggcctgcgccagcgtatccagcgcggcggcaatccggggaacggctgcctcggtcagctggagctccaccgcctgctcgcggatcacgttctggtcggccagccccatgccgtaggccgagagcacgccggccagcggatgcacgaacacgcgcgtcatgcccagcgcgtcggccaccaggcaggcatgctggccaccggcgccgccgaagcactgcagggtgtaacgcgtcacgtcgtagccgcgcgccaccgaaattttcttgatggcattggccatctgctgcacggcaatgtggatgaagccctgcgccacgtcttccggcgcccggccggtctgttgcgccagcgccgcaaacttcgcggccaccacatccgcatcgagtgcgtcgtcgccccggtcgccaaacaaccggggaaagtagcgcggctgaagtttgccgagcatgacatttgcatcggtcacggtcagcgggccgccgcgccggtagctggccggacccgggttcgcgcccgcgctctcggggccgacccgaaagcgcgcgccgtcgaacgcgaggatcgagccgccaccggccgccaccgtgtgaatgctcatcatcggcgcgcgcatgcgcacgcccgctacatgggtctcgaactcgcgctcgaactcgccggcgaagtggctcacatcggtggaggtgccgcccatgtcgaatccgatcacgcggccgatgccggcccgctgcgcggtgcgcgccatgccgacgatgccgcccgccggcccactcaggatcgcgtccttgccgcggaacgcatgggcgtcggcgagcccgcctgacgactgcatgaacaggaggcgtacgcccggcatctcggcctcgacttgcgccacatagcggcgcaggatcggcgacaggtaggcgtccaccacagtcgtgtcgccgcggctcaccagcttcatgagcgggctcgtctcgtgcgaggtgctgacctgggtgaagccggcctcgcgcgctatttcggcggcggcctgctcgtgcgcgacatgccgccagccgtgcaggaatacgatggaaatgcttctaaaccctttccggtattgcgatagaagctcctgtttcagtagtgattcattcaacggctgcagcacctcgccatcggcggccacacgctcctgggcctcgaccaccgcgctgtacagcagttcgggcagcacgatgtgacgctcgaagagacgcggccggttctggtacgcgatgcgcagcgcgtcgcgaaacccgcgcgtgatcaccaagagcgtcggctcgcccttgcgctcgagcagcgcgttcgtcgccaccgtggtgcccatcttcacgcattccaccagttcgggcgtgatcggctcgtcggccgcgaggcccagcagatgccgcaccccggccaccgctgcgtcccggtactgctgcgggttgtccgacagcagcttgtgcgtgaccagcgaatagccgccgccgggctcggggcgccggcctacgatgtcggtgaaagtgccaccgcggtcgatccagaattgccagcgaggcgaagtgttgcgggtcatggccacatttcaacactgtttccgaaacgacggtgacgcgccggcgtggcatcgctgcagaaatgaccgatggtcaacggccgcaaagcactgccttcaaaaagacgaaggccgcatatagcggccttccatttggtgcatctttcagcttgttagcgtccagagcgcatatcccaatcgtgatagtagttgaagtgtagcgcagttcgggttaaaactggaacgttatcaaaagggaggacatagcatggcaaacatgcgctatcggctcgcactcgatctgggctcgacctcactgggctgggccatgatccggctcaatgcagcaagcgaaccttgcgccatcatcaaagctggcgtccggatattttcagatgggcgcaaccccaaagacggttcatctctggccgtcacgcggcgcgaagcccgcgccatgcggcgacggcgcgatcgtttgctcaagcgcaaggcgcgcatgatgcatacgcttgtgagccacggcttctttcccgctgacgtggccgcgcgcaaggcattggaaacaatcaatccttacgaactgcgcgcacggggtctgtcatctgcgctgacgggcgccgagttcgcccgggcgctgtttcatatcaaccagcggcgcggcttcaagagcaatcgcaaaaccgacaagaaagacaacgacagtggcgccctgaaaacggcgatcagcaaattgcgcgaagcgctgaaggttgaccgatgcctgaccgtcggagaatggctgcacaagcgccaacaggctggtcacacggtccgcgcccgctttcggcaaattcgcgtgatcaaggacgacggaaagagccgcatcgacaaaagctacgacctgtacatcgaccgcgccatgatcgaggccgaattcgatgcgttatgggccaaacaaaccgaactcaatccggggctgtttaccgaaacggcccgctccgaactcaaagactgtctgctccaccaacgcccgctcaagcctgtgaggccgggacggtgcacgctcttgcccgacgaggaacgcgcgccactggcccttcccagcacgcagcgctttcgcatctaccaggaagtgaacaatctgcgcatcctgcgcgagggcttgaaggaagaacctttgacgctggagcagcgcgatgagctcgtccacgcgctggagcacaacagcaaacgcagcttcatccagatcaagaaattgttgggcgtgggcggttccgtgcagtttaattttgaagatccaaagcggcaggaactcaagggcaacatcaccagcgccatcctcagcaatgacaaatatttcggcgacgcgtggtttgacttccccgaagcgaagcaggacgctgttgtcgcgcagcttgtacaggaggaaaacgaagcccggctcatccgctggctacaggacgaaaccggggtggatgagccgcgcgccgaagccattgccaacgtcagcctgccagagggatacggcagtctgagcgccaaggcgctggcacgtatcctgccagcgttgcggcgcggcgtgatgacgtatgacaaggctgtgcaggctgcgggcttcgagcaccacagtcatatcagtccggccgcgagcggtgaaatattgccggagctcccttattacggaatcccgctacagcgtcatgtgggttttgggtccggcaagacagacgaccgtgacgaaaaacgttacggcaagatcgcaaatcccaccgtgcatattggcctcaaccaagtacggctggtagtgaatgcgctcattcggcgctacggacaccctagcgaagtaatcgttgaacttgcgcgcgacttgaagcaaagcaaagagcaacgtgatgaggacagcaagcgccaagcagacaaccagcgccgcaatacacgcctgcgcgcagacgtcgccgtcattctaggaattagcgccgaacgtgtacggacggccgacatacagaaaatgattctttgggaagagctcagcttcgaccccgccgaccgccgctgcccttactcaggtgtgcaaatcagcgcaaacatgctgctgagtgaccaagtcgagattgaacacatcctgccgttttcagaaacacttgacgacagcctcaacaacaagaccgtggcgctgcgcaccgccaaccgcgtcaagggcaaccgtactccgtggcaagctttcggcgcgcaggccaccgccggattcgattacgccagcatcctgcaacgcgccgagctaatgccaaaggccaagcgctaccgctttggcgaagatggcttgcagcgctggctcagggacgacgcaggttttctggcccgcgccctgaacgacacacgctacctgagcaaggtggctcgcgaatatgtcagtctgatttgcccgcagaacactcgcgtcattccaggccgcatgacggccatgctgcgcgccaaatttggactcaacgatgtgcttggcctgaacggcgagaaaaaccgcaatgaccatcgccatcatgcggttgacgcctgcgtcatcgctgtcactgatcaaggtttgctgcagcggtttgcccaagccagcgcaagtgcgcgggagcaacagatcaatcgtctggttgaagacatgccactaccgtgggacagttatcgtgagcacgtgcatcgcgccgtggacaatatctgggtgagtcacaagcctgaccatggccacgaaggagccatgcacaacgacaccgcttatggcttgctgggtaatggccgcgtcagcatgcacaaaacggtggaagggaaacgcgagcgcattgaagacaacttgaaggtgattgaattcaccagcgcaaaggcctcggcacgtcatggtgtcttacccaatggagaactgcgaccttacaagggctacaagggcgacagcaactactgcatcgaaatagtgcataccgacaaagggaaatgggattgggaagttgtatcgacattcgacgcttatcaagcagtgcgaaagcatggcttgcatcgacttcggtatccaaatctgagcatgagtggcaaacctttggtgatgcgactcattattggcgactacgtgcgggccaatttcaaagacagcctcagactccttactgtgaagaaaatcaaatccaacggcggtattttcgttgcgcagcacaacgaaggcaacgttcgacaacgtgaggatgaaaaggatgattccttgatctatggctctttctcagcgggttcactgcagaaagcgaaaggtagatatgtcaccatctctcccatcggagaactcaacgatcccgggttcaaggagtaaagaaaatgatcggtcgcattgttgaagtggccgatgacagaaggcatctattcatgcaccggggcttcatggtggtgcaagacacagaaggcgaacgcaaagaactcggtcaggtgccgctggatgatattgccgccgtcattgccaacgcccacggtctgagctatacaaacaacctgctggtggccttggctgcgcgcggtgcaccctttgtcttgtgtgccgccaaccacaacgcagtcggcatgctgctgccgatcgagggaaactttgaacaggcaaaacgtatcgaaggccaaatcgcggccagcctgcccacccataaacgcctgtgggctacggtagtgcggtccaagctggaacagcaagccgctgcactggaagccactggttcgccgcccgcccccttggcggccttggctgccaaagtcaaaagtggagatccggaaaatctggaagcccaaggagcacgacgctattgggggctgttgtttggagacgagttcagacgcgatcaggatgccggtggcctgaacgcaatgctcaactatggctacaccgtgctgcgtgccaccacggcacgcgccatcattgcggctggattgcatcccagcatcggcctgcaccacagcaacgataacaacgccatgcggctcgtggatgatgtgatggagccgtttcgccccgtcattgacctgaaagtctggcagctgaagcgcaatcacgaggaacatgtcacacccgacgccaagcgcgcactggtgcacacgctctatgacgacatgcaaaccgaagcgggtgccacgcccgtaatggtctgcgtacaaaagctggccacctcgctcgcacaggtataccttggcgagcgcgacaggcttgatttacctctgcctggcctgccgctggctttggcttcggcactataagatgaatagcggcgcacacgcatgctgtcagggtacaggctcatgtggatgacggtaatgtttgatttaccggtagtggaaaaggctgagcgaaaggcggccaccgagttccgtaacgcgctactcgatttgggttttgagatgagtcagttcagcgtatacatgcgattttgtaccagccctgcccaagtggacacctattgcaaaagagtggaagatgcgttgccgcaaggcggcaaggtcaacatccttcaattcaccgacaaacagtacgaacgcatcgtcagttttcacggaaaagccaaacagcccgccaacaaaacgcccgatcagtacgatcttttctgaaaatggtcctgattttccagccctggaaaacgaataaccccttgacgaatcaaggggttatcgcagcgccagtctagacgattgggatatgcgctctggccggaacgccacgcacgcgatcgccgcggaccagcgcagtctagacgattgggatatgcgctctggccggaacaatattcagctcggcgcaatgatgcgcgggagtctagacgattgggatatgcgctctggccggaacacaattgcatttgcctttgccatgatatgaagtctagacgattgggatatgcgctctggccggaacggtcggcttgcgcagcacgccgctcatgtcagtctagacgattgggatatgcgctctggccggaacccattgctggggtggccgaagccaccccagcaatgggcgcgcacagcgcgctcgtttatcaataggagccgctgcccccccacaaagaagcacgctcaggcgtaactccgcggcaccgcgcacaccatctcgcccggatcgttctgggcgatgtcgcgctcgttcttggcctgcgcgacttccatgtcgcgcggcagcgtgatgccgtttttcaccgcgaggacttcggccatcacgctgaccgcgatctcgggcggggtcttgctgccaatgtagatgccgatcggcccacgcagcctggcaaggctctcctcggtctggtccaggtagtcgatcatgcgctggtggcgcgcgtcgttgtttcggcgcgagccgattccgccgacgtagaacgcatcggtcttcagcgcttcgagcagcgcgagatcgtcgagcttcgggtcgtgcgtcaatgcaatcacgcagctgcgccggtccggcttgaacgagagcaccacgtcgtcgggcatctcggcggtcagcgttgcacccggcaccgaccagcctcggcggtattcctcgcgcgggtcgcagaccgtgaccgtgaagccgctgaacaaggccatcgtcgccaggtattcggtcaactggccggcgccgatcagcagcatccggtactcggggccaaaggtgttgatcaacgcctccgacgtcagctcggtttccgccggcacctcggtctcgcgcagcgtggctgcgccgtcggtcaggcgcacggtgcgctccatcatgcggccggcttccagcgccgtgacgagccggttcaggctcgcggcgtcggggtcgtattcgagcagcagttccagcgtgccgccgcagggcaggccaaagcggtgcgcctcttcggcggtcacgccgtacttgatgaagccgggcgcgccgctcgggatctcgtgcggctcgtcgttgcccggtgcgccggccggcgcaccggcggaataggctttggtatggcggtagatcaggtcgtcctcgatgcagccgcccgagaccgagccgacgatcgcgccgtcctcgcacagtgccatgatcgagcccaccggccgcggcgaggagccccaggtgcgcaccacggtggccagcaaggcacgcttgcctgccgcgcgccagtcgcgcaaggtgcgcagcaccatcacgtcgaggttttccatggtcgtatctccttgtatgccgttgcctcggagcttatcgaaacgtgccaacagacacagccagagcgggtattgcaggcgggctcgcctagcgcagccaccagaggatggccagcaccacgatcacgcccacaacccagccccacaccggaatctttgagccttttgagcctgtaaccgttgttgaaccttgactttctgctatttcttttgaagcataagcatcggggaagcggcgctgcatttcatcgtcgaatcgtttgaagaagtcttccgccatcgacttggccgcgccgtcgatcagccgctgcccgagttgcgccaccttgccgccgaccgaagcgtgaacgacataggccaggtcgcagcccgcgtcgttcggagtcagcgtgacctgggcattgcccttgccgaatccggcgacgccaccctgtccctcgaaggcgatgttgtagctgctgggcggcttgatgtcgctgaggttgattttcccggcgaatttcgccgccacgggcccgatcttcagcgccatgccgatggcgtactggttttcgcccgtgggctcgaccttgtcgcagcccggaatgcaggtcttcaggaccacggggtcgttcagtgcatcccaggcttgttgttgtgtcacggccagttggcggttggcttgcatgtccatgggcttctcctcgatttgtggggatacggatgggggattgatcagcgtttcatcaacgccgccaggctggccgcgagatcttccagacggctcaggttgtgcaccgccagcatgccgtgcgcatggcggtgcaacacggcggcgccgcgcgcactcggcgcgtagccgtcaaagcgcagcagtggattgagccagagcagccggcggctcgcgcggcgcagccaggccagctcgggctccagttgctgtggctcgccggtgtccagtccgtcggtgatgaggagcaccagggtgcgccgcccgaccagccggcgcgcatggcgcaggcgcaggctggccagcgacgtgccaagctgggtcccgccggcaaagtcttcaatggccgcgctggccacggccagcatctcgtcagtgtcggcaatgcgaaaggccggcgtgaggtcggtcagctgcgtgccgaacgcaaacacgtcgcggcggcggtggcgccgggtggcagcatgcaaaaacgccagcagcagccgggcgtaacgctccatcgaccccgacacatccaccagcaccaagagcggcagcggctgctcgcgccgcttgagccgtggcaggtgcatcagctcgccgccggtgcgtgaggcgccccgcatgacgcccggccaatgcacccgcgcgccggcatgggccgggtaggtgcggcgcgaggcaaagcacggcagcggcagcggcacatcacgggccaggcgctcgaccagacggtattcgaccccggagagcgcattgaaatcggcatgcctgagccgctgcaggtcgctggctgtcatggccgcgtcgaattccaccttgtcgtcctgcgcgctgggcttggcctgccggccatacgccttttgcggcgacagcgcctcgcgcacgcgcggacggcgcttgctgggctgggccgtaccctcggcgctgggcaacaactgcgcgagcagcttgcgggccacctcgggattgcgaaagtaaacatcgaacagctcgcgaaacaccagccggtcctgctcgcggctgatcatcacggcttccagcgcagcgctcagatccgccttggcgccgacaccgacggccagcgccgcatcctgtgccagggaaatgcgcgagctgtcgacgcgcacgccagcccggcgcaacgcgcgcccgaagccggtgatgttgtcggcgagtttcccggtgcgcgcgtcgccaagctgcatgacg

SEQ ID NO: 1858 - DNA, 17072 bp, synthetic construct
  source 1..17072: mol_type = other DNA
  misc_feature 1..17072: note = Synthetic
caccgacctgaccaccaccgggccaacgcacatcttcaacctgggccacggcatcagccagttcacgccgccagagcacgtgacagcgctggtggaggcggtgcacagccattcgcgtgcactgcgccaaaaatgagcacgccttcccgcaaacttgcagcgttagcacaataaaaacagcgtttcaagctcttttttgaaaaataaatggcctgggacgcttgacttatgcacaaaactgaaatcttcgtcttgcatgcccagcttgttggctagccataaaatcggtgtatttacgatcacgcaagccattgatttcattgaactttttatctgcccattggatgtgcaatttgttgaaatgcttgattttcaaggcttccagggcatcgaagccaagttttcaacaaagttatccacagattttctgggtcaaccccaaaatcctgaaaaatcaacgacttacaccccgttccaagaattcagctaactttttgcactgaccattttgctcaaaagtaccgagaacaacgtgagcacccaccactggattgacgtcgccgtccagacccctgcccacagccaggtgggcggtttgctgagctaccgcagcccctttttggtgcggccgggtcaactggtgcgcgtgcctttggggcggcgcgaagtgcttggtgtggtctgggccgtgctggatgacgcgccaaccggcatgcccacatcggccgtgcgcgatgttttgggcgtgctgagcgatctggcgcctctgaacgccgactggcggcagttggtgcagttctcggcccagtattaccagcgatcactgggtgaggtcgccctgtcggccctgcccccacaattgcgtgacctgacccccgagcaattggcgcgccgtctcaaaaagcagaccaccgatcgccaaattcaaactgtgccaggccccgccttgtcagaagagcaaagcagtgtcctcgccaagatggctgaaggccttggcccgtttttgctgtttggcagcaccggcagcggcaagaccgaggtgtatttgcaagcggtcgagcgcatgctggccagcgacccgcaagcccaggccctgctgatggtgcccgagatcaacctgacgcctcagctcgaagaacgggtacaggcccgcttcggaaccgaggcggtggtgtccatgcacagcggcatgacaccggcgcagcgcctgaaagcctggctggccgcccacgcaggccaggcccgcatcgtgctgggcacccgcatggccatttttgcgtctatgccgcacctgaaactgatcgtggtcgacgaagaacacgaccccagctacaaacagcaagaaggggcccgttattcggcccgcgacctggcggtctaccgggggcgcctgcaccaggccccggtgctgctggcttcggccacgccctcgctcgaaagctggcacctgagccgtccggccgacgaggacgggcagcacggtgggcgctacattcgactgcacatgccctcgcgaatcggtgcaggtggtggcactggcctgttgcccaaggtgcgccgggtggacatgaacaagcagccacgccgcaccgtgctgtcggcgccgctggtggccgccttgcaagaacgggtagagcggggcgagcaatgcatgctgctgctgaaccggcgcggctatgccccggtgctgcactgcgccgactgcggatggaagagcgcgtgcaagcactgcagtgcgttcagagttttccacaaaattgaccgcaccctgcgttgccaccactgcggcctgaccgagcgcgtgccccggggctgcccggactgcggcaacgccgacatcgccccgattggccgcggcaccgaacaattggaagagcacctggcggaactgctggcccacgtcaaacgccccgatggctcaccgatacgcattgcccggattgatgccgacaccacccgcctgaaaggcgcactggaaagccagctggcctcggtccacgcgggcgaggtagacatcctggtgggcacccagatgatcgccaaggggcacgactttcggcgcatcaccctggtggcggcggtcaacccggacacggcgctgttttcaagcgactttcgggcgcccgagcggctgtttgccttgctcatgcaggcggccggtcgcgccggacgagatgccgcccaaagcgctaccagtgaaatgtgggtgcaaacctttcacccgcaacacaccctgtttgaagcgctcaaaaaacacgactaccccgcctttgccgccagcgaactggccgaacgcaccgccgcagacctgccccccatcagccatcaggccctgttgcgtgccgatgcccgcagccaggaagcggctcaggccttgctgaacgccgcacgcgaagcgctggaggtgcaactcagcgcggacccggccactgccgatctggtgcagcaagtcagcgtgtacccggccgtgcccatgagcatgcaacgcgtggccgatgtggaacgcgcccaaatgctgctggaaagcccctctcgcatggcgctgcaaaaagcgttgtggcatctgcatggcgtgctgcaccagctgcgcagccagcccgagcacaaaggcgtgatccgctggctggtggatgtggacccgcaggcgatttgaacgcgctgaacgcgccacctgcatgaagcgtcatgctgcatgcgtcaggcgtcatgggccatgcgtgatgcgtaaggcaggtactggcggggccaggccgcccagcaccgtcgacctcaggccttgaaaaaagccaccgcgccagagaacgtcaaaaaagccaccgccgtggtcatcaaaatgacccgggcaatgcggccgttgtcagcccccaggcgctcggccaaaagtgacacgttgctggcactgggcaaggctgcgaccaacaccatcacctgcagggcaaacgggtcaatccggacgccccactgaatggcggtcaaccccaccagcaagaccagcaccgggtgcagcaccaatttaatcaatgaaatcggcaggtaatcggccatgcgcaaagggccctcagggcgttcgtgggccagcatttgcgaacgggccagcaccgcgccaatagtgaacaaggccacgggcgaggccgcgtcggccagcaagcccaccgttttggccaccggtccaatcagcaccaggtcccagaaagaaaacgccgcgcccaaagaaatggcccacggcatcgggttgcgcagcacccccgccaaggccttgcgggcagccaccgcggcaccgtgctccccggccgcatccatgcgcgacaaagccacgcacaaggatgaggtgaacaccagatcgaccacgatggtgacgatggccgggcccaccgcctgcgggccgagcaacgccaccagcaagggcacccccatgaagccggtgttgggaaatgccgccaccagcgcccccaaagacgcatcgttccaacgaatgcgccggttcaggctgatggcgatgctgaaccccacgatcaccgcagcgcaaaacaaataggtgaaaaacacccccgcatccagcaactgcgcaatgggcgtgtccgacccaaagcggaacagcatgcacggcaaggcaaaaaacagcacgaagccgttcaggcccggaatggcctccaaaggcaaaaacttcaagcgggccgccaggtaaccacacaagaccagggcaaaaaacggaaaagtgacgcgcagtatttcaagcatggcctgattgtcgggtaaaccagtagcccccaaagacaaggacagtcgcagcgctgacacgcacttctggatgtcggttgtttcaaccagtgcacaagacattcgggatacaccccaaaccatcggcaggtcgtcaccccaaaagacgaaaggccgcatgtagcggcctttccatttggtgcatctttctgcttgttagcgtccagagcgcatttcccaatcgacgaaatgtgggttaaatatagcacaatggtattcaacaaaatctgcaatagattggaatactgtgcaaaaaatgcgttaccgactggccctggacctgggctccacatctttgggctgggccatggtgcgactcaatgcccaaaacgaaacctgcgccgtcatcaaagcgggcgtgcgcattttcagcgatggccgcaaccccaaagacggctcttcactggccgttagtcgccgggaggcccgcgcgatgcgccgccgccgtgaccgcctgctcaagcgcaaaaaccgaatgatgaccaacttgctgcaccatggcttttttccgcaagacgaaacagaccgcaaagcactggagaccaaagacccgtttgcactgcgtgccaagggcctggaccaaaccttgctgcccgaagagtttgcacgagccctttttcacatcaatcaacgcaggggcttcaaaagtaaccggaaaaccgacaaaacagaaaacgacagcggcgcactcaagaaagccatcggtcaattgcgtgaagccatgcaggctacgggctgtcgtactgttggggaatggctcaatgcccgccatcaaagcggcctgtcggtgcgggcccgttaccgtgaaaaccgcatcaccaaagacgacggcaaaaccaaaatcgagaaaagctacgacctctatatcgatcgggccatgatcgaagccgagtttgatgcgctgtgggccaagcaaagcgaactcaatccggccctgtttcacgaaaccgcccgcgccgaactgaaagactgcctgctgcaccagcgcccgctcaaacctgtcaagcccgggcgctgcacacttttgcccgacgaagagcgcgccccgctggccttgcccagccagcagcgctttcgcatttaccaagaggtgaacaacctgcgcttgctgcgcgagggtctgaacgacgagcctctgaccttgtcccaacgagacctgctgattcaagcacttgacgccaacagcaaacgcagctttacccagattcaaaagctgatcggcttttctggaaaattcaacctacaagacgaaaagcgcaccgagcttaaaggcaacagcaccagcgctttgctggggaggaaagagttttttggaccgcgctggtccacatggagcgaacgacaacaagatgccatcgtgaaacaacttgtatcgcaagaatatgaagatcgactaattaagcgtcttcaaaaatattgtggcgttgacgaagccacggccgaaaccatcgccaacgcccccttgcccgaaggctacggcagtctgagtgtcaaggcccttgaaaaaatcctgcccgccctgcgagctgaggtcatcacctacgacaaagccgtgctggctgctggctttgaccaccacagccacatcagccatgccgctacgggcgaaatcttgcccgagctgccctattacggccagtacctgcagcgacacgttggctttggctccggcaagcctgaggacactgccgaaaaacgctacggcaagatcgccaaccccaccgtgcacattggcctaaaccaggttcgcacggtggtcaacgcgttgatcaaacgctacggccaccccagcgaggtgattgtggagttggcacgcgatctcaagcaaagccaagaacaacgccaagaggaacaaaaacgccaagccgacaaccagcgtcgcaacgaacgcatgcgccaaaacattgccgacttgctgaacaccagcacggaacgtgtcagagcggctgatctgcaaaaaatgatcttgtgggaagaactaagcttcaatacggctgaccgccgctgcccctacagcggcgtacagatcagcgcccaaatgctgttcagtgaccaggtcgagatcgagcacatcctgcctttttcacaaacgctggacgacagcctgaacaacaaaaccgtggcaatgcgccaagccaaccgcgtgaaaggcaaccgcacccccgccgacgctgcagcggactttgcctctcaaggctggcccacggaagacctgctgcaccgtgccagcctcatgcccaaaggcaagcgctaccgctttgcacaagacggcatggcgcaatggctgcgcgaggacaaaggctttttggcccgcgcattgaatgacacccggcacctgagccgcgtggcacgtgagtacctgagcctgatctgccctcaaggcacacgcgtcatccctggacgcatgaccgccatgctgcgcgccaagttcggcttgaacgacatcttggggctgaatggcgagaaaaaccgcaacgaccaccgccaccacgcggtggatgcctgcgtgatcgccgtgaccgaccagcgcttgttgcaaaaatttgccacggccagcgcaagcacccgcgaaaaacaactcaacaaactggttgagaccatgcccttgccctgggataactaccgcgaccatgtgcaacgtgccgttgacaacatttgggtgagccataagcctgaccatgggcacgaaggggcgatgcacaacgacaccgcttacggcctgctcgggggtggtcatgtgcaagttcgtaaacgggtcgagggcgtccgcacccgtgaaatatccgcactgaaagtgattgagttttccgacagccaggcgcacccacgacacggcctcttgcccagtggcgaacccaggccctacaaaggctacaagggcaacagcaactactgcatggaaattgttcgcaacgacaaggggaaatgggaaggcgaagtcgtttcgacttttgatgcctaccagctggtgcgccagcatggtctggctcggttgaggcatcccacattgagtgtcagtggcaggccgctggtgatgcgattgatgattggagacactcttgcgttgactactgaagacgacccaaagatgattgcccgaattacgacgatcagtggaaatggtcaaattttcatggcggcacacaatgaagccaacgttgatttcagaaatcgtgacaaatcagacccattcgcttacgtttcaaaaatggcaggttctttacaaaaagcccaaggccgtcgcgttggcgtttcaccaatcggcgaattgcgtgacccaggcgcgatgttttaaaaccgagaaaaccatgacaaaactgaaagactttgaacccgcgcgttacattgatagcgaggtggcagcacaagcctaccttgagttggccaaacattctggggacgaagccttactgatcgcagcgacaaatgacgtgagcaacgcacgcaagcgatggctcgatcaccgacctgatggtgtcagcgtatctgcacacaagacttcaccatctccataaatttatccaaagctttagccatgctgggccgcatcgtcgaagtctccaacgacaagcggcacttgtcggtttaccggggttttatgctggtgcacagcacaggcgaagaccggcaagaagtgggcagggtgccgctcgatgacattgccgccctgatcgccaacgcccacggcctgagctacacgaacaacctgttggtggcgctggccgaacggggtgcaccctttgtgctgtgtgcagccaaccacaacgtggtgggcatgctctggcccatggatgggcaccaccagcaagcccaccggttcgaggctcaaattgcctgcaaagcgcccctgcgcaaacaactgtgggccaccatcgtcaaggccaagttgctcaaccaagcggcggtgttgcaagccatgggggcgacgcccgcacccgtgcaggcactggccatgcaagtgcgcagcggcgaccccgacaaccttgaagcccaaggtgcgcgcaaatattggggcttgctcatgggtcctttgtttcgccgtgaccagcaagccgacggggccaacgccttgctcaactacggctacaccgtattgcgtgcagccaccgcgcgtgcggtggtggccgctggcttgcaccccagcttgggtttgcaccacagccacgacaacaacgccatgcgactggtggacgacctgatggagccgtttcgcccggtgattgacctgatggtctggaagatgcagtttctcgggccttgtgtcgtcaacgccgacaccaagcgcactttggtgcaatgcctttaccaagacctggccagcgatgcgggccgcactccggtgttggtggcggtgcaaaaactggccacatcgctggcgcaagtcttgttgggcgagcgcaaagcgctcgacttgcctgtgccgggtgtgccgctgcccaaggcgataggcccggatgattgacaccccatgctcagcggataccgattgatgtggatgctggtgatgtttgacttgcccgtggtggaggcgtccgagcgtgccgccgccacacgcttccgactgagtttgctggacatgggttttgctcgtgcccaattgagcgtttacatgcgtttttgcaccagccatgcacaggtgcaaacctactgcaaacaagtggaagcggctctacccaaagggggccaagtcaatgtcttgcaactgaccgacaaacagtacgaacggatcatcagttttcagggcaggcgcaaagagcccgctaaaaaaacacccgatcagttcgatttgtttgggtagaaaggcaattttgaagagacgaaaacccaaaaaacccttgcaaaacaagggcttatcctgggtctagtctagacgattgggaaatgcgctctgaccggaacttcgcaaccagtacgctgcgcatccacaggagtctagacgattgggaaatgcgctctgaccggaacgtggatcgcctcaagcaagaggccgaagccagtctagacgattgggaaatgcgctctgaccggaacttgactttggtgtgggtggtgtacatgcatagtctagacgattgggaaatgcgctctgaccggaacggtgatgggttgccagcgactggagccactagtctagacgattgggaaatgcgctctgaccggaacacaaactggaggtctctggcgatccggccaagtctagacgattgggaaatgcgctctgaccggaaccgcaccagctcaccagaatgtataacggctagtctagacgattgggaaatgcgctctgaccggaactcaagcgccgtgatggtgtcggaatactttagtctagacgattgggaaatgcgctctgaccggaacccatgctggccgcacaagagtcgggtatggagtctagacgattgggaaatgcgctctgaccggaacagggctgcgcgcatgaagatcggcttgcaaagtctagacgattgggaaatgcgctctgaccggaactgcactttcatgggtgcgccgccaatgtgtagtctagacgattgggaaatgcgctctgaccggaacattttgcatctctttagttaaccactttggagtctagacgattgggaaatgcgctctgaccggaacaatggtactcagctagaacatattgtattgagtctagacgattgggaaatgcgctctgaccggaactgtatttgtaggatttacagaactgatagcagtctagacgattgggaaatgcgctctgaccggaactcaatctgctgttctttgagcttggcaatgagtctagacgattgggaaatgcgctctgaccggaacgtcgcccgccaccggccaggcctggcgctgagtctagacgattgggaaatgcgctctgaccggaacttgccgaatacagttagattcagtacaactagtctagacgattgggaaatgcgctctgaccggaacggatgttccgtgggcgacaattgcgactgaagtctagacgattgggaaatgcgctctgaccggaactactggtcaaaaagagcagatgaacaagcaagtctagacgattgggaaatgcgctctgaccggaactgccgtagcggtgacccgctgattgccgagagtctagacgattgggaaatgcgctctgaccggaacctgaacaagttcgatatccaccaagatgtcagtctagacgattgggaaatgcgctctgaccggaactatgaagctatctttggaatactgaataaaagtctagacgattgggaaatgcgctctgactggagcttgaccgagaccagaccgctatgattgcccgctttgccctgattcctcgacttccaacgcccctccatgtctgccggactgaacaacgcccaactcgaagccgtgaactatgtgtctggcccctgccttgtgctggccggggcggggtcgggcaagacgcgggtgatcacgcacaagatcgggcgtctgatcgaagccgggctggagcccaagcgcatcgccgccatcaccttcacgaacaaggccgctgccgaaatgcgtgagcgggccaagcagttgattggccgccccgccaaggatgtgttgatctgcacctttcatgccctgggcgttcgcatcatgcgcgaagacggttcgttgctgggcctgaaaccccagttcagcatcatggacgccgacgacgtggccagcattctgaaagactgcggcggcaccaccgatgcggccacggccaggcagtggcaatggacgatcagcctgtggaaaaacatgggcctgaatgccgagcaggccgcagcgcaagcacccgacgacaacgcccgggtgatcgcccgcatcatggcgctttaccaggagcgtttgagcgcctaccaaagcgtggactttgacgacctgatcggtctgcccctgaagttgctggccgaatttccggaagtccgcgagcgctggcagaccaagatgggccatgtgctggtggacgaataccaggacaccaacgcgacgcaatacgaggtgctgaaacacctggtgggtgaacgcgcccgcttcacggcggtgggcgacgacgaccagtccatttacggctggcgcggcgccacgctggacaacctcaagcgcttgccactggactttccgcagctcaaggtcatcaagctggagcaaaactaccgctccaccagcgcgatcttgcgggcggccaacaacgtgatccagcccaaccccaaattgtttccaaaaaccctgttttcagagctgggtgaaggcgagccggtgcgcgtggtcaatgccgtcaacgaagaacacgaggccgagcgcaccatctcgcgcatccagtcgatccgcagcgggcattcgctcgaatccaagcaccgcgagttcaaggacttcgcggttttgtaccgcgccaaccacatggcgaggcccttcgagcaggccctgcgccgcgccaacatcccctacaaggtgtcaggtgggcagagcttttttgacaaagccgaaatcaaggatctgtgcgcctggttccgtttgtggatcaacaacgacgatgacccggcttttttgcgcgcggtgaccagccccaaacgcggcatcggccaccagaccctgggccagctgggcacctttgccacccaatacaaactgagcctgtttgaagccttgtttgcgggcagtctgcccagcgcagtcaatgcccgctccgtggctggcctgcatgagtttggccgctacatcaacgacctggaacaccgcgctcgccaaaccatgggcaaagaagcggccctggcctttttgctggaatggctgaaagaaatcggctacgagcagcacctgtacgacggcgaagacaacgaaaaagtggcctcggcccgctggaccaacgtgctggaattttgcgactggatggccgggcgctgtggcggcgaaatcgaggacgccaccggtgcccaagccaccgaaatcaaaagcctgctcgatgtggcgcaaaccatttcgctgatctccacactgagcgagcgcgagaaagaccaaaacgtggtcacgctctccaccctgcacgcctccaaggggctggagtggccgcatgtgatgctggtgggcgtgaacgagggactgttgccgttcaagctgggcgatgacgacacgcactcgggcaaaagcgatggccccatgagcgaaggcattttgctgcgcctgcaagaagagcgccgcctgatgtacgtgggcatcacccgggcccagcgcagcctggccgtgagttggacccaacggcgcaaaaaaggccgtgacaccgtggccgccctgcccagccgcttcattgccgaaatgcggctcgatgaaaacaccacccgtgaagacccacgcgaaaagctcaaagccttgcgcgccgagtttgcccagcgtgttgcagatgccgcagcacaggccaaaccatgacacgacaaaccagccgaaccacctcaggccgctggcttggcgcctcgatcgccttgctggccctcagcgcctgcaacctgatgcccacgcgcagcgcttgtccgactgcacaaaacttgacgcccgagatgctgttcggccaatggaccgttcaaatcgcaggcgaaatgccttgggcattggcattgggtccgcaccaggagcacacaggcagcctgcgtggcgaactgactcaaggcaatcagcgccatgcggtggtggctgacctggacgatggcgacttcacgctggaagaaacccacgacggccagcgcattgccgcgacctggcaaggcagcttgcccgctgcaggctgtgggcgtcaaattcaaggccacaggacactgacaggccaaaacagccgcagcttcctcatcacccgcacaccttgatggccccgcatctgcgggtgtgtgacctaaccgggtagatggtgctggatttctcacgcaaaatacaaggctccatatccagggcatttgattgatgaacgcgtacaccgacctccaggcacccccgaagcgaaagctcatcggtctggtgggtgtggtcgttttacatgccttgcttttttgggccatccaggccgggctggcccgcacagtcattcaaaaaatgccgacggtggtgcaagcgctcttgctggaagaaaagcggcccgaaacgccgccttcgccccccttaccgccaacgccaccctcaccgcccgcacccacgccccccaaaaccacaccgctgcccccagcctttgtggcgcctgccgatacaccggcgccaactgcagcccccaacgccatcgcagcggtcaccgccacgccttccgcggcagcacccgcaacggcaacagtgaccgcacccaccgcaccacctcgtccgcccgtgcgcacagtggccagcgtcaacatggctcagtgtgaaaagcccgactatcccagcgcgtctaggcgaatggaagaagaaggcacggtgagcttgcgttttctggtgggcgccgatggcaaagtcatccagtccgaggtcgagaaaagctccggctacaaacgcctggatgaagcggctcgggccggcttgtcaaaatgccaatttaagccggccatggtcgatggcaaaccagagcaagcctgggccagcatcaaattcacctggcggctggaatgatgccgcctgcaacttcccacggcccagcaacgtcacacgccgcagccaattcacatgatccaaagcaaaggatgcttaccgatgttcacctttaaaaacaccctgactggtgccgctttgtgggccagccttctgatggcgggccacagcttggcagcgcccccccaagaagcaggcgcagcgccaaaggcaagcagcgcagcggcaacccaagttgcagccccagttgcagccactttggcaccggccgcaagcgctgcgcctgaagacaacccctacggcctgggcgccttgtgggggcaaggtgatgcggtggccaaaggcacgctgttgatactggtgctgatgagcatgggcagctggttcgtgatcttcaccaagttcacagagcaatccaggatgcagaaatttgcccaagccgcgcaagccaacttctgggcatccggttctgttcgggaagccgccgacgcgctggatgcagccagcccctttcgcttcatggcagagaagggcctggagggcgccagcaaacacgacggattgctcggcaacgtggacttcaacacctgggtcacgatgagtattcagcgggccatgggcaccgtgcaaagccgcatgcaggatggcttggcggtgttggctaccgtgggctccaccgcaccttttgtcggcttgttcggtactgtatggggcatctaccacgccttggtgaagatcggcatgtcgggccaggcgagcatcgacaaagtcgccggccccgtgggcgaggccttgatcatgaccgccattggcctggcggtggccgtgccagcggtgctgggctacaactggctggtgcgccgtaacaaggcggtgatggaagaagtcaacgcctttggcgccgaccttcatgccgtcttgctggcctcggcgaaaaaataatggccatgaacctcggccccacgctcgggccccaggacgaagacgaggtgatcggtaccatcaacaccacccccctggtggatgtgatgctggtgctgctgatcatcttcctgatcaccattcccgtggtcaccacctccatcaagctggatttgcccaaagagcaaaacgtggtgcgccaagccaagcctgaaaccctgatcatctcggtcaacaaggcagggcaaatttacctgtacgacacaccggtgaaaaacacaaccgacctgctggagcggctgaagaagttttcggccatgaagccccagcccgaggttcaaatccggggcgatgcacaaagcgaatttgaatcggtcgggcgcgtcatgtacgcggtgcaacgtgccggcatcacccaagtcggcttcatcaccgacccggccccctgaacctccaaggacacacacatggccatgaatttgggcaccggcagcagcgatgaacccgaggtgatgatggacatcaacaccacgcccctgatcgacgtgatgctggtgctgatcatcatgctgatcatcaccatacccgcgcagttgcactcggtgaatctggacatgcctgtggccacgagcacgccccagaaagtcgaccccgtggtggtcaaaatcgacatcgaggccgacgccagcttgcgctggaacgggcagatcttgcccaacaggcaagcactggaaaccaaattgtcggaagccgccgccttgcagccccaacccgagctgcacatccgttcacatggcaaagccaagtacgaggcagcagcgatggtgctggccagtgcgcagcgctcgggcctgaccaagctgggcattgtgggcagcgaaagatttgccaactgactcgctgctcgcccaagaaaaaagccgccacaagagcggctttttcatggggtaacccaacgatcagtcggcgtatttgcctgccgcatcgacagcagccttgatcttgatcatttctgccgccacaaacttcttgtgctcagccgggtcggaacgcttgtcggtcaccaccaaagcgcccaagtcctgattcttcttcacaaactctgggtctttcaaggccttcttcagggcatcgttcaatgttttggtgaccgctgcaggcgtgcctttgggggcgtacaaaccgtgccagatggtcaggtcaaaattcttcaaccccatctcctgcaagctggggtagtgcttgagcacggcgtgcgtgcccagtggcttggcggtggtcaccgcaaaagccttgacacggccaccttcaatttgcgccacggtgttggtggtctggtcacacatgacatccacctggccgccaatcagcgcggtcatggccggcgccgtgccgccaaacgggatggtggtcatcgcgtctttggtctgcaggttggactgccacagcaggccgcaaatgtgcgaagccgatcccagacccgcatgggcaatgttcaacttgccagcgttggcgcggatgtagttctcgaagtcgcggtaggtgttggccggcaactggggcttgccgatcaaggtcatgggcacatcgttgaccatgcccaaaaactcaaagtcttccagcggcttgtaggcgatcttgcggtagagcgccggtgtagcggccatgccgatgtggaacaacaagagcgtgtgaccatcggggttggctttggccaccttggtggcaccgatcgtgccgccagcacctgcggcattttcgaccacaaaattgctgccaggaatctgctttcgcatggcctcggccaagtcgcgggccacacggtccgttgggccacctgcggtgaacggcaccacgatggaaacaggcttggaacctggaaaggcctgggcttgggcgcccacagacacagcagccaacgcggcgagggcaatccattgcttcattcaaacactcctaaaaaataacttaacagtttaaaaggataacaagtgtcattaaatcgcggaaagtacttagccacttacccttgtttgaccttggctttgcaatggaattagcccctctggttgcccgccttactggtagctgcgggcgtcttcaatgaccttgccgtcattggccagactgccaggggccaccagatggacgtcgccacgcaatttggtcacatcgcgcacagcctcagagaccctctgcttgagagcgtcgtcggccaaacggtcggtttccacgtgcagcgccatctggtcattggccatttcaccagtcaccaccaaacgggccttcgtgagttcgggaaagcgtttaacgatttcggccacctgagccggatgcacaaacatgccccggatcttggtggtctggtcggcgcgacccatccagcccttgatgcgcaaaccggtgcgtcccgtagggcaggtgccagtcaatatggccgacaggtcacccgtgccaaaccgcaccaaagggtagtcggggttgagcgaggtcaccaccaactcacccacttcgccttcgggcactgggtcgccggtgccagggcgcacgatctcaacgatcacgccttcgtccagcaccaagccttcacgcgacgccgtctcgtaggcgatcaggcccacatcggccgtggcgtagcactggtaggcgtccacgccgtgcgctgtgatccagtcgcgcaggctgggcgggaaagcctcgcctgacaccaaggccttgcgtaagctgggcaaggtcacgcccatctcggcggttttttc

SEQ ID NO: 1859 - DNA, 16066 bp, synthetic construct
  source 1..16066: mol_type = other DNA
  misc_feature 1..16066: note = Synthetic
cgcaagacggtttcagcctgaggctggccgccgaatgggatcacacgcgtgcgttgaagggaacggaccgtccgaatgccacgcagggtcgagttggctttttgaagggcggggtgcgctatgaagccgacagctcagaggtgtcgggtttcacctcaccggccttgttgtattcacccggcagcgccccccccatgctcagcggtttgttcaaagagggtgcgtgcacaggcaacagcgtgatttacagaagctatgctgggggttgcaaggccaatcccttgccaagctatgacatctatcctgaaagtcaaagccaaaaagtgcacgcttcaggcgaggtgctgttgcccaatggcgccacgctctacagtgagttgtattacgcccagcaaaaaacacagatgggcgtttcactctggccaaggatgagtggacggattgtcaacgaggcaggctctcccggttacgctgagatgctgtctgccgggctcaatcccgccaatgggcaatatttttggcgcgccgacttgcccgctttgcaggagcggtttgacaaaacactgtcgcgagtgacagttggacttaaaggggaactgcaagggtggagttaccacgccagcttgtaccaaagcctctcgcgtgcgcagtatgactatgaccacccggatctcaacggcagtctgggtttgcagaccaacaaacctttgaccaatcccaacttgttgaaaccgctggatgccaccaacccattgactgcgcaactggaggccttgcgcaacagttggcaaccttatgtgttgggcaagacaggtttgacagcactcgagttgcgcgcctcacggccatggtttgaaatcaacggcaaggacgctatgctgggctggggcctggacgcacgacaggaaaccgtgagttccaacaaattaatggacaccctgttgcccgatttcagtaagaagcgcaacgatgtggcggcctacgcagaattgcaaatgcccctgcggcctgattgggatgtgatcgcatcatggcgcacagaccggtacagcgatgtgggcagcacgaccaatgccaaacttgccagccgttgggccattgaccccaagtgggcactcaggggttcagcgggaacaggtttcagggcgccttctgtggggcaaaccatcaccgtagcgaacccgtacctcaaccaaacgctgtcaaatttttcctgtaccaatgacctcaataccgtggccgccgcgttggcggcacaaaccggcaaagatgttcggtgcagggctggtgatgtgttcaatctgttcaccaatggcaatcctgaacttcaacctgaaaaatcgttgcaggccacactgggcttggcgttcacgccccacagaaacctcacactgacggccgactactggcgcgtgcagatgcgcgatacattgcagttcatgtcgtacacctcggtgttggcggaccccttcaaataccagaaccagttcgtggtggatcccgcaaaaatcctttatccaccaaccaacacgtacttcaaccgcatgggcatgctgctgcaaatgcagaatttgggccagtccctcaaagaaggcattgacttggaagcgcactatcgccatcccggagactgggggcgttggcattggggcatgaaggccacggcgatgctccagtccaaaacgaagagcacaccggatgctgcgtggtcgtccgatctggcggcttacgcagcagccactgatacggtggtgccccgatggcgcagccaatggacttggggcttggagcaggcgaacgcctattggcagatgacggtgaactacagcagtggctacaccgataaaaatgtggatctggcgttcaataccgtgacccaaaagttagaaacagtgtcgggtttgcaggtgcccggatttttgacagcagacgccatgggcacataccaactcaatgcgtccacgcaaatccgggttggcgtgaacaacctgttcaaccggcaaccgcccatgtcgttctattccacctcttcgtttgtctggggcgtcaacagtcagacgggcagtttgttcggccgcacagcgcaagtgggcatgacggtcaagttttgaggcggccaattttgccgctgcgcgtcacgccacgttcttcaagggttgaccgcccacccagcgctgaaagttgtccaaaaacatctggttgacccgctgggcattgccatccgagtggcctgcggcgtgtggcgtgaccatcacattgggcaaggtccacagcggggatgtggcgggcagaggctcgtgctcaaacacatcgaggaaggcgccgccgaggtgtccgctttgcagctggttgatcagggcatcttgcaccaccacttcaccgcgtgcgacgttgatcaggtgcgcgccttgcggcagttcctgaaaaacttgggcattgaccagaccgcgtgtggtggttgtgagcgggcaggccagaaccaaccaatcggtgcgtggtaacacagtgttcatctgctcaaaccgcaccatctcgacgccaccttggggctgggcgtcatgcgtgcgcaccgcgatgacgttcaggcccagtgcggacaagagctgggccagttcttgcccgatggggccccagccgacgatcgtggccgtttgcccaggcaagtcccgaggcatgcgcccgacgcccaagagcggcaaccactcgcgcctttgctgctgtgcccagagcatcgggaagcgtttgttcagggccagcaatcccgccagtgccatggccgctaccacgcgggcgttggcccccgaagaggtgctgacctgcacaccgcgttgctgcagcgcctggtaaaccgggcggtccgcgcctgccgagtggatgtgcacccactgcagcccggcattgttcagcatcaggtcgtagcaggcttgcagctcagggtgcacctcgtgcttggtcgaggtgcccgtgacttcgcgcgagatgaaaaccgcgtggatgtcgcgccgctgcgcggccaccgccgactcgatcgacacgagttcgatgtccacgccttggacgttttggaggatgcgggccccgagttcgtccagcatcttctgggacagcatcaaccgccgtggcgttcgcatgtgcaggctcactcggcgcgtgcgcccgactcgcgcacgatggtgcgccacttgtcgtgctcacgttgggtgaactgaccgaactgggcgggcgtgccgcctgcggggtctgcgccctgcgcgaccatttgctgctcgatcgccgagagggtcagcatctcgttgaccgccttgttgacggcgttgatcacggcttcgggggtgcctttgggggcaaagaagccgaaccacgaacccgcttcaaaattggggaatcctttttcgaccacggtgggcacatccggcagcgagcgtgagcgcttgaggctactcacagcaatcgggcgcagcttgcctgcggtgatgtgctgcatgaccgaggggatggtggcgaacatgaactggatgcgcccggccagcaggtccttgagcgcatcggcgcctttgtacgggatgtgcgtggcgtcaaacccgacacgtttgctcagcatgaagctcgacaagtgcgatgaagtgccaatgcccgtggagccgtagttgagcttgcccgggttggctttggcgtaggccaccagctcgtccatgttttgtgcgggcacgctgggatgaaccaccagcacgttgggcacatcggcgatctgcaccacgggcaccagatcggtcagcgggttgtagggcagcttgccgtaaagcgtggggttgacggcgatgggccccaccgaattgacgagcagcgtgtagccgtctgcgggcgcgcgcaccacgagctcggtgcccaggttgccgccagcgccgggtttgttgtcgatcacaaagggctgcttgagcttctcgctcagttgctgcgccaccatgcgtgccaggatgtcggtggtaccccctgcggtgaaggccaccaccaccttgacgggtttgttggggtagccctgcgcccaggcaggggccgtggcccaagccagacagccagccagcaacagagccaggcggctcatgcggcttgcgcatggtgcccgaaatggcaaacggatcatcttgtctcctgcaaaggggcgccccgacacttgttgtgccggtgcgctgtggggggtgcgactcaggtcttgtagttcgggtccagccgatcgagcttgcgcagcaaggcaggccactccatcaggccataaggcctgcgcgtgctgggctggtagttgttccaggtttcttcgagaaccggttgagccaatttgaccaagggggtgttgcaggccatggccgctaactgcgtgtggcaggcgagctccaggcggtgcatccagttgaaggcctcgcccaccgaacggcccaccaccaatgcgccgtggttgcgcagcatcagcgcttcgctttgacccaggtcatccagcaaagaaacttgctcttgttcgttgagcaccacaccctggtagtcgtggtagccgattttgagaaagcgcatggccgtttgcgtgatcggcagcaggccgcattcgagcgcagacaccgccatcgaggcccagctgtgggtgtggatgacgcaggcaacttcggggcgagcgttgtgcaccgcgctgtggatcacgtagccggccttgttgatgccgtagttcagctcgccaaagtcgggcttggacaggatgtggccgtgggtgtcgatcttgatcaggctcgacgccgtgatctcttcgtacatcatgccgtaggggttgatcagaaacgccccgggttcatctgggacatggcacgagatgtggttggccatcatgtccgacatgccgtacaggtccaccagccggtagcaggcggccaggtccacgcgcgcttgccactcggccgccgtgcaacggtctttcatcgattcgatttgaagcacaccgtctttcaccatcttgcacactccttgtcagtcgagtttcacacccgcgctcttgaccagtttgacccagaacttggcatcttcctgcaaaaaggccgcgaactgctcaggcgacttggacaattccacatcggtgccctcgcgcgcgagtgtggccatcacgttggcctgttccatggccgattgtgcggcctcaaaaatccgcttcaccaccggtgcgggtgtggccgcaggcacaaagatgccgtaccagaattcaatgctgtactcgggaaggcccgcctcgcgcatgccaggcacgccgggcaccagtgctgtgcgctcgcgggtgctgaccgccaggcccttgagtcgcccggcctgcaccatgggcagcaccgaaggcggtgtgccaaaggtcacctgtgtgtcgcccgcgatcagcgactggatggccgggccacccccacgaaacgggatgtgcgtgatgtccacattggccagctgtgtgaagagcgcgccgcccaggtgcggcgccgagccattgcccgaggtggcgtagttgatgcgaccgggctcctttttggccttggcgatcaagtcctgcaccgagttgatgccgatgttggggttcgccgcgatcaccaagggcgaggtggtgattttggtcaccggggccaggtccttggggctgtagcccagcttggcgttcagtgccgggttcaccgagatgctgctggggctggcgatcagcaccgtgtagccgtcggccggggccttggccacgatctcagcagcgatgctcgagcctgcacctgcgcggttttcgaccaccacgctggtgcccagtgcgcgcccaaaggcgtcgctcatcgagcgggccacatggtcggctgcgccgccgggtgcaaagcccaccagcagcttgacgggtttgttcgggtaggttgcggtggactgcgggtgtgcgcctgcgcccgtcagggccaaggccaaggcggcgagtgcgtttcttgtgttcatcgtgtgtctcctccgtgtgggggtgtggtcagccgatgctcagcacaatcttgcccgtgtgctggttgctctccatgtgcgccttggcctgcagcatggcgtcaaaagcaaaagcgcggtcgatcattgggtggatgcggccatcggccaatgcgggcaggatttgcgccgcaaatttggcgatgccgtcggcccgctgggcaggcgtgcgcagcttgtttgacacgccaaaaaccaccaggcgcttggcgtgcagggcttcgaggtcaatcggcgcggtgagcgtgccgtccacataacccacaatgcccatgcggccttgaaacgccagactgcgcaggctctcggcaaacaccgtgccgcccaccgtgttgacggccaggtgggcgccttggccttcggtggcttgcatcaccgcgccatgaaaatctggcgcgcgggtgcagatgcccacatccagccccagggcttggagctggtcaagtttggcttgcgagcccgaggtgccgatgaccttggcgcccagcactttggccatctgcaaagaagccacgcccacgcccgacgacacgccgttgaccagcagccactggcccgcttgcaattggccctgcagcaccagcagatcgtgcgtcaccaaaaacgtcagcgggatcgaggcggcttcttcgagggtcaggcgtgcgggtacgggcatcgcctcgcgcacgtccatcaaggcgtattgcgagaacgcaccggggcagcggcccatcacgcggtcgcccgccttccagcctgtgacgccctcgcccagctgcacgatttcgcccgcgccttccatgccagcggctttggcgctgcccgtggcgtgcaggccgtggccgtggatgaattcaccccggttgagcgaggccgcgtgcattttgaccagcacttggcctgcgccgggctggggggtgtcgacatcgcgcagctccaagcgtgagccgctgtcgtccgagatcgtccaataagacttcatgtgtgttctccgtggcgtgtctgaacgctcagacgcctttgaaagcaggtttgcgtttttccatgaaagctttgcggccttcggcgtagtcggcgctgtcaaagcagccgcgaatgagttgctggcaatgcgccaaatcggcctcgggcgaggctttgaggatttcacgcgtgatgaacttggccgcctggagggtcagcggcgcgttttcatcgagtgcgcgggtgtattcggccagcagctcggccaagccttccacagctgcgatgcgcgagaccaggcccaggcggtgcgcctcggcggcgtcgatgcggcgcgccgtgaaaaacaaatctttggctgcaccagggccgatcaggtcgaccaggttcttcatggccgagtaacggtagcccagccccaagcgacctgcaggcaccgagaacaccgcatcgctcgcggcaatgcgcatgtcgcagctgatggccacgttgatgccgccgccaatgcagtagccgcggatgcaagccagcgtgggtttggagaagttgtaaatgcccatgagcgcggcttcggccatggcttcgtagcgggtcacggcttcttgggcggcgcgcatgtcttcaaactgcgagatgtcggcgcccgagacgaaagccttttcgcccgcgcccttgaataccaccaggcgcacacggctgtcttgctcggccaagtccagcaacacgggcacggcctcccacatgtccacgctcagggcgttgtggcgtgcggggttgttgaactcgatgaacagcgtgctgccgtccagccaggtgttcacccgttcggtgggtgaggtgtaggtgatgtcgctcatcaatagactccggtggatttgaggcgggccaggtctgcggcgctcacgcccagctcgcccaagatttcttcgctgtgctcgccgcgccgtggcgtggtgcgggcgatggtgctgggcgtgcgctcgagctgcacgggttgacccaccagcctctgcggcccttggtggggtgagaccacgtctttgaccatcttcaggtgctgcacttgcggctcttcaaacaccgcgtccatgctgttgatcaagccgcaggccacgccgccgtcattcagtcgttggatccagtaagcgcagtcctgcgcggccaggcgttcgttgatctcggcgttgagcgcgtcgcggttgaccgagcggcggggcttgtctttgtagcgctcgtcggtgacccactgcggcgcacccaaaatctcgcaaaaccgctcccaaattttggagccaaagacggcaatgttcatgtagccgtcgcgcgctttgtacacacccgtggggatgctggtcgggtgaaagttacccgcctgcgtggccacttcgccgtcgatcaaccagcgcgaggtctggaagtccatcatgtagaccatcgattcgagcagcgaggtgtgcagccactggccctggccagacttttgccgctcgatcaccgccaccaaaatgccctgcgcggcaaaaatgcctgcacacaaatcggcaatcgggatgcccacgcgcatcgggccttcgccctgctggcccgtgaccgacatcagaccacccatgccttgggcaatctggtcaaagcctgggcgctggaccagcgggccggtttgcccaaagcctgaaatgctggcgtagatcagccccgggttgtcgcccttgaggctgtcgtagtcgatgcccaggcggaacttcacgtccgggcggaagttctcgaccaccacatcggctttggcgatcagctgcttgagcatcgaaatgccttcgggctccttgaggttgagcgtgatcgagcgcttgttgcggtgggtgtactggtagtccgagccctcttgcccacccagcgtgtcgtcgccgcgcatgtgctcgggcatttgcacctgcaccacatcggcgccccagtcggccagttggcggcagcaagtggggccagcgcgcacctgggtcaggtcgatcacgcgcaagtgggaaagcgccgcagaggcgggaatgtggggcatggcggttgtcctgcaaagagccaaaatcagctcgaagtgtcgcccgaatcgccttgaagtgtcaacactttggccaaattgtcgacacaatggcagggttgatgcccttttttggaggcagctcctgtaccatcgggcatccattcccagcgttcaacagcacgccattcgcatgacctccccggccgacaaacccgagcaaaacctccccatgtgggtggcggagcagctcaagcaatggatctacacaggtgaattggcgcctggctcgcggctcaacgaagccgcgctggccctgcgcatgggcacaagccgtggcccggtgcgcgaagcaatccgcatcctcagtgggcagggcctggtcaccgccgtggtcaaccggggcgtgttcgtgcggcagttttcgctgcgagaaatgctcgagacctacgagctgcgcgccatggtgtttggctttggggccgagcacgccagcgaacacctggccgaggccgacaagctgcaatttgaagagttgctccaaggcatggacgaagcctgcgagcaggaagacggcagccgttactacgagctgaacctgcgctttcaccaactgatcatgcgcctgtcaggcaaccagcgcgcccaggccgcgtatgacgattacgtcaaggagctgcacctcttcaggcgcaaatacttcaatgccccgggcaacatgcgccgctccaacatcgagcaccgccagatctacgacgccatcgtcaaaggcgccaacagcaaggcccggtcagcggctgaaaagcatgtgctcgaagggcggcagaggttgatgcggagtatggatgtttgagtcagtgctctaagcaccccatggaaaagacgaaaggccgcatgtagcggcctttccatttggtgcatctttctgcttgttagcgtccagagcgcatttcccaatcgacgaaatgtgcgacaaatatagcacaatgaaactcattttaagattgaatgagtgaggaaaaagctgtgacccaaatgcgttaccgattggccctggacctcggctcaacttctcttggctgggccatggtgcgaatcaactcacaggacgagccgtgcgctgtcatcaaagcaggggtgcgtatcttcagcgatgggcgcaatcccaaagacggttcatcactcgcggtgagccgccgcgaagcccgcgccatgcgccgccgccgcgaccgtctgctcaaacgcaaaaaccggatgatggccaccttgctgaagcatggctttttcccacacgacgaatctgcacgcaaagcacttgagaaaaccgatccgtttgttttgcgcgccaaaggactcgaccaagcactgctgcccgaagagtttgcccgagccttgtttcacattaaccagcggcgaggcttcaagagcaatcgcaaaacggacaaaaaagaaaccgatggcagcgcactgaaaaaagccattgggcaattgcgtgaagccatggagaccacaggctgtcgcacggtgggcgaatggctctgtgcgcgtcaccaacaaggcttgtcggtgcgggcgcgttaccgcgaaaaccgcatcaccaaagacgacggcaaaaccaagatcgaaaagagttacgacctctacattgaccgcgccatgatcgaggccgagtttgatgcgttgtggttcaagcaaagcgaactcaaccccgagctgttccatgagaccgcccgagcagaactgaaagactgcctgctccaccaaagacctctcaggcccgtcaagccagggcgctgcaccctcatgcccgaagaggagcgtgcaccgctggccctgcccagccaacagcgttttcgcatctatcaggaagtgaataacttgcgcttgttgcgagagggcttgaacgaagacactcttacgctgacgcagcgcgaccaactgatccaagcgctcgaaaccaacagcaaacgcagcttcacgcagattcaaaagttgctcgggttctctggccagttcaatctgcaagacgaaaagcgcaccgaactcaaaggcaacagcaccagcgccttgctgtcgaagaaagaattttttggcagccaatgggtcagctttaacgaggctcaccaggacgcgatcgtcatgcagttggtgtcagaagaaaacgaagcccgattgatcgcctggctgaaagccgaaacaggtgtggatgagatcactgccgaacgcatcgccaatgcaccattggccgaaggatatggcagcttgagtgccaaggcgcttgaaaaaatcctgccggccttgcgcgctgacgtcatcacttatgacaaagcggtgttggcggctggctttgaccaccacagccacatcagccatgccgcaactggcgaaatcttgcccgacttgccttactacggccaatacctccaacgccatgttggctttggcacgggcaagcccgaagaccctgctgaaaaacgctacggcaaaatcgccaaccccacagtccacatcggcttgaaccaggtgcgcactgtggtcaacgccctcatcaaccgctatggccaccccagtgaagtgattgtggagctggcccgtgacctcaagcaaagccaagagcagcgcaaagacgagcaaaaacgacaggctgacaaccagcgccgcaacgaacgcatgcgcatggtcattgccgatttgctcaacaccatccctgagcgcgtccgtgccattgacttgcaaaaaatgattctttgggaagagctcagcttcaatgtggctgaccgccgctgcccctacagcggtgttcaaatcagtgcgcaaatgctgttcagcgaccaggtagagattgaacacatcttgccgttttcacaaacgctggacgacagcctcaacaacaaaacggtggccatgcgtcaggccaaccgcatcaaaggcaaccgcacgccttcagaagccgcagcggattttgaagcccaaggctggtcaagcgcagacatgctccagcgcgccagcctcatgcctaaaggcaaacgctaccgatttgcgcaagacggctttgaccaatggctgcgagaggacaaaggctttttggcccgcgccctcaacgacactcgtcacctcagccgtgtggcgcgtgaatacctgagcctgatttgtccgcaaggcacccgcgtgattccgggacgaatgacggccatgctgcgggccaagtttggcctgaacgacatcctgggtttggatggcgaaaagaaccgcaatgaccaccgtcaccacgcggtcgatgcctgcgtgatcgccgtgaccgaccaagggctgctccagcgatttgcacaggccagtgccagtgcgcgtgagaagcaactgaacaaattggtggagtccatgcctttgccttggcacagctaccgtgaccatgtgcagcgtgcgatctacaacatttgggtcagtcacaagccagaccatgggcacgaaggagccatgcacaacgacacggcctatggcctgttgagcggtgggcaagttcatattcacaaaagggtggatggcctgcgtgtgcgtgaagtcgccgccctcaaagtcattgaattcagcgatgcccaggcctcaccccgccacggtctgctgcccaacggggaacctcggccctataaaggttacaagggcgacagcaattactgcatagaaatcgtgcgcaacgagaaaggcaagtgggagggtgaagtggtgtccacttttgaagcctaccaattggtccggcaacatggtcttgctcggctgcgccatccgaagttaagtgtcaatggcaagccgttggtgatgcggttgatgattggagacgtattagctttgagcatgccaaacaatcccaaaatgattgcccgcattacaaagatcagcgggaatgggcaaattttcatggccgcacacaacgaagccaatgtcgatgcccgcaatcgggacaagacagatacgtttggctatgtttccaagatggcaggttctttgcaaaaagccaatggtcgacaagtcagtatttcggcaatcggtcagttgcgcgatcccggtttgatcgattgattcacaaaagtatctaaatggatacaatcaacccgttccggctttccgaaacagcgaccttcagccgctggctgactgggttgaaagactaccgtgccaaagccgctatcgttttccgactcaagcaagttgccgctggacattggggtgatgtcaaaagcgtgggcggtggcgtgtctgaactgcgttggcacattggccctgggtacagggtttatttcactcgcaggggtgaacacatcgtgttgctgttggcgggcggcgacaagtccagccaagccagagacattatcaaagccaaagatcttgccaaggagtatccagatgagcaaaaccactgaatttgacccagccagctaccttgacagcgaagaggtcattgccgagtacctcaatttggcgttggccagtggcgataccgatttgcttttgtctgcgattggtgatgtggccaaagccaaaggcatggcccaaattgcccaagatacaggtttgggccgagaaagtctttacaaggcattgagtgcgggcgccaagccacgctttgacacggtcttcaaagtgctgcaagcgttgggtgtgcaaatgcacgcgcatcctgtgccacaacaaccctgacaagcgctgaacgccgatgttgggccgcatcgtcgaagtctccaacgacaagcgacacttgtcgctttatcggggcttcatgctggtgcacagcacgggcgaggaccggcaagaggtcggccgtgtgccgctcgatgacattgctgctttgatcgccaatgcccacggcctgagctacaccaacaacctgctcgtggctttggccgagcgcggcgcacccatggtgctttgcgccgccaaccacaacgtggtcggcatgctttggcctctggatggacaccaccagcaagcccaccgctttgaagcgcaaatcgcggcgaccttgcccactcgaaagaaactgtgggccgccattgtcaaatccaaattgctcaaccagtccgcagtgctgcaagcaacaggagctgcgcacatgccggtgcaggcgctggccaagcaagtgcgcagcggcgatcctgacaacctggaggcgcaaggggcgcgcaaatattggggcttgctcatggggccgctgttcaggcgagaccagcaagccgacggtgtcaacgccttgctcaactatggctacaccgtgttgcgtgcagccacagcgcgtgctgtggtggcggcaggcttgcatcccagcttgggcttgcaccacagccacgacaacaacgccatgcgtttggtggacgatttgatggagccgtttcgtcctgtgatcgactggacggtgtggcagcttcaaaatagtggcccgtgcgtggtcaatgcagataccaaacgtgcgttggtgcaaagtctttaccaagacctgctcacagatgggggccgcaccccggtgctggtggccgtgcaaaagctcagcacttcactggcgcaagtgcttttgaacgaacgtcagactttggatttgccactgcccggtgtgcccgttcggcatgttgccgagccggatgattgagcgccatgctcagcgggtaccgactcatgtggatgctggtgatgttcgacttgcccgtggtcacggcccccgagcgtgcagcggcgacccagttcaggctgagcttgctcgacatgggtttcagccgatcacagctgagcgtgtacatgcgcttttgcaccagccatgcgcaagtgcagacttattgccaacgcgtggaagcggctttgcccaagggtgggcaagtcaacgttttgcaaatgaccgacaaacagtatgagcggatcatcagttttcaaggcagacgcaaagagccggcgaaaaaaacaccagatcagttcgacttgttcggatagggcggcgattttgaagaggctcaaaccgaaaaaaaacacatgcaaaacaaggacttacggttgtgcgagtctagtcgattgggaaatgcgctctgaccggaacactaacacgcctttcaacggcttgctgtcaagtctagtcgattgggaaatgcgctctgaccggaaccttgtcatcatgctcgacgagttcaccaagagtctagtcgattgggaaatgcgctctgaccggaactcgcgcctaagcgtatgcgttcgggcggtaagtctagtcgattgggaaatgcgctctgaccggaacagggttacggtgcgtatgaaggcagagctgagtctagtcgattgggaaatgcgctctgaccggaacaatgccaaccagcttggcgcgaggaccgatagtctagtcgattgggaaatgcgctctgaccggaactgccccgacgattctgtgctgcaggtcagtagtctagtcgattgggaaatgcgctctgaccggaacacttatgactggctcaacagcaactgttgtagtctagtcgattgggaaatgcgctctgaccggaacaatatccacattgtccacaaggccctgcaagtctagtcgattgggaaatgcgctctgaccggaactctcattgcttatccagcacacggcaagaaagtctagtcgattgggaaatgcgctctgaccggaactacagggccacgggttcgacaagcagcactagtctagtcgattgggaaatgctctctgaccggaacccagccttgctgcaatggcacggaaagcctagtctagtcgattgggaaatgcgctctgaccggaaccggtgttgcgctcgtccatcgcgcccatggagtctagtcgattgggaaatgcgctctgaccggaacccttgtgatgggttgggccacacaaacaaaagtctagtcgattgggaaatgcgctctgaccggaacttgtcagtaatgccaacgcgccctgtggatagtctagtcgattgggaaatgcgctctgaccggaacgtcattccgcctgtgctggtggccgactacagtctagtcgattgggaaatgcgctctgaccggaaccagggcttcagg

SEQ ID NO: 1860 - DNA, 15621 bp, synthetic construct
  source 1..15621: mol_type = other DNA
  misc_feature 1..15621: note = Synthetic
gaagccatggtcatgattgatgagcgcaaggcgcgcgaaatcggcttgttccgtcagggcaagttccgcgacgtgaagctggccaagcagcaggccgccaagctggaaaacatgttcgagcagatggccgaaggcgaagtcaagtcgctcgccatgatcatcaagaccgacgtgcaaggttcgcaggaagcgctggtgcactcgatgcaaaagctctcgacttccgaagtgcgcgtgcaggtggtccatgcggcagtcggcggcatcagcgaatccgacgtcaacctggctgtggcatcgaaggctgtcatcatcggcttcaacacccgtgccgatgcgtcggcgcgcaagctggccgaagccaacggcatcgacatccgctactacaacatcatctatgacgctgtggacgatgtgaaggctgcgatgtcgggcatgctggcgccggagaagcgcgaacaggcgttgggcctggtcgagatccgccaggtgttcaccgtcagcaaggtcggctcgatcgccggctgctacgtgctcgaaggcatggtcaagcgcggcgcctcggtgcgcctgttgcgcgacaatgtcatcatctggaccggcgaactcgattcgctgaagcgcttcaaggacgacgtgaaggaagtcaaggccggcttcgagtgcggtttgtcgttgaagaacttcaatgacatcaaggaaggcgaccagcttgaggtgtttgaagttacggaagtagctcgcacgctgtaaaaattgcgagcggtgggagcatgctgacgaagcgtgtgttcatcgcaagcgtgtgcatacgtcacccctcgcccgcaggcgggagaggggcgggggtgaggggcgttgtgccctggctcatcgattcagagcgcaaccgtcggatagttggctggtggcgccttttaagcggtagccaaatcgcgaaccccctcacccccacccctctcccgcctgcgggagaggggagtttaggcgctcgcctcatttagttttactcaggttcgaaggtgaaccaccatggcaaaacacagcaaatccatccccgcacgcggcttgcgcgtgcaagaccagatccagcgcgatctgtccgaaatcatcgccttcgagttgaaagacccgcgcatcggcatgatcacgcttactgaagtgcagatcacgcccgattatgcgcacgccaaggtttacttcacgaccctgatcgataatgaagaggcggtgaagaacaccttgaagggcttgcagacggcgtcgggtttcatgcgcaatcagctgggcaagcgcctgcacatccacacgctgcccgaactgcacttcgtgcatgacacctcgaccatacgcggcatggaaatgtcgaagctgatcgacgaagccaacgccacgcgcgccaaggacgacggcgaggcgtgaagcagactcaggtaaagcgcgtgcgcgtgccggtgcacggcgtgctgttgctcgacaaggatgcggggctgtcctccaacgatgcactgatccgcgccaagcgattgttgaacgcgcaaaaggcgggtcacaccggcacgctcgacccgttcgctaccggactcctgccgctgtgcttcggcgaagcgaccaagttttcccaggatttgcttgaggccgacaagacctacgagactgtcgtgcatcttggcgtgacgacggagaccggcgacaccgagggggccgtgcttgatacgcgcgaggtcaaggtcgacccggcgcagatcgaagcggtgctgcatctgtttcgcggccccatcgcgcaggtgccgccgatgtattcggccttgaagcgcgacggcaagccgctttatgaatatgcgcgcgcgggcatcacgctggagcgcgaagcgcgccaggttacgatacaccaactcgaattgctgtcctacgatgcgccgctgctgcgattgcgcgtgacttgcagcaagggtacgtatattcgcgtattgggtgaggatattggcaaggcgcttggttgcggcgcgcacttgcaggccttgcgccgtaccggcgtcggcaatttgacgcttgagggcgcaatgacgttgttggatttcggtcagatcgccgaaaccgaacgtgcggcgcgtattgcgccggttgatgccttgctttccaccttccccgccgtgcacttgcccgaggctgtggcggcacgtttttgcaatgggcagcgtattgcgctgggcaaggaaggcgtcgcgattcccgaagacgaagggcgcgtgcgcgtttatcacgctgacaatgggcaactcctaggcaccgcgttgatacgcgagttcggcgtattggcgccggagcggctggtagcgttgtaggttgcggaatggcagcgcggcgctctgcaaagtgaaatgcaacaatctttcgcttctgacatctgcggctatcttttcatccgccggcgttgggcttcgctcgctcggcaccaacctgcaaatcgtggcgcggcggccattgtcatcactgcgtcaaaaccacgcgctaatctggtgcaaagcccataatctaagccattgaaatcgcggcaatttttgcaatatcttgcgccgcagcatgctataatttcaggttaccgaacgctgtctctttgcagaacccaatatcatgtcaaacgccaaacgcgccatccgcaatatcgccatcatcgcccacgttgaccacggcaagaccacgctggtcgacaagctgctgcgccagtcgggcactttccgtgaaaaccagcaggtcgagaaccgtgtcatggactcgaacgatctggaaaaagaacgcggcatcacgattctggcgaagaattgcgccgtcgaatacgaaggcacgcacatcaacatcgtcgacacgcccggccacgccgacttcggcggcgaggtcgagcgcgtgctgtcgatggtcgatagcgtgctgctcctggtcgatgcccaggaaggcccgatgccgcagacgcgtttcgtcacgcgcaaggcgctggcgctgggcttgcgcccgatcgtggtgctgaacaagatcgaccgtcccggcgcacgtcccgaatgggcgatcaacgccaccttcgaattgttcgacaagctcggcgcgaccgaagagcaattggatttccccgtggtctacgcctcggcgctgaacggctacgccagtttggacgcgacggtgcgcgaaggcgacatgaagcccttgttcgaagccatcctcaagcacgttccggcgcgcgaagatgaccaggatggcccgctgcaattgcaaatctcctcgctcgattattcgtcgtatgtcggcaagatcggcatcggccgcatcacccgcggtcgcgtgcgcggcctgcaagatgtgatcatcatggacggtccggaaggcacgccgaagaaggcgcgcatcaatcaagtgctgaacttcaagggccttgagcgcgtgctggtcgacgaagcagtggccggcgacatcgtgctgatcaacggtatcgacgaactcggtatcggcactacggtgtgcgcactggaaacgccggatgccttgccgatgctgaccgtcgatgaaccgactttgaccatgaacttcatggtcaacaactcgcctctggccggccgcgaaggcaagttcgtcaccagccgccagttgcgcgaacgtcttgaccgcgaattgaaagccaacgtcgcattgcgcgtggcgccgaccgacgacgacacgattttcgaagtgtccggtcgcggcgaattgcacttgacgattttgattgaaaacatgcgccgcgaaggtttcgagttggccgtttcgcgcccgcgcgtggtgttcaagatggttgacggcgtgcgccacgagccgttcgaattgctgtcggttgacgtcgaagaagccaaccagggcggcgtgatggaagaactcggccgtcgtcgcggcgacctgcaaaacatggaatcggacggcaagggtcgcgtccgtctcgaatatcgcattcctgcacgcggtctgatcggcttccagggcgagttcatgacgctcacgcgcggcaccggcttgatgagccacattttcgacgaatacgcaccggtcgacaatagcaagggtgaaatggcgagccgtcgcaacggcgtgctgatctcccaggacgacggcgccgccgtggcctacgccatctggaagctgcaggatcgcggccgcatgttcgtggtccacaacgacccggtctacgaaggcatgatcatcggcatccactcgcgcgacaacgatctggtcgtcaatccgatcaagggcaagcaattgaccaacgtgcgttcatccggtactgacgaggcggtgcgcttggtgccgccgatccagatgtcgctcgaatacgcggtggaattcatcgacgatgatgagctggtcgagatcacgccgaagagcatccgtttgcgcaagcgcttcctgaaggaacacgagcgcaagaaggcttcgcgcgacgcggcttaagccgaacgcatgaaaacaaaacccgccgatggcgggttttgttttttggctgctgctgaaatgggaaggtaggttgggctaagtgcaagcgcagcccaacgttggggaggtcctgccgcggcaggtgttgcttcaacgtgcggatgttgggcttcacttcgttccgcgccaacctacgccgtttcttcgatcaggccgacctgggctggaaattgcgcaaaaagtcgagcaggatctgcgccgagatgtcggcatcgtcggctgtcatcgtttcgagcggattgtggctgatgccgccgttgccgcagcgcgtgaagagcatggccacatcggtgagcttggccagcgtcatggcgtcgtggccggcgccggagggcagatcgaatggcgcgatgccggcgcgggcggttgaggcgcgcagttgctccatcagccagggagcgcagggcgcggccggcgcggccacggtttggtcgagcttgagttcgatgtggcggcgttcgcagatggcgtggatttccttgacgatgtcgtccgccgccgcgtcgcgcgtggcgtcatccgccgcgcgaatgtcgagcgacaggcggcaggcaccggggatgacgttgaccgagccttgcggcacctgcaattggccgacggtgccgaccagcgacggtgctgcgccacagcgtttttccacgcaaagcacgatttccgctgcggccgctgcggcatccttgcgcatcgtcatcggcgtggtgccggcatggctggcgatgccggtcaactcgatcaggtagcgccgcgaaccggcaatcgaggtgacgatgccggccggcaggttgcgctccaacagcaccgggccttgctcgatgtggacttcgacgaaaccgagcaagtcttgcgccttgcgcgcgatggccggtatgtctgcggggtcgtggccggcatcgcgcagggctgtgcgcatgggaatgccgtcggcgtcttccttgtcgagcagggccatgtcgaactggccgatgatggcattgctgcccaggaaagtgctcttgtagcgcacgccttcttcttcggaaaaaccgatcacttcgaaatggaaaggcagcgtttcgccccgctgatgcagatgacgcactacggcgatcggcacgaggatgccttcgcggccgtcgtacttgccgccgtttttgacggtgtcgtagtgcgagccggtcatcagcgttttagccgccggattgttcgacagatagcgcccgaccacgttgccggcggcatcgatatgcgcttgcatgccggcctcgatcatccatgccttcaattgttcggcggtcttcctgtgcgcagcggtcatgtaggcgcaagtcaggactgcctcgtcgtcgctccaggcggctatcgtctcgctccatgccatgacggcgttgcccagctccggcgtgaagcccaggaggtcgttgatgcgcagctcagcgatgcggtcgatctggcgcaggttctcggcgaactcgtcgctttgccggttcttcaggcggcgcgtgaaggcggcgatgatcgcctgccgggtgaagcccttgccgtccggtcccttgaccgcgagaatgaaggggaagccgaacctggcgttgtagtcggcattcaatttttgcagcgtggcaaactcttcggggctgcattggttcaggccggctttggcctgttcaccggttgattcgcgcgtcagggcgccggccaccgcggccttgccggccaattccgggtgggcgcggatcaggctcaattgcgcctccatcccggcttcgcgaaccgcctgctgcatggcgatcttcagcgcagtgatgttggcgaaggggcgcgcggccgccgcttgttgcgggatccagggtgagtgttcgtagatgccgtgcagcgtctcggcgaattgcgcgatgctggcctggttgaggaaatcgagtgtgatgctcatggtgtcattttgcttgatacggatgttgtgtgcgccaatggtcggcaatgtcgatgcggcgcgtgatccagaccttgtcgtgcgcttgcacgtaatcgaggaagcgtgccagggccgcagcgcgcgccgggcgcccgatcaggcggcagtgcaggccgatcgagagcatcttgggacggtcgaggccggccgggtcgccttcgcgatagagcacgtcgaaggcgtctttcaggtaatcgaagaattgcgtgcccgagttgaagccctgggcggcggcgaagcgcatgtcgttggtgtcgagcgtatagggcacgatcaggtgcggcgtctcctggccgttgccggtcttgaccagttcccagaacggcaggtcgtcgccgtagtggtcggcatcgtaggcgaaaccgccgtgttcgaccacgaggcgacgggtgttgggcgagtcgcgcccggtgtaccagccctgcggagccgagccggtcagttcgcggatgatctgcacggctttggccatgtgggcgcgctcggtggcttcgtccacgttctgatagctgatccagcgcaggccgtggcaggcgatttcgtggccgaactgccgcaaggccgcgacggcttcagggttgcgctgcaaggccatggacacgccgaacacggtcaacggcagcttacgttcctcgaaaagacgcaatacgcgccacagccccgcgcgcgagccgtactcatagagcgattccatgctcatgtggcgcatggggaaggcttgcgcgccgatgatctcggatagaaaggtttccgaagccgcatcgccgtgcagcacgctgttttccgcgccttcttcatagttcaacacaaattgcagggcgatgcgtgcgccgccgggccatcgggcatgcggcgggttgcggccgtagcctgtcatgtcgcgtggataatgattttgctggctcatgcctggccttattcaaataatgcgcaaataatgcgcaagtgatatgcaagtgatacgccattgtggcgccggcacgccatgccgggcaagggttcaacatatgtgacttatatgcagagtagtatattggagttggtgccggggtataacattcccagcaatttcaatgccaagaggagagccggatgggcaagttgagtacgcacgtgctggatgtgacaaaggggaagcctggagccggcgtggcggtgcaattgtatgccgtgcgggatggcgtgaaaacgctgctcaaagaggccgtgaccaatgcggacgggcgctgtgatgcgcccttgctgtcaggcgaggagatggcgacggggtgctatgagctggtttttggggcgggggactattttgccgcgcaaggcgtcgccctgcctgaacccaagtttgttgatcgcgtggtgattgcgtttgggattgccgatgcggagcagaattaccacgtgccgctggtggtgtcgccctgggcctattcgacctatcgcgggagctgactgaaacgcccgtgcaggcatcttgccaacacgggcgcgtaccgcttagtactcggccttgtcgaggtcttccagcatcgtgggcccgaccgggttccagcccagcttcctgcgcgtgatcaagcttgacgaggcgttgccccggttggcgaacatggacagccagccgaagtgcgccggcgcctcttcaggcctgagcgatttcaccggcaggttcaagccacgcccgagcgattcggcgatctcacgcatggatacgccttcttcggcaacggcgtgccagcgcgcaccggcctcatgcttttccagcgccaggcggtatagcttggcaacgtccgttacgtgagccgcaggccagcggttgctgccctcgccgatgtaggccgacacgcctttctcgcgcgcgacggcaatggcgtaagtgaccagtccctgctttagcgggtcatggacctggggcagccgcatcacggccgtgctcacgcctttgtccagcagcgccagtgccgtctgttccgatacgcgcggcaggggcaaatcgggcgccggtgaatcctcttcggtggcgagatcgcccttggccgccaggccgccggtgccaccggtaacgatgaaggggcggctcgttcctgccagcacggcgccgatggcttcgatggcgcggcggtcgatttcgcagttttcctggaacttggaaaaatcgtggatgaaggccgtgtggatcacggcatcggtcgcagccgcgccgctcttcaagctttcgatgtcctgcaattcgccgcgatggacctcggcgccgagcgagccgagcagcctggcgccgtcgtccgagcgggccatgccgagcaccttgtgcccggcggcgatcaattccttgcagaccaggttgccgatgaaaccggtggcgccggtaacgaatacacgcatgatgaatctccttgatggggggtgaacacgggtgtattctggtcttgcaacacatcagggtaaagtagtgagaatatactggtataagctttaataggatatgggcgtgacagcaggcaaggaaaattcgctcggaacatatttgaaagaccgccgctcacggctcgatgccgcagcgctcggttacgtcacgggccgccgccgtacggcaggcctgcggcgcgaggaagtggcgcagcgcgccaatgtcagcgccacctggtacacctggctggaacaggggcgcggcggtgcgccttcgatcaacgtgcttgatcgtgtggcgcaggcgttgctgctcaccgatgccgagcgcgaacacgtgcatttgctggcgttcggccggccgccggaagtgcgctacaaaccggtggagagcatttcgccgcggctgcaacacatcctcgatgcgctcaagtacagcccggcattcgtgcgcacctccacctggaacattgtcggctggaacaaagccgccacgctggtgctgggccaaccggatgcgttggcggagccgcgcaacatcctgagaaattttttctcgaaccccaaggtgcgctcgctacaaaccgattgggccgctgccgcgcgttacgtggtggcgtcattccgcgccgacgtcacacgcgccggagcgaccgaggaagtgcggcaattgatcgacgaactatcacgcaccagccctgaattcgatgccttgtggcgcgagaacgatattgtgtcgcatggcggcggcttgaagcagttcaggcatccggtggtgggcaccttgacgatggagtattcatcgtttgccgtcgacggcaggcccgatctgacgctcgtgatttatcagcctgtgacggcggaagatacgaaacgcgtgcgcgaattgctgaggttcggggtctcgtaagggggcaagcggcttgccttggtgtcaagcgagactacttatttgcttgtatagatataaaaaatataaaaagggccgcatatagcggcccttgcatttggtgctttgtcagcttgttagcgtccagagcgcatatcccaatctactaatgttgacgatcctactcgttttgatgtagtttagtcaagccatttgtttgaataaataatcaagacgaaaaaaggacggatatgcagacgttgcgtcaaatgcgatatcggttggcgctcgatttggggtccacttcacttggatgggcaatgattcgacttggttccgagaaccagccttgcgcagtaatcaaagcgggcgtgcgtattttctcggatggacgcaatccgaaagatggcgcttctcttgccgctacgcgacgtgaagcacgtgcgatgcgtcgccgacgcgatcgtttgctcaaacgcaaagcatgtgtaatgcgaaccctcatcgagcacaatttttttccgaaggaagaagcggcgcgaaaagcacttgaaaccttagatccctatcgcttgcgggccaagggtttggatgaagcgcttacgccggccgaattcgggcgtgcattgtttcacataaatcagcgccgcggattcaagagcaatcgcaaaacggataagaaggacaacgatagcggggcgcttaaaacggcaattagtagtctgcgagcggccctcaaggacgaaaactgccggacagttggcgaatggctgcatcggcgaaatttggctggaaaaaccgttcgggcacgatatcgccaaaataaaatcgtcaaagatgatggcaaaacgaggattgagaaaagctacgatctttatgtcgatcgcgcgatgatcgaagcggaatttgacgcgatatggaagaagcaagctgagctgaaccccgcgcagtttaccggcacttcgcatgacgaactgaagcatgcgttgctttatcagcggccgctcaagccggtcaaaccgggaagatgtacatttttgccggatgaggagcgtgcgccgttggcattgcccagcacgcaacgctttcgcatctatcaagaagttaatcatttgcgcattttgcagactgggttgaaggagcagcagttgacgctgcaacaacgcgatgatcttgttcatgcgctagaagtgaacggcaagcggagctttacgcaaatcaagaaactattgggagtgggtggggcgatacagttcaattttgaagaccccaagcgccaagaactcaagggaaacatcaccagtgcgatcttgagcaaggtcgaaaattttggcactgcttggtttgcgttcgacgagaccaaacaagatgctatcgtactgcaactggtgaaggaggaaaatgaagccaagctggtgcgctggctacgggaagaaaccggcgttgacgaagcgcgggcagaggtaatcgccaacgcaggtttgcccgaagggtatggtggcttgtgcgcactggcgctagcgcgtattttgccagaacttcaacgggacgttattacctacgacaaggcagtgcaggcggcgggttttgagcatcacagcaatataagtccggccgcttcaggcgaaattttgcttgaactgccctactacggcatgccgctgcagcggcatgtgggttttggctccaatgacccaaatgatcctgacgagaagcgctatggtcgtattgccaaccccacggtgcatatcgggcttaatcaggtgcgcttattggtgaatacgcttatcaagcgatatgggcatcctagcgaggtcattgttgaagttgcacgcgacctcaagcaaagcaaggatcagcgagacgcggaaagtaagcgacaggcggaaaatcaaaagcgcaataaacgcctgcgcgccgacatttcgggtattttgcagattgccgaagagcaggtcagggcttcagatattcagaaaatgatcttgtgggaagagttgagctttgacattgctgaccgccgatgtccgtattccggtgtccagatcagtgcgcatatggcgttaagcgacgaggtggaagtcgaacatatcctgccttttagtcgcacgcttgatgacagtctgaataataagacagtggcgatgcgccaggcaaaccgggtcaagggtaatgcgactccatgggaagcatttggcgaaaggattgtggcggggtttgattatgcttccatccttgctcgagcagagcatatgcccaaggccaagcgctaccgtttcggcgaggaagggtatcagcagtggttgaaggacgacgctggatttctggctcgcgcgttgaatgacacgcgccatatgagcattgtcgcgcgtgagtatctgcgtctgatatgcccgaatacacgtgtgattcccggccgaatgaccgccatgttacgagccaaattcggattgaacgacatacttggcttgcacggggagaaaaatcgtaacgaccaccgccatcacgcggtagatgcctgcgtgattggggttacggatcaaggaatgttgcagcgcttcgcgaaagccggcgcggaggcgcgcgaaagacaattgaaccgcctagtggagagcatgccgttgccatgggagagttacagagaacatgtggcgcgcgccattgacaggatctggatcagccacaagcccgaccatagccacgagggggcaatgcacaatgatacggcctacggtttgcgcggcgacgggaaggtaagcgtccataaaatattcgatggacagcgaaccgttgttgaagaaagtttgaaggtaatccctatcactagttccaaggcaagtgcgaggcatggtttgttaccagatggtacgcctcgaccatacaaaggatataagggtgatagcaactactgcatagaggttgtgcgaggcggcaaaggtaaatgggaaggagaggtcatttcaacttttgatgcttaccaattggtgagagcgcatggcgtcgcgcggttgcggcatgccactgtcagtacgagtggtaagccactggtgatgcggctaatggttggcgattgtctgcgactggaagtggatggggtgctgcgtacgatgagaatggtttcagtgaatagcgaaggaaggatatctttggttgacctgcacgaagcgaatgtcgacgcgcggaatcgtcacaaagaggatactttttcctatacctataagactgccggctcgctgcaaaaagccaaggggcgtcgcattggtgtttcaccgattggtgaaatacgcgatcctgggttcaaggtgtagcgcagatgataggccgcattgtagaagtggccgacgatggaaggcatttgtttatgcatcggggcttcatggtggtgcaagaatctacaggcgaacgcaaggagttgggccagattcccttggacgatatcgccgcagtcatcgcgaacgcccacggcatgagctataccaataacttgctggttgcattggccgaacgctgcgcaccctttgtactttgcgcagctaaccacaatgcagtcggcatgctcctacctgttgaaggtaatttccaacaagcgaaacgctttgacgcccagctggccgccagccagccgacgatcaagcgcctatgggctgatattgtaaaatccaagttgcagcagcaggcaacggcgctggaggcggcaaacgcacctagtgttccgctttcggcattggtgcgcaaggtgcgttccggcgaccccgagaatcttgaggcgcagggcgcgcgacgttattggggcttgttgttcggtgacgaatttcgacgtgaccagcaagctggcggccttaacgccatgctcaactatggttataccgttcttcgggctgcgacggcgcgtgccgttgttgctgctggcctgcacccaacaatggggctacaccacagcaatcagggcaatgccatgcgcctggtggatgatttgatggaacccttcaggccgatagtcgacttgaaagtctggcagttaaaccagcaaggggaaaacgaagttacgcctggaaccaaacgtgccttggtgcgcacgttatacgacgacttgccaactgacgctggtgtgacgccggttattgtatgtactcaaaagttggcgacctcgctggcacaaatttttattggggaaagagacaagctcgatctgccgcttcctggcttgccattgaatctggccgctgcgcttagagacgaatagtggactatgcttacgggataccgcatcatgtggatagtcgtgatgtttgatttgcccgtcgtagaaaagaaagaacgaaaagcggctacagattttcgcaacgccttgctcgacatgggattcgaaatgtcgcagttctcggtctatatgcgcttttgcaccagccaagcccaagtggacacttattgcaagcgggtcgaggagggtttacccactggcggcaaagtcaatattctgcaatttaccgataaacagtatgaacgcatcatcacttttcgcggaaaagccaaacagccgcccaataaatcgccggatcaatacgatcttttttgatgggaaatagattttttttggtcttcaaaaaccataaacccctgacaaatcaggggtttatggtggttcgagtgtagcagattgggatatgcgctctgaccggaactccgccagtctcaacgaatagcgcggcgatagtgtagcagattgggatatgcgctctgaccggaactgccaacacctcgttcggcaagctgatcgcagtgtagcagattgggatatgcgctctgaccggaacacgaatagcgcggcgatcatcaccgctcctagtgtagcagattgggatatgcgctctgaccggaactgggcgaagatgccgacgctatctgatggcagtgtagcagattgggatatgcgctctgaccggaaccccgacgaagaacagtctgaaatcttttgaagtgtagcagattgggatatgcgctctgaccggaacaaatacgttccccatcgcgttcacatccttagtgtagcagattgggatatgcgctctgaccggaactagatcaaggtaatagccttcaaatgggccagtgtagcagattgggatatgcgctctgaccggaacgatttcttcagccgcatttgcacaatttacagtgtagcagattgggatatgcgctctgaccggaactctatcagggtcaatacgggcatcttgccgagtgtagcagattgggatatgcgctctgaccggaacttgttgatcggcgaatcgtctgtgcgctggagtgtagcagattgggatatgcgctctgaccggaacaacaatggtgcgaccgacgcggcatccattagtgtagcagattgggatatgcgctctgaccggaactcgggaatgcgcgagccgtccaaccccacgagtgtagcagattgggatatgcgctctgaccggaactcgttggtcggtcaggccatcggaaacacgagtgtagcagattgggatatgcgctctgaccggaaccgaaaggcttcgttctcgacggcctggttgagtgtagcagattgggatatgcgctctgaccggaacacttgatgtcagggtcatgaacgattgccatagtgtagcagattgggatatgcgctctgaccggaactatgccagtggtgtgaacacgaccacgcgcagtgtagcagattgggatatgcgctctgaccggaacgcaagcgacgcgcatgtgccggatacgcgcagtgtagcagattgggatatgcgctctgaccggaacgcagcgcgccgcgttgcgtctgcatgagcgagtgtagcagattgggatatgcgctctgaccggaacc

SEQ ID NO: 1861 - DNA, 15419 bp, synthetic construct
  source 1..15419: mol_type = other DNA
  misc_feature 1..15419: note = Synthetic
atgaagtcacgcgcttcacgctgtatcgcaatttctacgatccgtatgcgcgcgaatggcagcagggcaactcgcgctgggacatcatcgatctggtgcgcatgacgtacgcgttgcgcccggatggaatcgcctggccgcagcatgaagaggggcaaccgagtttcaaactggagcatttggtggctgccaatgggattctgcacgaatccgcgcacgatgctttgtccgatgtgcgcgccactattgccttggcacgcctgctgcgcacgcagcaaccgcgtctgtacgattggttgttgcaactgcgcgataaacgcaaggcggctgcgcagcttgatctgatcacacgcaacccggtgttgcacaccacgcgcatgtatccggccaaaaccggttgcacgtcgctggtgatgccgctcatcacggaaccgggaaacaacaacagcgtgctggtgtatgacttgcgccacgatccggacatgtttttgccgttaaacacggaggaattgacgcaactgctatttacccgtaacgatgaattacctcaaggcatgcaacggctgccggtcaagtcggtaaaaatcaacaaatgcccggcattggcgccgcgcaatacgctggatcgtgaggccgccgagcgcatcgcgcttgatctggacgcatgttaccgccactggcaaaaactctgcgcctatcccgatttctttcagcgcgtcgccacggcgtataccagccacgcatttgaaccctccggcgatgtcgatgtggcattgtatgacggctttctggacaatgccgatgccgcatcgttggcccagatccggcgcgcttcagcaaaacaactggccagcatgcgcttcgattttcatgatcaacggttacccgaactgctgttccgctaccgcgcccgcaactggccggaaacgttgacgccggatgaaatggaacgatgggaacagctgcgtgcgcagcggctgacacaaggtagtggcgggagtattacttttgctgaattttccgcgcagattgcgctattgcatgaggagcacaaagcagatataagtgcgcgacagatattggatgagctggagatgtggggaaaaaatttattgaattcataaggtttttctagccagaaaacaatcattttatggattgcctttatttccgttgagcgcgctcttaacgggctgttctctaaaaattaggctacattttgtagccgtaacaaaacttatcccatctccgatcgtgataaaatccctttccccgtttcggattagaagattgtctggattcactcatctcccaccatgaaaaacaattaccttgaaagaatactgaccgcgcaggtttacgatgtggcgattgagagttcgttggatctggtcgccaatttgtccgggcgtattcacaatcaggtgttgttgaaacgggaagatttgcagcaggtattttcgttcaagttgcgcggcgcgtataacaagatgatcaagttgccgcctgcggtgcgcaatcgcggtgtgatcgcggcttccgccggaaaccatgcgcaaggcgtggcgttggcggcgaagaagctcaattgctccgccaccatcgtgatgccggtgacgacaccgcaaatcaaggtgaacgcggtgatggggcatggtgctacggtggccttgcatggcgattcgtataacgatgcgtacgagcacgcgatacagttggccaaggtagagcaggcgacgtttgtgcatccctacgacgatccggatgtgatcgccgggcagggaacggtcggcatggaaattctgcgccagcataccggcccgattcacgccatttttgtaccgatcggcggcggcgggctgattgccgggattgcggcgtatgtgaaacggttgtacccgaagatcaaaattatcggtgtcgagccggtcgatgccgatgccatgtaccgctcgttgcaaagcgggcggcgtgtcaaactggcgcaagtgggtttgtttgccgacggcgtggcggtgaggtatgtcggcaaggaaactttccgcttatgccgtgaactggtcgacgaagtgatgctggtcgataccgacgccatttgcgccgcgatcaaggatgtgtttgaagatacgcgcacgattctggaaccctccggcgcgctgtcgattgccggtgtcaaagcgtatgtcgcacgggaaaagattcagcataaaacgctgatcgcgatcgcttccggcgctaatatgaatttcgaccggctgcggcatatttccgagcgcgcggaaatcggggaacagcgcgaagcggtgatgtcggtgacaatcccggaagagccgggcagcttcaagaaattctgtaatttactcggcgccaaaagcatcaccgaattcaactatcgttactccgacccgaaagtggcgcgtgtgtttgtcggcgtgtcggtacgcaaccaggcggaaacgcagcaactgatcaaggaattgaaacaaagcggcctggccaccgaagacatgagcaataacgaagtggccaaactgcatgtgcgtcacttggtcggcgggcgggcgcatgcggtcaagaatgaaatcgtgtaccgttttgagtttcccgaccgccccggcgcattgatgaacttcctcaacaacctgagccataactggaatatcagcctgtttcactaccgcaaccacggcgccgattatggccgcgtgttgatcggcatccaggtgccgccggaagaaaaatccggcttccgcgcctttttggaccagctcggctaccgctattgggacgaaaccaagaatcccgcgtataaattgtttcttggttaacgcagactggatgcgctgattacccaatgtttcagaaggtgattgtcgtgtccggaattctacggttcagctactcgttaaacctgagtcaccggaagttcatccgttctgacttcaaacgccgcgcgcaggctgttctcgcactgcccggcaatcacttggatggtatggtttgttattgaatttgttggtataaagtacgatagattcataaaaaacattgttttccaggtcttatcctgtctttgattacgcactccagcagttaagctatcgtccggtatttcccctgtctgatgccgtttgtttttgaaaagagcggacattcagagagtctgacttcaagctggagagcacaatggaagacaatttttctaaattcggattgccaaccggtttggttgcgttaggtaagaaattgccggtgcttgcggcgcccgcgaagaaaaatattcccaaaagtactgctctggtaaacaacggctgggtgctgggtggcgtcgtgatgtttttcaccgcgctgttgttgatgacgttaacgatcagtgtgcgccaggccagacagaatgcgatccagccagagctcgccgcgcagctgcaaattcagcatgcgcatatcgccaatgccttgcaacaggcgctgttcggcgaagcagaagcctttgcccggttgcgcgacagccggcaacaattccatcgtgacatcacactgttattgcaaggaggctcgtatcgcggcacaaccgtagcggctgtggatgattcattggcgccaagtatgcacacttatttcagaaactggcagctggaagatcaaagaatcgatttgattctgaatcagcaggaacctctcatacagctcaacaacagcatcaaagcggtcaataacgcacacagccagttggcaagacgcatggacgaactgatcaaccgcatgacggaagccggaaatctgtcgcaggaaatccgcaccgtggaaacgatcaaaatacacgcacgcactgtagccaaaaatgtgaagacgctgctgccgctcgaatcgccgctggcggaaatcaccgcgcaattggcgcaggatcacgcgcaagttgccgcgatgatccaaaccctgagtcagggcaatcatggtcttggcgctatttccagcaaacatgaggtgatccaggacttgttatcgcatgcgtatgcgcagttgagaaagtttgacgagcatttacatatcatccgcaaagaaattccggtcgcgctgacgattgaatccgcaatcgacgagattgcgaacagccatgcggcgatgcaggaactggccgcaacgctcgacgaggaaatgcagcagcaaaacagtcattctgcgctgctactgaatacagtggcgatgatcttggccgcctgtgccgtgctggcactggtcttgttaatccggtcggtgcgccgcaatgcctatcatcaggatctggccaaccgcaacgaagtcgagaaagcgcaaaaagccattgtgacactgctagacgacatgaagagaattgccgacggcgatctgacggtgcgcaccgacatcaccaaccatatgaccggtgcgattgccgacgccatcaacagcaccatcgaggaattgcacacactggtggaacaggtcaatcaggcgggcgcattggtagtgaaggcatcacatcaggcgcagcaagtttcgtccggcttgttaaccgcagcacagcagcaaacggacagaatcgaacaaactaccctggcggtggtcggcatgaccgaatcgatcagtgaaatatcggatatggcgacggaatccgccaaagtcgcgaaacagtcgttggccgcggccgaaaaaggaacgctggcggtgcgtgagtcgatcgccggaatgaacgaaatccgcacgcatatccaagacacctcgaagcggattaagcgcctcggcgaaagttcacaggagatcggcgagattgtcgcgttgatcaccgacatcaccgaccaaaccaatgtgctggctttgaacgcggcactgcaagcgaccgccgccggtgaagcggggcacggatttaccgtgatcgcacaagaagtgcagcggctggcggaacggtcggcggaagccagtaagcaaatcagcgaattgatcgtcaccattcagggcgacacgcaggacgccatcgcggcgatggaacgcagcacgctcggcgtggcaaaaggcgcgaaacgctccgacgcggcgggccgggcgctggaagaaatcgagcaagtatccaagcaactggcgcagctggtcacgcatatttttgacgtgaccaatacgcagacacgggcggcgcataaggtggttgccaatatggaagaaattcttcatattacccggcagacgacacaaggaacgctgaaaaccacgggatcgatcaaacagatcgcgggattcgcgtccgaactgaaagcatcggtatccaacttcaaggtgtgatgcccgtgccggtttctctatcgattgatggtacaaaaatatgagcgcgcaacccaaactgaatattgcttcgattatcgggatcaaggacggaatttaccaagtctttgcattgatcgaccagaatttggaggtatacagccagcatcccggcaagaccgatctcgtcaaggattgccgcagttatattcatcaactggacggtttgctcgagatgctggggttaaccagcatcaccatcgtcaccggaaaaatggatcagctggttgaggcgctcatcagtaagaaaattgaacccagtccgccggtgttcgatgcgctgaagcaatccaccaaggcgctgctgttttacttgaatgaattgatcgacggcgcagaagaaaatccgttgcggctgtttccggcgtatcgcggtttgatgcaggtgtacggttttgagaacgcacccgaaagcgatttgtttttcccgcgtttagcggccgcaccggcattaaaagccgaagccgcgcatatcgacgcggctgccgccaagatcctggcgaaacaattgggcgcggaatatcaggccggtttgctgaagtggctgcgcgatccatcgaatcgggacggcttgcggcaaatggctgcggtagccgataagatcgaagaatttccgggaaccaccgaagcgcgtgcgttctggtgggtgacggccggttttctggaagacttgctgcaactggatggcagccaaatcgacctgccggtgcgccgtctgtgcggaaagattgaacaaaccatccgccatttggcggcgggtacgaccggtaacacctccattttgatgcgcgaattgctgtaccacattgcgcacagcgaatcggacagcgcgcgcatcaacgcgatcaagcacagttacacctggcccggtcaaaccaaggaccaggatgcgccgacatttgaacaatcggaaacactgcgtccgatactggacaggttgcgcgatacgttgatgcaggcgaacgatatctggcgcgagttctgtgccgggcatcaggaaagcctggtttcattattggaatacgtggactggctcagccaccaagcacggcaaacggagtgcgcgccgctggtgaaattgatcgatgccattggcgatacggtgacgtacttgcacgatcatccgcaggaaacgagtgaagagctggcgatggaaatggccacggcactgttgctggttgaaagcattattgacgatttttataagctgcctgacgatttgccctcccagatcgatgtgattgattcccgtctgcacggcatcacgacaggcgatatccaaatcggcgaattaccgcctgcaccgacattcaaagtgctggatggcaaaacacaggaaaaagaattattggcacaggtggcgcaggaaattctgaccaacctggcgcacatcgaaagcattttggataaattcttttttgaacccacccaacgttcggaattgctgctgttgccggatttattcaagcaggtctccggtacgttagtcatgctggatctggaacgtgcgcatacgctgctgcatctttgccaagatttggttgagaaactattgaagtcaggctatcagattgtcgaaaccgagcaagttctgctcgtcgacggattgagcagcctgggtttctacatcgaagcattgcgcagcgggcagcccgatagccagcagattgtcgaggaagccatcaagctgttcaagattgcagccaatacaactaatgtagccccgccgttgccaacggctgcgccacctgctgccgcgctaagcactgataccgcatccagtgcagcagtgagtaacgctatcgatcccgaattgctcggtatattcctggaagaagccggtgaagtgctggccggtatcgccggtgatgtatgcacatgccgcatcaatccgaccgatcaagaagcattggcgagtgcgcggcgcggatttcacactttgaaaggcaacggccgcatggtcaagctcgatgatttgagtgaagtggcctggaatctggagcaagtgctgaatctttggttaagtgaaaagagatccgcttccgatccgctgctcgacttggttgaccaagcttgccaggcgtatggcggatggtgtgacgatctacacgagcacggcgtagccggggttgatgcggacgccttgctgcgggcggcgcaagaactgctgacgcgcgccaaaaccgttgcagcacccgtagttccggccgaaccggccgaatcagctcaaccggaacaatcgccgcccgttgccgcaccggccgaccggatcaatccggaattgcttgcggtatttctggaagaaacgcacgatatcattccgcgcatgggcgcaaaactgcgcgcgtggcgcatgttgccgcaagacgaggatatccatcatgcattgctgcggttactgcataccctgaaaggcagcgcgcgcatggcgggcgctatgcaactgggcgaattgattcatgcgatggaaagccatgtggaaacggctttccgcgagcgcaatatctccgatgctgcgctggatcagctggaaagcgaatttgacgcgatcagcggcgagatcgaacagcttcagcgcgctgaagatgctgcggttccagcaagcgatgcgctgacggccgcagccgtggcgattgccgaactggcgcaaccgcctgccgaaacaaccgggctgttgcaatccaaaacgttgctgcgtatcaattccgagttgattgaccgtctcgtcaatgatgccggagaggccagcattctgcgctcaaaaatcgaggcgcagctgaacaatttcaaacaatccttgcaggatttgacggaaagcacgcaccgcttgcacgatcagttacgtgaagtggaaatccaggcggaaacgcaaatgcaatcgcatcttgctcatcaacaggaaagcgaaccggcgtttgatccgctcgaatttgaccgcttctctcgcttccaggaattgacccggctgatggcagaaagcgtcgatgacatcatcagcgtgcaaaaaagcttgcggactacgcagattgccgctgaagaagcggttgcgcagcaagcggtgatgaaccggcagctgcagcagtcgctgctgcaaatccgcaccattccgttcagtaactatgctgaacgctattaccgtatcgcccggcaggtggccgaagatttgggtaagaaagccaacctcgagattcacggcgccgacgttgaaatcgatcgcaatgtgctggagaaaatcaatccgccgctggaacacttgctgcgtaacgccatcgcccacggtatcgaagaaccggcggaaaggcagcggctgggcaaatccgagacaggacaagtcgagatccgcttgcgccaggaaggcaacgaagtcaccatcacgttgagcgatgacggccgcggcctgaatctgccgcgcatccgcgaggaggcgcagcggctcggtctgatccgcaacgatgcagtgctcgacgacgacaagacgatgccgctgatttttatgcccggcttgtcgactaccgattcggtgacgggaatagcggggcgcggcattggcctggatatcgtcaagaatgagattacgatgctgggcgggcgtatcagcgtggaatccactcctaatcagggaaccattttcacgattaacctgccgctgactttatcggttgcgcaaacgctgatggttcgcaccggcaagcaaacctacgcgattcccgcttttattgtcgagcagcaacgtgaattcgatgcggaaacgttgcagaaaatctaccgggatcactgcgttaccctcaatgggaaaacctatccgtttgcgcatctgtcgcatttgctgggggaaaccggtgttgttccggaagccggaaaacacagccaggtcttgttcctgcatagcggcacccagcatctggcggtccatgtcgacgaattactcggcaacagcgaagtggtggcgaagaatatcggcgcgcaactggcgcaagcgccgggcgtggaaggcgctaccattaccggtgacggcgaagtgattctgatcctgaatccggtgaaactgatgcagcgcggcgatgtgcagcaagtgctcagtaccccggttaccgcgctgactccggcgaagaaaaagaaaacagccgcgccgcctgcggttatggtggtggatgattcactgaccgtgcgcaaagtcacctgccgcttgctggagcgcgaaggctgcgacgtgctgatcgcgaagaatggcgcggaagcggtcgacattcttcaggaaactattccggatgtcatgctgatcgatttggaaatgcccaaaatgaacggttttgaattgatcaagaaagtgcgtgacaatcccgcaacggcgcatatgccggtgatcatcatctcatcccgcactgcggaaaaacaccggaaaattgccagggatctgggcgttgacgtatttcttggcaaaccttacaaagaagatgaactgctcgatcatttgtctgaacttatcaggaaatagcgcccataaaaataagggccgcatatagcggccctctcatttggtgcatctttctgcttgttagcgtccagagcacaaatcccaatattctattgtggtatatattctaatgacaaagctcaaggcgatcaataaaatcatatagaaacttcaatcatagctggagaatataccttgctgcataagaataagatgggttatcgcctggccctcgatttaggatcaacttcactgggttgggcgatgatcaggttaaatgtcgatcaacaaccttgtgcagtcatcaaggcaggggtacgtattttttcaaatggacgtaacccaaaagatggttcttctttggctgtaactcgccgcgaagcgcgcgccatgcgccgtcgccgtgaccgcttactgaagcgaaaagcgcgcatgatgcgcactctcatagaatacggcttattccctgctgatgaaatacagcgtaaagcattggaaaccatgaatccttatgcgctacgtgccaaaggactggatgaggtgcttactccatccgaatttggccgcgtattgtttcacattaatcagcgacgcggattcaagagcaatcgtaaaaccgacaaaaaggacaatgacagtggcgcattaaagactgccatcaacaaactgcgcgaaacacttaaagcagaaaactgccgtacagtaggtgaatggttgcacaagcgcaatgaagcaaatcaaaccgttcgtgcccgctaccgtcaaaataaaactataaaggatgacggtaaaacaaaaattgataaatattatgatctctacattgatcgcgcgatgattgagcatgagtttgatcaattgtggaaaaaacaagcggaattgaatccaatcttgtttaccgaagctgctcgcgccgacttgaaagatgttctgctgcatcagcgcccgcttaaacctgtcaaacccggacgttgtacattcatgcccgacgaagagcgtgcgccgctggccttacccagcacccaacgcttccgcatgtatcaggaggttaataatctgcgtattctgcgggaaggattgaaggaagagccgctgacgttacagcagcgtgatgagctgattgccgcgctggaaaaaaacagtaagcgtacctttacacaaatcaagaaattacttggatttggcggtgcagttcagttcaactttgaagatccgaaacgtgaggaactcaaaggtaataccaccagcgctattcttagtaaaaaagaacattttggcgatgtctggtttacatttgatgaaaccaaacaagatgccatcgtgttgcaattgatcaaggaagaaaatgaagccaagcttgtgcgctggctgcaggatgagacaggtattgatgaaaaatgcgcagaattcattgctaatgtaggattgcctgaaggctatggcagcttatgcacaaaagcactggcacggattctgccggaattgcgtcgtgatgtagtgacatatgataaagctgtgcaagccgctggttttgaacatcatagtcggcttggttcaaacactgaaattcccggcattactttcaagaccgaaagcattgatcaggattcaggtgaaatcaaggaatttcatatccacaagaagttgccttactacggtgaatatctccaacgccatgtcggttttggcagcggtaaaccagaagatcctgctgaggaacgctatggcaaaatagccaaccccaccgtgcatatcggattgaaccaagttcgccttgtggtcaatgcactcatcaaacgctatggccaccccagcgaagtgattgttgaagtagcgcgtgacttaaaacaaagcaaagagcagcgcgatgaagaaagcaagcggcaaaccgagaatcaaaatcgcaacaagcgattgcgcactatcattgcagagactttgcaaattagtgaggagcgtgttagacgcgatgatattgaaaaaatgatcttgtgggaggagctcaacccaagaaacgccgcagatcgccgttgcccgtattctggtgcgcaaatcagtgccgccatgttgttaagcgatgaggtggagattgaacatattctgcctttttcgcaaacactcgacgacagccttaacaacaaaacagtggcactccgtcaggccaatcgtatcaagggaaatcgtgcgccttgggatgcgcggaacgatttttccgctcaaggctgggattatgcaagtattctctccagagctgaacaaatgtccaaagccaagcgttatcgctttggcgaagatggctaccaacactggctgaaagacgatgcgggatttttagcacgagcgctgaacgacactcgccacctcagcaaagtagcacgtgaatacatgagcttggtttgcccaaatacgcgcgttattccgggtcgtatgactgccatgctacgcgcgaaattcggtctgaacgacgttcttggtttaaatggcgagaagaatcgtaacgaccatcgccaccatgcagtcgacgcctgcgtgattgccgtgactgatcagggtttgttgcagcgttttgcaaaagccagcgccagtgcgcgcgagcggcagcttaatcgtttggtagagacaatgccattgccgtgggagagctaccgggaacacgtgcagcgtgccattgacgctatttgggttagccataaaccagatcatagtcatgaaggcgctatgcataacgatacagcttatggtctacgggaaaatggcaaagtcagttttcataaaatggtggatggaaaacgtgaatgcatagaggacaaccttaaagtcatagagatctccgatgccaaagccatagatcggcatggtttgctacctactggcaagccaaaaccatacaaaggctacaaaggtgatagtaattactgtatcgagattgtgcgtaatgaaaagggtaaatgggaaggcgaagttatttccacattcaatgcttatcaatttgtgcgtgaacatggcgcggcgcagcttaggtgtccagatttgagcgttagcaaaaaaccattggtgatgcgattaatgatcgatgacgtagtgcgtttagatgtggatggagaatcccgcacaatgcgaatagcaacattaagcggtaatggacagatattcatggctgacataagcgaagcgaatgtcgatgcaagaaatcgcagtaaggaagattcatttacctatatttcaaaaatggcaggttccctacaaaaagccaaagctcgccaaatcggaatttcccccattggcaagcttcgcgaccctggttttaagggataactcagatgatagggcgcattgtcgaggtagcggatgaccggcggcacctgttcctatcacgcggcttcctggtggtaaaagataccgaaggcgaacgcaaggaattggggcagataccgttggatgacatcgctgctgttattgccaatgcgcatggtttgagctataccaataacctcttggtggcattggccgagcgttgtgccccttttgtgttatgtgccgccaatcacaatgcggtgggcatggtgctgacgatagatggcaactatcaacaagcaaaacgatttgacgcccaacttgctgctagtcaaccgcttagaaagcgtctttgggcagaaattgtcaagtcaaaactgcaacaacaggctgatgcattggaagctgcgggcgcaccatttattcctctatcggctttagtccggaaagtgcgttcgggtgatccggacaatctcgaagcccaaggagcgcggcgttattggggacttctgtttggagatgatttccgccgcgatcaacaaagtgatggccttaacgccatgctcaactacggttataccgttttacgcgcaactaccgcgcgcgcagtggttgcggcaggattgcatccaaccattggattgcatcacagcaacgagggcaatgccatgcggttggtggatgacttaatggagccttttcgccctgtgatagatctgaaagtctggcaattatatcgacatggggaaacccaggtaacaccagagagcaaacgtgaattggtaagaacgctatacgatgatatgcaaactagcgcaggcgcaactcctttgatagtttgtacgcagaaacttgccgtctcgctagcgcaagtttttatgggggagaagaataagctggatttgcctttgccaggattgccactcgacctagccgcatcatttcaggaggactaacgtgacatgctttccgggtatcggctaatgtggatcatagtcatgttcgatttacctgtcgttgagaaagctgagcgcaaagcggcaacggattttcgtaatactctgctagatatggggtttgaaatgtcgcagttttctgtatatatgcgtttctgtagcagtcagagtcagatcgatacgtattgcgcgcaggtggaaagaaacttgccggtggggggtaaagtgaatatcttgcaatttaccgacaagcaatacgaacgcattattacttttagcggaaaagccaaacaaccgagtaaaaaaccacctgagcagtatgaacttttctgaagattatcaaaatttctatactagtatgcacattaaccctattaacaatcataaggttaatgtgcagctagtttagcatattgggatttgtgctctggccggaactttggaaaaagcgggtgaagatttgagtaaaaagtttagcatattgggatttgtgctctggccggaacttgatcgctcttacagtagcgaccgcaggtagtttagcatattgggatttgtgctctggccggaaccaaaagagtaatacagtcgaagttcagaaaagtttagcatattgggatttgtgctctggccggaacgttcttcatcacaaggttgatggttttgttagtttagcatattgggatttgtgctctggccggaacgcaaccgcattgcgcatgattgtgcggttcagtttagcatattgggatttgtgctctggccggaaccggtagcccttgttcaatcgcttctttaacagtttagcatattgggatttgtgctctggccggaacttggatattatggcgatcatatcaaaattaagtttagcatattgggatttgtgctctggccggaacagcatgtaattattcaacgcgaagatgaaaagtttagcatattgggatttgtgctctggccggaacgcacgggtgttttaaatcgatcgcaaatggagtttagcatattgggatttgtgctctggccggaacgcagccgacacgatggcaaaggctatgcgaagtttagcatattgggatttgtgctctggccggaacagtgccaggcggcgttctgcgcgcaatgtgagtttagcatattgggatttgtgctctggccggaactacccaccaggattactcgataccccacccagtttagcatattgggatttgtgctctggccggaacgcgtaaatcgcgcgatgctcttaattaaaaagtttagctgtaagaaatctcagggttgtttacagagaggttgatagaaataagcgttgagtatttcataaggagtggcattactcaaactcttatgtggct

SEQ ID NO: 1862 - DNA, 15406 bp, synthetic construct
  source 1..15406: mol_type = other DNA
  misc_feature 1..15406: note = Synthetic
gcaacctccttggaggcatatccggtttgacccggactatgccgatcaagttccagtacgacacccctgaaaggacgcatatgaacatccaactcggcatagtttcggacgcggcatacgatctggtgctgaggccgtatcaacctcttttcttcaacaaaggaacgtcacaatgactacgattggaaagctgcgacttgggccgttgccaaagacggaaaccgtcaaactgacctttgcttgtccggccagcctgaaagctgaccttgatcgctacgcggcgttgcatgctcagacctatggggaggcagttgatgccgtgacactgattccgtatatgctggaagcgttcatggcgggagaccgagggttcaggaagggcggagcacgtcgtgctgtgtctccatcagaggcattgtcgcgaacggcttaactccagtttctgtcggcctttccgtttgcgtggggcgagctgattgggttagaatagtctcaacacacccgccacacgtcctatcttcgggtagggttctgctaacgcagacgtgcaaaaggcgggttttttgcgtccatatttcgcccatggcaataaatcgcattccatttaataaaccagcgtcctcaccggagcagcttctccagaagctggagcggcaaggattggtggtggaggatgccgatcgcgagcaggcgcgtaattacatgcgcttcgtgggcggataccggctcaaagggtactggcatcatctggtcgatccagtcacgaaggcttttcccgccggttataggtttgaacagatcgtcagtcgctgcgagtttgatagagagctgagagttctgaccatggctgccatcgagcgcctggaaattgcggtgcgggtcgtgatggcaaaccatctgagcatgaagcattcaccgcattggttcctggatggccgcttgttcaggcaagggcggcggcagggcgcagccgagcttgtggcgaagatcgaggccgaggtggatcgagcccgcgacaagacgttcgtgaagcattatttctcgcggtacagcgaaccgtatcttccgcccagttggtctgtttgtgagtgcgtgacgtttgggctttggtccagaacctatcagttgctgaagaaccccgatgatcgaaaagcaatcagtcggcgtttcaatgtggatgcgactgaggtatttgagtcatggattcataccctgacggttgtgcggaacatggtggcccacagcgggcaattgcttcgtgtgaccttgggtgttgctcccaaggattaccgtaaggcaggcattcggttttccgattcaaaatcattctatgctgtggcaacggtcatcaagtatctattgcgacaaacaggcctgccgctggaatggtcagaacaattgaaagccttgtttgtcaagtacccagaggtggacatggcagaaataggctttccgacagattggagcaaccgacccggttggttgtaattagcgccgattctttccgtccaattctctactatgcgacggatatgaaaaagctagcatttcatgcggcagggcagtgcagcgtaccccagcgaagcgctgcaaagtatgcctgcatactcttggatatgctccaagttgatgaccaaattcttgggacaaatttgggacaattcagtcgctaaaccatgccaatcaatgcccatatcaagccagagacaagtaaggcgtagtttccttaactaattgattgtaaaagataattacgcctttttgccccgggttgcgactactcttgacccaccatgggggtgtggttggagaggtcgggttgggtcatcaagatcaggcaggtgctagggacgttttccacagcggatggcaatggctgccgactggaatagacggcggaatggggcttgtgtccgcgggtgcggatgcggggaagatgtccagctcattatagtgggccggacgagtcaaagcctcctgtcgggcgggcgcttataacgttgattggggaagatgatgtcggtacttaaattatatggttgtgttaggcggttattgcgatgtatcataacaacaccttgcgtttaaatgaaggtgttaatgcgacccaagcttggtttttactgaaactgggttgtgttagttccagccagtacgcatatcctagtcagaaaagcgaaaagccgcgtatagcggcttttccatttggtgcgatctttcagcttgttagcatccggtacgcatatcctaatcagttaggaagaaatgatagctgattagcttgaacaaatgcaagggggcgattaaattttagaacaaattgtttcttggagagtgggtatgccttttcgctatcggttggcgctggataccgggccgacatccttgggttgggccatcttccggttgaacgccgaaaaccgaccgatggcgctggtgctcagcggtgtccggattttttctgacggtcgcaatccaaaggacggtgcttcgttggcggttgctaggcggctggcacgtgcgatgcgccgccgccgtgatcgtctgctcaagcgcaagaacaaactgattgctgcattggttcaccacggatttttcccggaggacagtgcacaacgaaagaggctggaagggctcgacccatacagactccgtgcggaagggctggatcgagctttggaagcctatgagtttggccgagcgctgtttcatctgaaccaaaggcgtggattcaagagcaaccgcaagacagacaagcgcgaaacagacagtagtgtgatgaagagcgccattgcgggtgtgcgagaagcgttggctgagggcggctttcggacagtgggcgaatggttgcatcaccgcaagcaacagggccagacggtgcgtgcaaaattcagcgcacgccgaaccgttacggaagaaggaagggcgcgaatcgaaaaaaactacgacctgtatattgatcgtgccatggtcgaggcggaatttgatgccttatggaccagacaggctgaattgaatcccgcagtattttccgaacaagcaagagacgagctacgcgatatcctgctttttcagcgtcggcttcggcctgtggatcctgggcgttgtacgttctttccagatgaggcgcgggcgccgcttgcgctaccgagtgtgcagcgatttcgtttgtaccaagagcttaacaatttacgctggctggatgaaggtttgcaggaaaggaccttgaccgtggcacagcgcgataccatggccaacgccttggagaagagtgtcagaaggacgtttcagcagttgcggtcgattgcaggtcttggcagtgaggcctcttttagtgtcgaagacttgaaacgacaggatttcaaaggcaacgccactagcgttgttctatcgaagaagcagcactttggagcgtgttgggcgcaatttgatgaaacctttcaggacgagatcgttctccgcttgcttacagaggaaaacgaatcggttctgattgcatggttgcaggaacatacgggtgtggacgagtcgcaggccgaagccattgcgagcgtcgctttgccggatggttatggtcgcctgagcttgaaggcgatacgtctgatactgccctcattgcgagaagatgtgcatacttatgacaaggcagtcatgatggccggcattgagcatcatagttttctgggaccgcgtgcaacaggggaaattctgccgaaccttccttattatggaaaggtcctggaacgccatgttggctttggcacagggagtcccgaggattccgaggagcggcgttttggacgcatcagcaacccgactgtgcatatcgtgctgaatcagatccgtgtgttggtcaatgagttgattcggcgttatgggcatccagatcaggttgttgtcgagttggcgcgagaattgaagcagacctgggagcagaagcgtgagacggagcgagaacaggcggcgaatcaacagcgcaatacccgctaccgacaggaaattgcatctgtgctcggtatcagcgaagaacaagtaaaacgagatctaatcgagaagcggattctttgggaagagctgagctttgatccggtggagcgatgttgtccatatagcggccagcagatcagcctcgagatgctgctgagcgaccgagttgaagtcgaacatattttgccgttctcgcaaacgctggatgatagtctcaacaataagacagtggctctgaggcaggctaatcgtgtgaaaggcaaccaaacgccctgggacgcgtttggtcggcaagaggtagcggggttccggtatgaggatattcttcaacgagcgcaagttatgccgcagcgcaaacgatatcgatttgcgcaagatgggaaagagcaatggctgaagaacgacaaggggtttcttgatcgagccttgaacgatacgcgctacttgagccgtatggcgaaggagtacctggaattcatatgtccgcaggccacctgggttgtgccggggcggctgactgccatgctgaggcgggtgtttggtttaaacagtcctgatattctggggtggcaagggcagaagaatcgtgaggatcaccgtcatcacgcgattgatgcctgcgttattggtgtgacggatcgtgggttattgcaaaaggtggccgatgcgagtgcgcggggtcgagggatgcagggccgtttcctgcaggatatgcccatgccttggccaagttaccgtgagcacgtcaagcgtgcagtgaatcgtatctgggtcagccataagccggaccacagctatgagaaagccatgcacaacgataccgcctacggcttgctcccggatggatatgttcgtgtacgcaaggaggttgacggcgtccgcaagcggcacaaggaaaaactgagggtgattccggttttcagcgcgaaagctggcgagcggcacggatttttgatgaatggtaatccgcgcccctacaaaggttacaagggcgatagtaactattgcatcgagattgtgcgtgatgatgcgtcaggcaaatggctaagtgatgtgatttcgacctatcaggcttatcaggtgatccgtgagcatgggcaagaggaaggttggaagcgcttgcgcgaccctatccatggttttagtggcgggtcgttggtgatgcggctgatgattaacgatattgtcaggctggaacatgaaaatgaacttcgaacttggcgagtttccaccataagtggaaatggtcagatttttttcgcagatattcatgaatccaatgtggattcccgtaatcgtaacaagaatgacccattttcgtacgcttctaaaaaggccagctccttgcagaaggcgaaagccaggcgggtgaccatttctccggctggaaggctgtccgacccaggatttacaccatgacgtaatgacaggagtcctctcatgatagggcgtattgttgaaattgcggatgaccggcggcatttgtttgcgcatcgtgggttcatggtggtgcgtgatacgcggggggagagagaggagttggggcaggtccccttggatgacatcggagccgttatcgccaatgcgcatgggctgagctacacgaacaatctgctggtggcgctggcgcagcgtggggtgccgttcgtattatgtgccgccaatcacagccctgtgggtatgctgctgcccacggatggaaactatgagcagtctcgcagaatagcggcgcagttggcagcaaagcgcccattgctcaagaaaatgtgggctgtcgtcgtgcgtagcaagctggagcatcaggcggctgtgctcgaagccgttggtgctccaccgatgccgctgctggctttggccaggaaggtcaaaagtggtgatccagacaatctggaagctcagggtgccagacgttattggggtttgctgttcggtgatgggttcaggcgggatcaaggggcgggtggcatcaacagccttctcaactatggttatacgatattgcgatcggctacagcgagagcggtgattagtgcaggcttacatcccagtattggcttgttccatagcaatgcaggtaaccctatgcgtttggtagatgacttgatcgagccgtttcgccctgtcatcgatttcaaggtctggctgctacagcaacatgatgagacggaagtcactccagacactaagcgggtactggtacagacgctgtatgaagatatgttgacggacgcgggagctacacctgtgagtgtgtgcatgcagcgtacggcggtttccttggcgcaagtgtatctgggagaaaggtccaggctggatctgcccttgcccgggttgcctctgactatggctgcatctttgcgcgacaaggatgacgaataatgctatcagggtatcggcttatgtggatgctggtaatgttcgacttgcctgtgctggaaaaggcggaacgcaaggcggcgacggactttcgtaacaccctgctggatcttggtttcgacatgagccagttcagtgtgtacgtgcgtttttgcacggggccggcgcaggtagagacctactgcaggcgcgtagaggcagccttgccgcccggaggcaaggtaaacatcatacaattcacggacaaacagtacgaacgcatcatctcgttccactgccggtcacggcaggggcctcaaaaagcgcctgaccagttcaatttgttctaggggaaagcgtgcgaaaagtagatcgaaaacccagtaattcattttttatcaatgagttactgggtttcgattctaactgattaggaaatgcgcaccgactggaacggaaacccagcgtgtccggaatgctttgctattctaactgattaggaaatgcgcaccgactggaaccaagggcagccgccacagcacgcagctggaaattctaactgattaggaaatgcgcaccgactggaaccggtatttccggcggttaaaggtttgcaatattctaactgattaggaaatgcgcaccgactggaacgaaatcgtcgcggcgatgcagcctgaaacaattctaactgattaggaaatgcgcaccgactggaactgagcatcgtaacgaccggtgatcaattcaattctaactgattaggaaatgcgcaccgactggaacgtatttggtagatagacttgtcgcacatgaattctaactgattaggaaatgcgcaccgactggaactatctcgaagacaacccgacaagcgacgcaattctaactgattaggaaatgcgcaccgactggaacgagagggcggaatgcttggccgcgctcaacattctaactgattaggaaatgcgcgccgactggaacttcaggctcatgcgggacccagcgacgaagcagggtggtgttacggccgtgttccagcacgatggccgccaccgagacgccgggatgccctcatggttcgcggatggccggcccgcgtcagatgcactggcggctccgttgcaggcgggctgccttgtttgatgtcatgaaggcaggcgaagcaatgcgataagatgaaatcggccccccagccttgaggggctggcgacttgctcggctgatcggcaagatcaccaaacttgttcatggagatgcacatgggacgcgtagcaggaaaagtggcactggtgaccggcggagcgctggggttgggaaaggccgcggctgaaatgctggctcgcgaaggcgcccaggtcgttgtcaccgatgtgaatgtggaagaagggcggaagacggctcagggtatcgtggacaacggcgggcaggccattttcgtgcagcacgacgccagcagcgaagagcagtggcaggccgccatcaaggcggcgctggacgcctttggtcaactggacattctggtcaacaatgccggtatcggtgttcttggcagcgtggaagacactacgctggaaatgtggcgcaggacccagagcgtcaacctggacggcgtattcctgggaaccaagtatggtatcgaggccatgcgcaagagcggcggcggttcaatcatcaacctgtcgtcgatcgaaggcctggtcggtgacccgaatcttgctgcatacaacgccagcaagggcggcgtacgcattttcactaaatcggccgccctgcactgcgcgcgccaggggtacggcatacgcatcaactcggtacatcccggctatatctggactcccatggtcgaggcggtgactcagggaacggataccgagaagtacaaatccctggtggatctgcaccccattggccgcctgggcgaacccgacgacatcgcctacggcattctttatctggcgtccgatgaatccaaattcgtcacgggcagtgaactggtgattgacggcggttatacggcgcagtagaggccgatgcttatctggaaggggggcccggctggtgccggggcgacgccctgacttcgtcgaacgccttcgggaacaacgtatttcccggctgcggcgggagttcggaggtcgccggtcttgggcattaactggcgggcaggcctgcacccgggatatccgactcatctcagcggcgtcacctggtgcgggctgaccgcgccggccgcgttcccccagctgtttcggacataggtggccagtgcggcgatgtcgctgtcgctgagtgcgtggaagggcggcatgccatgcggtctggggttgctttccgtggcgggcgcatagccgcctttcagaatcatctgcacgacattgttgggcgatggcgcgagcacggatgtgttgcgggcaagcggcggccaggcgggcggcgcgccttcgccggcggcccggtggcaggcgacgcaatgctgctcgtatagtcggcgtccggccgacatgacggcttcggaaggctgcgcgcgcgctcctggtccggggcctggcgggagggacttcagataggtggccaccgccccgagatcatggtcgctgaggtgttgcgtgctgtcggacacgacggcggccatcggcccggccgcggtgctgtgcggtgagctgccggtgcgcaggagctcgacaatgtcttcggccggccagtttcccaggccatgcgcgtctccggtgagcgccgtcgcgtaccagggtgaatccatcatgccggcgccctggaagccccggcgcaggtcgttggcggcccagcggttgcggggggtgtgacatgcggcacagtgaccggcgccctcgaccagatagcggccccgattccagagcgcgtcatgtgccgggtcgggcgccagcgttccgggttcaaagtacatcgcgcgccagagcgtcagaagccagcgctggctgtagggaaagcgcagttcatgggggcggctgggtgtgtcggaagccggctgcgacatcagataggcgtggatggcgtcggtgtcggcgcgcgtcatgcgggtgtactgagggtaggggaaggcggggtagaacggcgttccatccggcgatttcccatgatgcatggcgttccagaagtcgtcggccgtccagtttcctatgccatgttgcggcgagggggtgatgttcggcccgtacagcgtaccgaagggcgtgggcatgggcgttctccccgcgaagcgctcgccgttggcgacggtatggcatcccgcgcagttcgcggcaagcgtcaggtagcggccgatctcgatttgttccgcggctggagcggcctcccccggttggggcgtggacgcggcggccgctgcggcatggcttccccaggcgatgaacagaagcggcatgaagacgcggcggagcaagtttgaaaagcgtgtgtgcgtcatggcttgcgttccgccgaggatgccggcccgcattcgatgggcaggggaagcgaccctgcgggtgccgcgacatagggttcttcgacgggccgggcggccagccaggcgctgactgccgcgatctcttgcggcgtgagcaggccggccacttccgccatgcaatccggttgaacggcgtggcgcagcccggtgcgccagcttccgagctgggcggcgatgtagtcgcgcggcaggcccagaaggccggggatgtgcggttccatgccggaaaaagaagtcccgtgacaggccgcgcaggccggcagaccgcgcgcggcgacgcccgattcagacagcgtccggcccgtttcacgcatggctgcggggaggttcgtcaaggccggggcggaatagggaagatgcgtgtcggcaaagtactgcgcgatttcgccgagatagtcatccggcaaaccttcgagcagatggcgcatgggctcgtaagtgcgcccgccgtcgcggaagctgacgagttgcgccagcagataagcggcgggtttgcccgcaatgcgcgggtagaagccatcaggccccgcccgcccgctggctccgtggcagtgggtacaggccgccacccgggcccgcatggtgtccggggcgagaggttccgacggttctgccttgagcgtggacggaagacaagcggcaagaaaaatcagcacggcgctcagtatggctgccatgctatcggtggggatgaagcgctgtggcaatgttgaagggtccgggcgggtcatgtatgggaattctgttcttcactacagtgctttgtcggcgggaaggatcaagctgcctgcggacactgtaggtgtgcgctgcgacccggtacaggctcagttgacgcaatatgcaccatatcagtttatccggaccgcccgctttaccgtcatgggctaccacgcagcacaatcgccccgtagccaggcggcgcatgtggccgagaaccgccggctggtggcgtcgactgcagtcaggggttgcggattggagccatcagttgtacgccctggcactcatccgggcctttttccgctgagcgggctcccttgaagcgcaggagccgcagcgcattcagcgtgacaatcgctgttgcgccggtgtcggccagcacagcgacccacaagccggtgaggcccattaccgtggtgaccaggaagatgcccttcagacccagcgcaaacaccacgttctggcggatgttcgccatggtggcgcgggacagcgccaccaggtgggccacgtcggtgacacggcttttcagcagggcggcatcggcggtttcgattgccacgtcggtgccgccgcccatcgcgatgccgacatcggcggtggccagcgctggcgcatcgttgatgccgtcgcccaccatggcgaccctggtctcgcccttcatctcgttgatcaggcgcagcttgtcctgcggcagaagttcggcttcgtattccatgcccaggctgccggcgatcgcccgggcagtgcggcggttgtctcccgtgagcatgatggtgcgcacgcccatggccttgagggcggccatgccttcctgcgcatcctgcctcggttcgtcgcgcagggccacgagcccgagcgcttcgcggcgctgctcatccagcaggacggaaacggtcttgccttcgtgttgcagcgcttcgatgcgcgcgagctgcccgggtgaaagtgccgcggctcgggtggcgtatatcggcgacccgatggccagccggcgtcccgccactgtggcatgcacggctttgccggcggtcgcgaaggcattggaagcggccggaatggcaaggccggcggcatccgcgtgattcacgatggctttggcaagcgggtggctggagccggactccacgcccgcgcaaagggccagcacttcgtccttgctttcctccgcaaacgcaacgatgtcggtgacgcgcggccggccctccgtcagcgtgccggtcttgtcaaaagcgatcgcccccacacggcctatggtttccaatgcgttgccgcctttcaccagcaagccccggcgcgtgccgaccgccaggccggaagcaatggccgccggcgtcgacagtacgagcgcgcatgggcaggcgatcagcaagagcgccaggccgcgatagagccaggtctgccagtccgctcccgtggccagcggcggcagaagcacgatcagcacggcaatggccatcaccgccggcgtgtagtagcggctgaaccgctcgatgaaacgggcggtgggcgccttggtggcctgcgcttcttcgaccaggtggatgatgcgtgaaatcgtattgtcggctgccgccttttccacgcgaacctgaagcaccccgtcaatgttgaccgagcccgcaaatacgctgtcgcctgtttccatggcatgaggaatggactcgccggtgatgggcgattcatccaggctggacgctccgtgaacgatcacaccgtcagccgggacacggtcgccgggccgcacgagcacaagatcatccacacgcagcgaggctgcggggacttcgcgctgcccgccccgcgcatcgagcagcaccgccgtcttgggaaccagtgaggccagggcattgatgccggcgcgcgcgcggccggccgccacgctttccagcagttcgccgaccgagaacaggaaaacgaccgccgccgcttcctcggcctcgccaatgatgagcgcgccaagcgcggccacggacatcagtgtctcgatcgagaagggcgagccggatctggccagggccgccgctttgcgggcaaagggcaggacaccggcgatgacggcgatggcaaatgcccacattccataagcgggaaagagcaatgaaatcgcataggcggcccccatcagcgcccccaggccgatgacctgcctgcctttcccggtctgccaccagtgcgggtccgccgccacaatgtgattgccggcttcgatgccggattccgtcttgcggcccatgccggcggacacgccgaacccgaggcccttgatggttttcgcgatatcgccgacctgggtcgctgaatcaggggcgagcgtcagctccagcttctcggtggcgaagttcagccggacgtcggaaacgccgggcaggcgtgtcagcgcggtttcgatcttgctgacgcagcttccgcagtccatgccctcgatccgcatggaaacattcgagttcgttgcctcaagaagaggttcttcccgccgctgcccgcatgctgtgccgccggcagccggcgccccggacccgcccggcggatagccggcatcgcgcaaggccgcctcaagctgtgctcttggcgccgtcgaactcacccgcacgctgcgtgtgggagggtcggtgacaatttgtgcgtgggcgtcgaccgcatgcagggctttgacgactttggtcgcgcagcccccgcaggtcatgccttcgacatgaaatcgcatgagaaatactccttgtatggggtcattagaaaccctgcagcgacttcagagtcaaggccgtgtccagctgaaaagctttgatttttttctcttgaaagtctatagttgctttagtgttgaagcgctggagaccatcatgtccatcaggatcggcgagcttgccaaacgcaccgaaacaacggtggaaacgatccgctactatgaaaaggaaggcttgttgccggcgccttcccgcagcgaagggaactatcgtctgtatggcgaagcgcacattgaacggcttcgattcgtccggcactgccgcagtctcgatatggcgctcgatgaagtgcgcatcctgcttcgataccgcgacacacccgccgaagattgcggggatgtcaacgctttattggacgaacatatcgacgcagtcgagacgcgcatcaaagagctgatgcaattgaagcggcatctgatcaccttgcgccagaagtgtgcgcacacggcatcgaccgagtcctgcgggatcctgggcgctctcgccgatcagtcctgccatagctagggaagctctgaacaagtcaccgcgccgcatgcatctgtggattcgggcggtctgccgcgttgcaaatgctcgcgatagcgacggctatcactgcgctttgcgcctcgctgcccacctcggtgcctgcatgcacctcggattcgccaggcatagaacagtccgcagggactgttctatgtccgggctcatcccgacccacagtgcctgctttccgctcgacttgttcagagcttccctagactctgttcaggccaggacgctcccgcgccggcgggctggcgggcggccgggcgcggcggcgcttgtcagcgatgccggcggcgcgtagtatgccggttcgcgagatgaaggcctttgccggcctttttgccaagggggtgccacaccatgccagacagacgcacggtattgcttgcggggcttgcggctgcctcggccagcctgcctcttgggcttctggcccagccgggctttacgctggatgccttcatcgaactgtcggcgcgtctcaccggcgttccggcggcggggctggaccggggggcggcgcgtgtgatgtacgaagccttcgacgggcgcgggctgctgcccgatctggccagcctcgccagccgcaccgggtccggggccgccagcacgcggctcggcgatgaagtcgtcgcggcctggtactcgggcatatgcgaaaccgccaatggccccgtcgtcgccacctatacgggggcgctgctttggggcagcgcatcctttctgcacccatcgggcgtttgcggtggggtaacgggttattggggcgacccgcccgccacttgagggtactgcgcgtatgtccgaaacgatagccaccgacgtcgtcatcatcgggtccggcatcgccggggcgctgatggcatcccggcttgccagcgcgggcgtgggcgtcatcctccttgaggctggtgatgccgtggatcgcggcaacgccgtccagacgttccatcaggcgctggagaaagtgccggaaagcgcctacccgcccattcccgaggctatgcacccggtcagcaatcagctgacgcaatggtatcgccagagcggccccgaactcttcaaaagtacttatctgaaggtgctgggcggtaccacgtggcattggctcggctcctgtccccggttccttccctccgatttccggctccaaagccagttcggccggggcgtggactggccgatttcctacgacaccctggaaccgttttatcttcaggcggaaaccgaactcggcgtggcgggggattcggccgaacccctgggctcgccgcgcagcggcccttatcccatgccgcccattccacccacctggctggacaaggtcgttgcgcgggcgctcgaaggcagccgcttcgaggtccgctccacgccgcaggcccgcaattcggtattccgcgatcagcggccggcctgttgcggcagcgccagctgtattcccgtttgccctgttggagccaagtatgacgccaacgttcacctgaaccgggcgatcgcggccggcgccaccgtgctgccccgctcgcccgccgtcaagcttgagctgtcgcccgaaggcagggtcgccgcggtg

SEQ ID NO: 1863 - DNA, 15284 bp, synthetic construct
  source 1..15284: mol_type = other DNA
  variation 222..223: note = n is a, c, g, or t
  misc_feature 1..15284: note = Synthetic
cagtcgatccccggcctgcgcccggcagaaccattgccacgccgcctcacaacccgcctcgccttccttcggcgcccacgcggcaaagtccttatccgacaactgcgtgtacggcccctgcttgacctccatgaagatcgagcccggctccagtgcaatcaccgtatgccaggtattcggcggcacctcaaagccaaacaccggcccggcgagatccaactnngccacacgccgctgcacctcaccactctcatcgaaaaacaacgcggcgatacggccccgcaccaaccaaaagaactcccacttctccgcctccgggtggcgatgcggctgcacataactttgcggctcaatcgcaataaacagacgctgtaccggctcatgcaggtccgcatgtacattcagattggcccgtcggcgcggagaggcctgcgccttctgcaccagctcatcgagcatctgctgatcaaacaccttcatttccatcacctaccttctaaactcaaaaccaatcaaattaacaaaattttaaaccaccgcccctgcattcccactaccaccagccgatacccaactgaatcagatggcagcaatgctgaagtttactttgcagacacgaggtaccccccatggaacccatactcaccggcctgatcggcaaactgatcgcctccggcgccacctgctggctgatcgatcacaaacgcgccaaacgtcgacaacagcagtcacgacaactgctcaatgccacgctgcacgacgcactgagcagcgagatcgaacactgccatcaactgctcagtcagccgaaaacggccgaacaacgcgagcaatgcgccgaggccctggatcaatgcatccacacctatcacgacaacggccaactgatcccgctgctgtgccaaccgcaggtcgccccgctgatcgaacaacactgccacgaaacacgggccatgatcgcgctactgcaaaacgctgccaatactgacgatctcaacccgcacctgcaacaactcgaggcacgcgccgccgacatcaggcgcgccctggcataagccacaccaatccggacatggctgctagaatggccgccatgtccgatttgaatccccgcatcagcgtcatcatccccagccacaaccgcgcccacacgctgccgcgcgcgctcgactcggtgctggcacaaacccgcagcgccgaggagatcatcgtcatcgacgacggctccgatgatgacacccctgacctgctcgcccaacactacccacaggtgcgcgtgatccaacaaacaaaccagggcgtcagcgccgcacgcaatcgcggcatcgaacaggccactggcaactggattgcactgctcgactccgacgacgagtggcaccccaacaaactgcaatgccagctcgaggccctcgccgccgcacccgcgcatcgactgatccacagcgatgagatctggctccgtaatggcgaacagatcaaacagatgcaaaaacacggcaaacaaggtggctggatctttcagcactgcctgccgatgtgcgtcatctcgccatcgacaaccatgatccaccgcagcgtcttcgacgacatcggctacttcgacgaagacctgcccgcctgtgaagactacgacctgtggttgcgcctgaccgcccgcgaacccgtgctctacatcgaccaggcacttatcaccaaatacggcggccacgccgatcaactatcagcacgcttttggggcatggaccgctttcgcatccgtgcgctggagcgcctgctcagcagtgacaccctcaggcacgaagacttagaggctgcccgccaagtgatgttgaaaaaggccagcatctatctcaacggcgcacgcaaacgcggccgcaccgagatcatcactgaatacgaagcactgctgcaacgctggcagactgaaacagaggcctgaaggaagacgcatgatcaatctaatcgtcgccctacaggccgaggccaaaccactgatcaaccactatggtttgaacggccgcgcaaccgccggtggttttcgcctctaccagcgcgatgacctgcaactgatcgtcagcggcaagggcaaactggccgccgcggccgccaccaccttcatcgccgatgacaacaaccacgcctggctcaacatcggccttgcaggcggcacatcgatgacgatcggtgagtcggcactgatcgacaagatcaccgaccacagcagcggccagcgctggtatccaccacacgttatcaatagccccacattacgctgcgccctgaccacggtcgatcagccacaggccaacggcggcgccgaacacatgctctatgacatggaggccagcggcttctacgccagcgcgagccggtttaacagtggcgagctggtgcaatgccttaaggtcgtgtcggatgattgccacaacccgtgccaaagcgtcgatgcagcgctcggccaagaactgatcgaacagcaactcgatgcaatcgatcacatcatccaacaactgcgccagctactgaccacgcaacaggagatgtttgccacacccgaacacatggcgcgcttcctggcacagtggcatttcagcaccagccaacaacatcaactaaaacgactgctgcaacgctggcaggcgctcgccccggcgtgttcgccattcaacgatgccctgctagcgcagcgccatagccgccaggtgttaccactcttgcaacagcagatcgacgagatcgagagttatttttgatgatcgacaccctctacatcgaggccgccgtcgccgatcatccacgcacccgcgagatctgtgcacgttatcccaaggcacgacgcatcgattgtgaacgctatagcgaggtctttaatcccgccgcgcaaaacttccgcctgcaaaaacaaaagcccgcgttgatcctcgccagcaagttcaaaaacttcgtgctcccggcaccactgagttacaacatcggcggccagcataattattatttttcgcacatgctgaactgcctctacgactgccgttactgtttcctgcaaggcatgtatcgttcggccaactatgtgttgttcgtcaactacgaagacttcgaccgagcgatcattgagacagcgcagcaacacaaagaacctgcgtatttcttctccggctacgactgcgacagcctggcactggaacccgtcaccggctttgccgcgcacgcactcgataccttcgccagacaccccaatgccatactcgaactgcgcaccaaaagcacacagatccgcgccctgcttgatcgccccacgatcgacaattgtgtcgtcgccttcagcctgtcgcccgacagtgtggcgcaggcgctggaacacaaggcaccatcactctccaaacggctggatgccctcggcaaactgcaacaggcgggttggaagatcggcctgcgctttgacccggtgatctattgccacaactatcaaacgctgtatgccgatttctttcgccaggtatttgcacacatcgacctagagcgacttcactcggtcagcctcggcagctttcgcatgccccacacattctttcgcaacatggtgcgcctctatccagacgaaaagatgtttgccgcgccgttgaccgacaccaacacgatggtggcctacccggccgagatcgaacaacgcatgttaagcttctgcaaacaggaactcctgacacacatgcccaaagaaaaactgtttgcctgcacggaagaatccatatgagtgaacatagaaccgtcttgatctccggcgccagctccggcatcggtcgcgccatcactgaattgttattggccgagggccatcgcgtgatcggcatcggccgagacttcagccaatgcgcctacgatccacatcgcttcagtgcgatagaaatggacctcggcgacatcaaggcgctacccgcacaactcgatgccctggccaaacaacacccagagatcgatgcgctgatcaattgcgccggccgcggccagtttggctcgctcgaagaattcagctacaaacagatctacaaattgatggatctgaacttcaccagccatgcctttgtctgcaaggccttcatgccacagttaaaacaaaaggcgcacagtaacatcatcttcatcggttcggaggccgcattggcaggcgcacaaaagggcagcatctactgcgccagcaaatttgcgctgcgcggttttgcgcaggccttgcgtgaggagagcagcaaacagggcgtcgccgtctccatcatcaaccccggcatggtcgacacacccttctttgatgaactgaacttccgccccggcgatgacagcagcaatgccattcaggcaaatgatgttgctgaagcagtgaagatgattttgacagcccggccgggcacggtgatcgacgaagtgaatctttcgccgctaaagaaggtggtacagttcaaacccaaacgtgattgattacaggtcacgctgcaacaacagacgccgcaccagttcgcggctgtcatctggctgatcgaggtccgcctcggccgtccatgacatgtcattttccagtcgaaaactgccggcaaactgatgcggcggtttaccgccccaatctttcggccccagcatcgaaaaatatgtgctgccatccatccgttcatacaggtgatagatacggccagggatacgtttgaagttacattgcgcacgatgcagggcctgatcacgctgtgcatcttccagcgccgcctgtgcctcttgctgcaatagccgaatctgctcggcgatcacttgcaacttggcactgacacgggtattgatgtggctatcggcggaggaaatctgttgcgccagatcaaccaggtcgacactcgcgcccaaacgactgacgggatacggcgcggtgcgggcactgccctgatgcacctcacccttaccttcatgttttttatattgctcactcatggcgccattgtacgcgccatacattcaactgttaaccgacggcattcaaaaaactggtttgcaccgcttgtcccaacacaacctgattgcggccacgctctttggcctgatacaccgcctcatcggcaaccttgaacagctccgagaactcggcccgctcccctgcctccaatgcggccacaccaaaactggccgtcacctttaatccagctggcatcagttcggcaatcttacggcgtatccgatcggccttggcgcaggcatcttcggctgtacagtgcgacaacaacaatacaaactcttcaccgccgaaacgggccgcaatatcctccttgcgacaggcatctttcaacaccccccccagctcctgcagcacaacatcaccggcctgatgcccatgggtatcattaatcgatttaaatttatcggcatcgacgatgaccaaggcacatgcaaatttatgccgcgccgcctcagataacttggcgttcgccgcttccatcaaataatgacgattgtacaaaccggttagctgatccttcatcgccagctcatgcatgcgcttttgctgagattcaattcgatccaccaggcgcttattggtcaaatgattggcgacccgcaccaggagctcttcatcgatataaggtttaggaatgtagtcgctggcacccgaacgtaacaactcaatcttgcgcgcactgtcatcgaaccccgtcatcaccaaggttggcactcgccccttactgccctcggttgcacgcacatggcgcaacagggcgttgccactcatgtcaccggccaacatcaagtcggtcaacaccaggtcataggcctcgtcatgaaagctcgtcaacgcctcttcggcggttacaaagtgcgtcacttgcagccccgccgatctcagcaaggccttggtcttttccgcaacagacaatgtatcctctacatacaacaccttgcctgacagcttttctgccctgccatgcaacatgacaaactgcgatacatactcccgcaacaattccagattgtctttgcgaaacacctcggttacgccggaagagattgcccccgccaacagggccctgtcttcgctgctggtcaccatcaccagcggccgatcctcaattagcccacgctcgcggattgcatgtgcaagcgccacgccatcagtgtcttttaacaccatggaggtacagacaaaatcaaagtgtttcttgacgagcatatccaaggcctgctgcccggaagccgctaattcaacatccatccccccttgttgaatcattgctgagaacatgcccgcaaaaacccttgatgattcgacaatcaaacttttcattcaatcaccaccctctacatctgcaggagcttctacccctccatggacttaatggttttatggctaataaaacctacagtcatcaacggacagtgatcaaagttatttacaacaaaatatgtgctacatattaaatgctagatcgttcaattcctgcttgtttcaacgcctgagcaatgtttgctgatatttgctgacttcgattttcatcaatagattcagaaactcgctgtacttttccccatacagactctggaaaatgcggatcgctcctaaagcgcggaatgacatgccaatgcaggtgcggcacataattacccagcgatgccagattaatcttgtccggcgacaatacctgacgcaacaccgcctccaccgcaaataccacctgcatcacatgcatccgctcgccagccgcgagatccgtcatttccgccacatgacgattgagtattacgcgacaaaaacccggataccccacctcattcaccaaaatcacacgacagatatcatcacgccacaacacctgttcattttccgccatacatagcggacacgcctgttctgccatctcacaccccaaactcaatttcgatagacgattgcagtgcaccatagcgcaactgcaaataagacgcctgggccacgagcccatcccccggcaccacggcgcccgcgtatttcaaatgcgcggttggcggcagctgttgctgtaactgctgccacaacgcggccgaccatggccgcacactcgccaacaactctgccgcagaataatcacacaaggccaaaccgggcaggtcgcgcccgtgctgatccacccgctgaccgtactcatgtttaaacgcctgcaacacctgctcaacgtcgacatcaacctgttgcaacagtgccgcagcgcgtctcaccccttgccccaactcaaaataggcttgagatggcaactgccacgtttgcgccatccattcggaccccgccaattgttgtggcgacatcgaggcgcagagcatcctgctatctccatgcgccactggcaccttgatcgagggcaagacaggcagtgcctcttcgtcttcggcctgacctttgtacaaccaccacaccgggttggtcgccaattccaacagatcatccatcacctgcaggcgttgccaatcatccagcaccgatgtcgcgggtacgagttcagacaacacactgctacgtgataactcatgctgatcttccgccaggctttttaaacctgccgctgcaattgcaatgcgccattgccaggggcgcaacggccgctccaacgcatgtaaaaaggcatccaccaaaccggcctccgtgcgatgctcactatgcgcaaaaaaacaggtctttaatggatgggcatccggcaactccctcatcaagctcgccgccgaccattgcaaacgcggcgtgtcatggtgcagcccaaaccagcgcagccatacccccacgtgccgaatccacagccgactatgcgcgggataggtcaccactctcatcaaaccgccaggcttcaacatggatgccaaacgcctcagcgccagcgccgcatccggcgtgtggtgcaacacattgctggccacgatgtaatcaaactcaccgccatgccagtgatgcatatccgccgccacgcgctgcaccctcggcaatgatctgccacgcaaggccgccaacgaacacacatcgcgcatacgtgccaacgtgagacgccgccccaggcgctgcaatgacgcctcactcagatccagcgccacgacctccgaggcctgcgggtgcatctgcgccacgaccaaggcctccacggtgccacaacctgccaccaggatgcgcaggccacgaccatcgctcgacagattcaaaccttgctgacgcgcccactccgcacctcgtgcccacgccagcgcctgaccttgatcacgacgcggcagcgccagcgcattcaccggcggataaggaaaacgctggtactggcgcttaacggacagactcatgccggacgcatatcaaacaaatcgatcttgtcacccgccttgggtgtaaacaccggcgccacaccatcggcgcgaaaacgatcggccagcatatccatcgcctcttcttccccatgcaccaacaccaagggcggtttgcctttgaaatgttgataccagtcacgcagtccatgacaatcggcgtgcgcagaaaagccgccaatggtatgaatcttggcaccgacactgaccgtctcgccccacagcgtaatctgcttcacgccatcgactaaacgccgccccagggtgccgcgcgcctgaaagccgacgatcaagacatgacagttgtggcgccagatattgtgtttgaagtgatgcttgatacggccgccgctgcacataccgctcccggctatgataatcgcaccgctttgaatacgattaatgcccatcgaatcttccacattacgactcaaatgcaggttaggcagatcgaacggactgccctcctcttcgcgcagctggcgcgtctccttgtcatagagattgacatgacggcgataggtctcggtcgcctcgatcgccatcggactatcgagaaagatcgtccagcgatccaactgccacttgtcgtaattcaacttaaatgcgtgcaacaactcttgcgtgcgcccgacggcaaaggccgggatcaacacattgccacgctcgtgactcgcccccaacaacaccgattccaactcggcccaggttgaatcccaaccacgatgggcgcgatcaccgtatgtcgactccagaatcaccaagtctgcttcttgaattgcagttggatcacgcagaatcggcgccccacgatgaccgagatcaccactgaacaccaacttgcgctgctcgccagcatccgtcagccacagctctgcaatggccgaaccgaggatgtgccccgcatcctgcagccgcaaacgcacccccggcaggatctcgatcgcctgttcatattgcagcggcttaaactgatgcatcaccgcctgcgcatccgccatcgtatacagcggctcgatcaacggcagctgcttacgctcacgcttgcgattctcccactcggcctctcgttcgttcaggtagccactgtctttgagtagaatcgcacacagatccatgctcgcggcatgcgtgtagatgggcccgtcaaaccccgccttcaccaacaacggcagacgccccgaatgatcgatgtgtgcatgtgtcaacaccacagcatcgatctcggtcgcatcaaacggaaacggctgtgcgttgcgcgcctcatcctccggcgttccctggatcaaaccacaatccaccaacacacgacgaccaccgatacggagcagatgacaggagcccgtcacctcacgggtggcaccaaaacattgcagggaaagttgtcgtgacataatttttctccagaggcaattctcaacacaaaataacgaccacagagaacccgaccagaacagtcaaacatgcctgcgcacaattcagtcaggtgaacaaattcaatacttatattaaggtgaagttgcggtgactgaaaacaaaaaaggccgcatatagcggccttgcatttggtgccctacggcttgttagcggtagtgctcatatcccaataaagtagcatcgccagtatacgccccacaattcgaagaaggcaacaggagaaaatatgctatccaatctaaactatcgactggcgctagacctaggcaccacctccatcggctggtgtctattgaagcttaataaactccacgagcccgttgcaatcatccgcatgggcagccggatattttcagatggccgccaccccaaggatggctcatctcttgcggttgcacgccgcgaagcccgtcaaatgagaaggcgacgtgatcgcctacttaaacgcaaacaagcgatgactcacgcgttgattgatcttggcttcttccctcaagacgaggatcaacgtcaagccctcacccaactaaacccataccaactacgaaaaaaagggctatacgaagaactcagcggcgcagagttcgcacgcgcactgtttcatatcaaccaacgccgcggttttctcagtaatcgcaaaactgacagcaaagattctgagagcgggttactcaaaaaatccataaaaactctccgagataaattagaacaagaaaactgccaaacgcttggcgaatggcttgccaatcgccatgagcaacgcctgagtgtccgcgccagactgcgcggcgccactcaaaaagataaagcctatgacttctacgctgaccgggccatggttgcccatgagtttgaaacgctgtggcagaaacagcgccagtacaaacccgaactattcacccaagcagcacacgacaaactacaagacatcctattgtttcaacggccactcaaacccgcacgtccagggcgctgcacactcttgcccgaagaagaacgcgctccactcgccctccccagcgtgcaacagttccgcatttaccaagagatcaacaacctgcgcatcctaaacgatctccaagcagagaaaacacttaccatggaacagcgtgacattatttctgatctactggcacagaaacgcgatgttagtttcacggaaatcataaaaaaacttgggcaaccaggatccgcaaggtttaatttgcaagacatcaagagaacaagcctaaaaggtaacatcaccaatattcagctaagcaacaaaaatgcctttggaaaagagtggtatcgattttcactcgaacaacaagatgaaatagttacccaactactcgacgagcctagcatttccaccttatgtgactggctacaaaaatataccaacattgatccagaacaggcccagcagattgcagatatatcgctctccagcggatatagccatctaagcagcaaagccatcaataaagtattgcccgaattaaagaaggacgttattccattttccgccgcagttaccaaagcgggacttggcagccacagcgcattgtctcacgcggaccaaacaggtgagattatggatcgcctcccctattacggcattccgctatcacgccatgtcggctttgccaaagaaaaccctcgcaacgaagaagaacgatatggaaaaatcgccaaccccaccgttcatataggtctcaatgaacttcggaaggttgttaatgccttgatcaacaaatacggtcacccacaagaagtgatcattgaagtcacccgagatctaaaactcagtcacagcaagaagcttgagttacaaaaagaacaagctcagcggcaaaagcagaatcaacaatacattgaggatgcctgtaaagtactgcaacttaacccagacaatctcagcaaatctcagcgccgagaaatctcacagaaaatacaattgtggatcgaactcaaccctaacgccagcgatcgctgctgcccatacagcggcgaacaaatcagtatccaaaaactactatccaacgaagtagagatcgagcacattcttccgttttcaatgacgctcgacgacagcatgaacaataaaactgtttccatgcgtcacgccaatcgagacaagggaaatcggtctccctacgatgcctttggcaacagcaatcactacgattacgaggccatccttgcccgcacaacccgcatgcctcgcgccaaaagaaagaaatttgccccggacgcattacaacactggcaggacgaagagcaaggatttattgcccgcgcactcaatgacacggcctatttttcgcggattgcgcgtgaatacctcacactcatctgcccacccaacaaggtccatgcaatcccgggcagacttaccgccatgctaagaggaaaatatggcctaaacaaactactgtccggcaccgagctcaagaatcgcaacgatcatcgccatcacgcactcgacgcagcagtcatcggcattaccgatagaagcctgttgcaaaaagtatcaacggctagtgctcacgcccgcgaactccacctcaatcgcttaattgacgatctaccagaaccctggcccaaataccgacagcaggtcgaaaatgcactcaaggctatcattgtcagtcacaaaccagagcatagttttgaaggcgccatctttgaagctaccgcctatggcatacgccgtgatggctccgttgttcaaaaaaacaatcctgacaaagagaagcaacgagttatcgattatgtcgtccccatctatgcacctgaaaaatctgatcgccacggcaccagggatgacggatcaccacgcgcctacaaaggatatcagcccggcggtaattactgcctggagatcattcaagcccccgaagggcactggcaaatggaaaccatccctattttcagagcctatgaatatgcacgccaactcgggtggggaaggctagatactaaccagattctccccaatatcattcgtgacaaactttcagacaaacctggcgagctgctaatgaagcttatgccgggcgacacgatccgcatgaactacaaaggccagcgaaatatgttactaagcgttgttcaaatgagcgtaaaaggtggggcaacatttacccctatccacgaagccaatattcaacaacgctatacaaataaactcaaagccaataaagcgcttaaacaggcagacaataacgaatcacttctaaacgaccttgatcaatcagcattaaacgatacatttattcgttctcaaataggtatcgccgaactgcaagcgggcaatgctcagaaagtcacagtatccccaatcggcaccctcaaccaaggctaccgaaggaaaagctaggcatgatagggcgtatcgttgaagtcgcagatgacaaacgccacttgtttgtctctcgcggcttcatggtcgttaaagaaaccgatggcgatcgcaatgagcttgggcaaataccgctggatgatatcgcagccttaatcgccaacgctcacgggcttagctataccaataatctactggttgcactcgctgaacggggtgcgccatttgtactatgcggagcgaatcacaatgcagtaggggccttatggcctatcgatggtaatttccagcaagctaagcgttttgacgcccagctcgccgctaaacgccccttgcaaaaacgactatgggctgagcttgtacgcagcaaattacagcaacaagccgcagctttggaagcagctggtgttgccaccgcgcctttattagcactagtaaacaaggttcgatccggagatccagacaacatcgaagcacaaggggcacgccgatattggaacttgctatttggtgaagattttcggcgcgaccaaaatggcgacggcatcaacgggttgcttaactacggttatactgtacttagagccaccgtagctcgttcagtcatcgcggcaggccttcaccccacgctaggtttacatcacagcaactcgggcaaccccatgcgcctgattgatgatctaatggaaccattccgacccgccatcgacttacacgtttggcatttacagctctatggtgaaaacaaggtcacgccagacaccaaacgaacgttagtgcgcagcctctatgacgacatgcaaacctgctcaggcgccacccctgtcatggtatgcacacaacgcctagccacatcactagctcaaatatacctcggcgaacgtgaaaaacttgatctgccactgcccggcctgccgctcgatatggctgcgagcttggtcgaacgataacatgctgagcggttataggatcatgtggatagcgatcatgttcgacctgcccgttgttgaaaaatgcgagcgcaaagctgccactcactttcgcaacacgctattagacatgggttttgaaatggcacaattttctgtctacatgcgcttttgcaccagtcaggcgcaaatcgatacctactgcaagcgagttgaacaggccttgccctccggaggccgggtgaatattctagtctttaccgacaaacagtatgaacggatcatttccttcaatggtaaatccaaacagccggcgaaaaaatcccctgaccagttcgatcttttctaattcagacatgattttttctcacccaaaaacgaaaaacccgctgataattcagcgggttaaacgactgggagtttacctcattgggatatgagcactaaccggaacaatctatttgtgtatgcgcccgacggcaaaagtttacctcattgggatatgagcactaaccggaacatttctgaactcataattaagactccaggaagtttacctcattgggatatgagcactaaccggaacatgaaccgctttacggccattgtcccgccaagtttacctcattgggatatgagcactaaccggaacgttaacactaggcggtgcagtggtcggcttagtttacctcattgggatatgagcactaaccggaaccacctggacatgcccaagcaggatgcattaagtttacctcattgggatatgagcactaaccggaaccacccagcgccacggccgacggggacttctagtttacctcattgggatatgagcactaaccggaacggctgttgccggggaagttgttccgggtctagtttacctcattgggatatgagcactaaccggaacatcgccgtaccggcccgcgtgcccttgataagtttacctcattgggatatgagcactaaccggaactgaatggaacgactaccagcgtcaaaaaaaagtttacctcattgggatatgagcactaaccggaacgtaccgttcggcgcgcgcaacgccgacaaaagtttacctcattgggatatgagcactaaccggaaccgcacgatccagtacgcgctggcggtacgcagtttacctcattgggatatgagcactaaccggaactatggttttgggcgctaccatgcggcaaatagtttacctcattgggatatga

SEQ ID NO: 1864 - DNA, 15097 bp, synthetic construct
  misc_feature 1..15097: note = Synthetic
  source 1..15097: mol_type = other DNA
gcgcgccgatttgctgggtgcgttggcgcaagcgcctgggccggtagtctttgtcagcaatgaaatgggctggggcgtcatgcccctgggccgggccgtgcgcgcctttgccgatgagctgggggcgctcaaccaaatgctggccgcgcactgcccgcaggtgctgttgatggcggcgggcttgcccatgccgctcaaatccgcgccgccaggcgtgtgatgggttgttggattggtttgcaaatcaatatgaatttgaaataaatgccaacatgccagaattggttgatttttattcctattgatttgtaaaaatgaaaagccctctgcgcacaagcgtcagagggcggagggggctgggcaggcgagctgccctgccgggccggagcctagagcgtgttacgcgcgaatcaggtgatcgaacgcgcccagcgcggctttggcgccttcgcctgcggcgatgatgatttgcttgtagggcacgctggtgcaatcgcccgccgcaaacacgccggggatattggtggcgccgtgggcatcgaccttgatctcgcccgtgggtgtcaaatcgaccagacccttgagccagtccgtgttgggcagcaggccgatttgcacgaagatgccttccagccccagattgacgatttcgcccgtctcgcggtttttataggccaggccgttgactttgccctgcgcgccggtgacttcggtggtttgcgcgttggtgaggatgtccacattgggcaggctcttgagctttttctgcaacacctcatcggcgcgcagttgcggggcgaactccagcagcgtgacgtgctgtaccacgcccgccaggtcgatggccgcctccacgcccgagttgccgccgccaatgacggcgatgcgtttgcctttgaacagcgggccgtcgcagtgggggcagaaagtcacgcccttggtgcggtattgctcctcgccgggcacgcccatggagcgccagcgcgcgccggtggagaggatgacggttttggatttgagactggcgccgctttcaaactgcacctcgatcaggccgccgggctgggctgcggggatcaggcgcgtggctttttgcaggttcatgatgtccacgtcgtagtccttgacgtgggcctccagcgcggcggcgaatttcggcccttcggtgcgggtgatggaagtgaagttttcaatatccatcgtatcgagcacctggccgccaaagcgctcggcggccacgccggtgcggatgcctttgcgcgcggcatagatcgcagccgtggcgccggcggggccaccgccgatgacgagcacatcaaacgcctctttggcgctgatggcctgggcggctttttcggccgcgccctggtcgatgcggccgacgatttcggccagctccatacgcccctggccaaagtgctggccgttgaggaagatcgtgggcacgcccatgatctccctggcttcgatctcgccctggtagagcgcgccgtcaatagcggtgtgggtgatgttggggttgagcaccgtcatcagattcagcgcctggatgacgtcggggcagttatggcaggtgatggagtaatacgtctcgaagtggaagcgcccctggatgcccttgatctgctcttgcagctcttgcggctctttggaagggtggccgcccacttgcagcagcgccagcaccagcgaggtgaattcatgccccagcggcacgcccgcaaagcgcaggcccgtatccacgccggggttggtgatgaggaaagagggcacgcgcgcatcgctgccatcggtgcgtacggtgattttgtcgctctgggcgcggatgtcttccagcagctcgcgcatctgggctgcgccttggctgtcgtccagcgtggcgaccagctccacgggcttggtcaggcgttccaggtaggctttcaattgggctttgagtgcgtcgtccaacatgggtgcaaatccttgcaaaaagagggggagggtaggcgggggggcgttggggccgtcgttgggctggtttttgcgcgtaaaaaagccccgtgcccgcagggcaggcttcggggctgtgagccaagtgacgcgcgctgggaggtcagcgcgcggccctggccttcatcatcgtggggcgatgtggggggggcagtgagcgattaaatcttgccgaccagatccagcgaaggcgccagcgttttctcgccctcttgccacttggcggggcagacctcgccggggtggctggccacgtattgggcggccttgatcttgcgcagcaaatctttcgcgtcgcggccaatgccttcggcggtgatttccacagcctggatcacgccttgcggatcaacgatgaacgtggcgcgatcagccagaccttcgccatcgcgcagcacgtcgaagttgttggccagttggaaggtttggtcgcccaccatgtagtactggatcttgccgatggtgtcggaagaatcgtgccaggccttgtgggtgaagtgtgtgtcggtcgagacggaatacacctcgacgcccattttttgcagctcggcgtagttgtcggccacatcgcccagctcggtggggcagacgaaggtgaagtcagcggggtagaagaagaaaacggcccatttgcccagcacgtctttttccgtgatttccacgaacttgccttgatggtaggcagtggctttgaagggcttgatgggggtattgactttggccatgctgtttcctttgtttggagaagggttgatggaggtaactcgcaatggcgggcagtgtaggggttttcccttttttaatctaattgaatgatttgatggtttcgatagtttttagttatctttttgggtggctgatcgtgaacagccgatctcgtcgggcgttggcaagggtttcggatgggcgctcgccgtagcgcttgcggtaatcggcggcaaactgccccaggtgggtaaagccgcacgccagcgccacttgggtgacggaggctctgtccgcgcacagttgccgccgcgctgcttccagtcgcatgttttttaggtgcgccataggggaggtgtgcagatggttgcgaaatccgacatgcagactgcgcacgctaatgcccgctgcctgcgctacgtcggcgatgccgatgcagtggggtagatgctgctccatgaattccagcgcgcgccgaataacgtgtggcagcactgtggcggggcggttgctggcttggttgtgcgcttgtaatgccaatagtgcgtaagcgagcgtttgttcgaaatgctggatgtgccgggggtgctcgaacaaggagccgttttcggagatttcggcaaactgccaattgagcaggcggcgcaaactggcgcctgcgggttggccccaatcgatacgggggtgaaattgcagcagcgcgccgggatcttgcccgaagtagtcgcgaaagtggcgctccagaccgtgccggttgatgcggacaaacaatttgtcggcgtcatggctgtgctccatacagaactgctgcgcagggctgatgaccgaggccagggtggcggtggaggaaaaacaggcattgggggtgtggatttgctcttgcccgcgcaatggaatttgcagcaggtagaagtcgtcaagcggctgaggctcaatgcgcacttgcgcgccgtagcgcagacggccataggccatatcctgcccttgacgcagaaacaagtgggtatccaggctggcaccctgatcgagcaggatcagcttgtgggggcagaagacctgcgtgatgtggcgctggacatgccccacatcgcaggagcgtagctgcgcatgttgcgtcaagaaagaagccatagcggacaacgggcaaaagccgattgccatcttggcatgcttgagggcggcaggaaatcaaggctatccctattgctttggctctcaatgatcggtacggcctcgcgctttattgccaggccaggcagcgcaggtcgtttgctgcctggccgctgccatggggcagttggttgctgtgcgctgcgctgttatgcctggaagcgcccaaagcggccttgccagtacagcaaaggcgaatcttccagcggctggggcagatgcacttgcagcactttgcccagcacgatggcgtggctgtggcgcagcacgatctcgacgacttggcaggccaaggccgccggcgcaaggcgcgccagccagatgccgtgttcggtacacatccactcatggccggcatagcgctgttcgccttgctcgccttggagtccggcaaactgctgcgccaggcccatttgcgctgcgctcaagatattgacgccgaacagtccgctatcgcgcagcaaaggccatgaagacgcgctttgattgatgcacaccaggatttctggcggctcagccgataccgatgtcacggaagtggcggtcaagccgccccggcgcccttgatgcgcgacggtgatgacgttggccgttccgcccaaatggcgcatggcctgcttgaattgatcggcagacaccgcgccgggcaggcgcccatcgtgcggatgggcaatggctgctggcaggggcttggaaaccatagggtgacccatgtccaactggccttagcggatgccgcgttgttggagcaggggaagcacggtgtcgcggaagtaggggaactcctgcacgtagtcgaaaaacgagagcgtggtgccgcgaaaacctgcttgctgcaatgcgcacaagcgctcggccacttgctctggcgtgcccactaaaggaaagccgccgtggcccgttgccatgcgctcgcgaatttgcgccagcagctcgtgggggaaggagtgggcgtgtgcaaattgcagatgcatgagattgtccaaagcgccctcgtcggtgttttggagctggcgctgccattcctgcttggcttcggcctcggtggggcggcagatgacatgggagaacgtcatgacgtccaccttgcggccctgcgcctggccctgggctttgagcgcggcgatctcttctgccgagcgctccagttgcatggcgggcgtaaagagaaagttggcattgcggctggcgaattcgcgcccctggccggagccagccgcattgaaaacgggaggatcgaactcggggcgcggattgccatacacgcctttgagctggaaatattggccatcccaatcaaaccggccttcgtgatgccagattttcttgatcacatcgaaccactcttgcgcatagccgtagcgtgtttcgtggtcatcgggcagggcaatacccagggcgtcgtattccggcttgttccagcccgccacgatattcaggcccacgcgattgccgctcatttgcgccatggtggcaatttgcttggccagcgcgacgggatggttggccacggtatgcacggtggcaaagacgctgatgcgccttgtatgggccagcaaggcggtcgcccacgtgatggtttccagcacatagccgtggaagtcggtttggccgccgtagccaatccagcgtgcaatcggcagcatgaagtcgatgcccgcctcgtcgagcatgcggccgagcttgaggttgttgtcccaagtggcttgccagcggtcgggcaaggtggataccgtcatgcccccgccgcagttggaagcaaaagtgccgagcaaaaacttgtcgtgggtcaataaagcgttttgggccatggtgtgtctcctggatattgttggatgaggccagcccgcgctggtgctggcgcggcacagtctagggagacggcccatgcagctctatcaaaaaaatgcggttttatcgaaaggctgcaattgattgattgttgtggatggccgtggcagatgctttggggcgaatgcgcgcgcgagacgcagcacacaccgaggtcggcgagcggctggcttgggcaggcttttacaatcgcgcccggcccaagcagaccgtgagggctcatcaaaaggagccttgtatgccagagagtgcccgtgctgcggccgcgcctgtgggtgtggccgattcatccaaagtcgtcaaagcctatcggctgaaattcaccggcacgggggcagagtactttcgcgtttggtttgtcaacatgctgttgatggttctcacgctgggcatttacaccccttgggcgcgcaagcgcacggtggagtattttttcggccatagcgtgttggcgcggagtccgctggagttcacggcggaaacccggcgcatggtgattggctttttcgtctttctggggctttacagcttgttcaagcaagccaccaacagccagaacgcgctgctggtggggctggcgctgctggcggcggcggtatcggtgccgtttttgtgggggagtgcgcggcgctttcgcgttaccgccacacgctggcgcggcctgcgcttgcgttttggcaccagttggaaagagatttactgggccagttggccggtgttcgtgattgcgctggtctggttttgtgtgtacgcgggcatcgacatgcgccacaccttcacctcgcccagcctgctggaagaaacccgccccaaaacgtttctgggcctgacggtgatcgattggatattggtggcgctgggcctggtggtgagctggctgtgctttgtgcgggtgatgttcaattaccagcgcttgacgattgagcgcacctatatcggggtggaacagggcgtctttcgcggcacttacggcgatttcgtgcggatttggctgggcgcaaccctgattgcggtgctgggatttgcgaccgttgtcacgggggccagtctgctgcttgccgagcaattgcccagccgtttcggctgggatgagcaggtcgaggctgctgtggagcaagccgctgcggaagaggacgaattcagccaggcgcgcaggcagctttacgaaaaaatgcaggagcaactggagcgatcgccccaatcggtcgattgggaaaccttccgcgtcgagatgcaggccattgaggaggcccgccagcaaaagtgccgcgaaccgggccagagccagcagccttactgccaaagcgctgccgggtggtggacagaaggcgaagccgatccggccgaggcagagaccgatgaggcagcgctggaggcgggcggcgccgatttcgtcttgatcgctctgatagtgctgtcctggctgcccatgctgctggtgttcgagatcgcccacgcctaccgtgaggccaagcagcaccggctggtgtggaatctttcgggcgtgagcgatattgcgcgctttcgctgcaagctcagcgtgggcggttacgtgtggctgcggctgcaaaactggctgctcaccgtcatcacgctgggctttttccgcccctttgcgcgggtgcgtgaataccgcgcgcgctggacttccaccaccgtgcacatccgtggcggagcctcgcgcctgcaaaacctgctgaccatccagcaagaaggcggtgcatttgccgatgccgttgccgacttcgctggctttgacatcgtttcctgagcacgaggccatttgccatgcccagcgcagcccctgaacatgccgcggcccctgctgccgcgcccccgccggtcctcaaagccttgtggttcgacggcaccagcagcagcggccagcgcgtgctggccctgattgagccaggccccaaggggccgcggctgacgctggcgccgctggaccccgaggccctgggcctgacgctggacagccccgacgtgaaatggccccaaacctacggcaaggccgaccccaagcgccgcctgacggtgaacttgggcgagcacggcagcctgcaagtggccagcgctgcgcagtggcaccgtgcctatgagctggcaggcgggcggcgcaagatggccgaacgcttgcaaacgggctggaaaatgctcatcggcttcacgctggcgtgcgtgcttttgctggtggcctttttccgctacggcaccccctgggccgccgggcaactggcgcgctttgtgcccctggggtgggaaaccgcgatgacggatggtttcctggagcaaatcgagggcaagttctttcgccccaccaagctctctgcccagcggcaaagcgatttgaaagagcgctttgccgccatgctggccgacatccccgagcgcatgcagcgctacggcagctaccaacccttgtggcggctggagtttcgcgccagcttcatcggccccaatgcgctggccttccccggcgggctggtggtggtgacggacgacatggtcgaactggcccaggccaaaggcttgggcgatcacgccctgatgggggtgatcgcgcatgaaatcggccacatcgtgcaccgccactccagccgcatgctgattgagcaaggcgtgctcaatgccaccctgagcgtggcgctcaacgacgtttccagcatggtggcgctggccagcaccagcttgacggtcttgtcctacagccgtgaccacgagcgcgaggccgattgctttgccctggccctgatgcgccaccagcgcatcgaccccaaaggcctggcccaactgtttgccgcgatggagggccgggccgtgtctgtcgagaaaaacgcccccgaaagcacacctgaaaacgcccccaaaaacgcgcgcagccaagggctggattggctctccagccaccccggcacgcaagggcgcatcggcatgttcgcctcggggcaagccatgcagtgcgatatggcaacggggcggttgcgctaatgctgcgtatgagcggcggcgatgtgcatgggccatgccgggcggcagcggtgtgcgctggcgcggcgctttgcgtgatcttgaccggatgcactgcgcagccttcagcccctcaagcccctggggcacagcaagccgtggcggcggtgcaaggctatttgcgcagcaaggggcgcgacaccgcctggcccgccctccagtgcgaagcgctgcaagggcccgaggtgcgggcgctgggcgggcactaccttgtgctgtgcgacttcgatgtgcagcagcgccagtggggcaaccacaccggctatttgctgggcagccaactggagttgctggaggtgattccgggtaaatgaatgttccaaatcaatggaaaaatcacttgaacatggaattgccgaaatgaggcgatttattttctttttgatttagaaaataaggttgcaaaaagggcttagcgtgtgggtgcggccgttttgggctggtaatcacaccaagcgctgacgcggcactcccagcaacgcggcttgcgtgcctggcacacatagcggcccagcaggatcagccaatggtgggcatgcacggcatagtctttgggcacgcgcttgagtaattgctgctctaccgccagcggcgttttgccaggcgccaggcccgtgcggttgctgacgcgaaagatatgcgtatccaccgccatcgtcggctgaccaaaggccacgttcagcaccacattggccgtcttacgccccacgccgggcagggcttccaacgcttcgcgcgtgcgcggaatttcgccgccgtagcgctcgaccagaatctggcaagtcgccagcaggtttttggccttggtgcggtacaggccgatggttttgatgtgttcctccagcccctccaggcccaaatccagcattgcctgcgcagtgccagcgacgggaaacagccgacgggtggccttgttcacccccacatccgtcgcctgcgccgagagcagcacagcagccagaagctggaaatcgctgccgtattccagctccgtttgcggatgcggattggccgcctgcaaggcggcgaagaagagggggatgtcggctttcttcatagacagggggcggatgcgtcgcccgaaaaaggtgaaagccgggcatgcccggctttccattttttgcatctagctacaaaagcaatcagcttgttagcggctaaagcacaaatcccagtgaactgagtgccgacattatacctattttaagaaacaatatattgcataaagttttaaaaagcagaaaatgttttcatgtcaaaacataaacctactattcgttaccgattggcccttgatttgggctctacctcgctgggctgggccattctgcgcctgaatgctgacaaccagcccaccgccatcatcaaggctggtgtgcgcatcttcagcgatggccgaagccccaaggatggttcctcgctggcagtgacccgtcgcaccgcacgcgccatgcgccgtcggcgcgaccgtttgctcaagcgcaaggcgcgcatgagggacaagctgattgcgcatggtttcttcccgaaggatgaggcggcacgcaaggcactggaagcgctcaacccttaccagctgcgcgccgagggtttgcagcgcgcactgacgccgggcgagtttgcccgcgcgctgtttcacatcaatcagcgccgaggtttcaagagtaaccgcaagactgacaaaggcgccaaggacgctggcgcgatgaaggcggccatcagcagcctgcgggcccaactcgcgccctaccccgtggatggcgcaggcaagagacttgacccccattctccggcgctactgcaatgggcttgccgacaaagcgacgacacccgcaacagcatgccgcgaaccgtgggcgagctgctggcgcaacgcttgcagcaaggcttgggtgctcgggcaaaaaacaacggtcaaagcggcgccaaactggcatacgacctctacgttgatcgccagatggtggccgatgagttcgatgcgttatgggctgtgcaagcgggcttcaatcctgccctgtttcatgaacaggcgcgcgccgagttgcgcgacaccctgttgcaccaacgcccattgcgcccggtcaaaccggggcgctgcaccttgcagccggaagaagagcgcgccccgctggcgctgcccagcacgcagcgttttcgcatcctgcaagaagtgaatcacttgcgcttgcttcagcgcggtatgcgcgaagaaccgctgacgctggcgcagcgcgatgccatcgtgaacatgctggaaagcagcagcaaggtcacattcaaggccatgcgcaaaaagctcaagctgggcgacgtggtgcagttcaacctggaagacgccaagcgcagcgagctcaaaggcaatgccaccacggcagcactggccaaaaaagagctgtttggcgatgtctggcacacatggacgttacggcaacaagacgccattgtccgccagctcgtcactcagcaaaataccgagcgtttaatcaagcgacttgttaaatattgccgcgttgacgaagcgtgcgctgcagccattgccaacaccggcctgcccgaaggctacggcagcctgagccgcaaagcactggcacgcatcgtgcctgcattgcgcgccgaggtcatcacctacgacaaggccgtgcaggccgctggctttgcccaccacagcgacttgggctttgactttgagcatggcgatgacgaagtggagcagcttggcgagcgcatcattgcatccacgggggaaatcaaaccggtgcttgccttcaagcaactgccttactacggtcgtgccctgcaacgccatgtggcttttggtagcggcaatcccaaagacccggaagaaaagcgctacggcaagatcgccaaccccacggtacacatcggcctgaatcaggtgcgcaaagtcgccaatgcgctggttcgacgctatggccgaccaaccgaaatcgtggtggaactggcgcgtgacttgaagcaaagccgcgagcaaaagctggaaacgcaaaagcgccaagctgaaaatcaaaagcgcaatgcgcgcatccgcgcggaaatcgcgcccatgctgggcatcagtgaagagcgcgtgaagcacgccgacatccagaaatggattttgtgggaagaactgagctttgacgcggccgaccgccgctgcccctacagcggcgtgcaaatcagcgcggccatgttgctgtcggagcaagtggaaattgagcacatcctgcccttctcgcaaacgctggatgacagcctgaacaacaaaaccgtttccatgcggcaagccaaccgcatcaaaggcaaccgcacaccttggcaagcgcgggaggacttcgaggcacaggggtggacgtacgaatgcatgttgcaacgcgccgaacgcatgcccaaggccaaacgctaccgtttcgcacccgatggttacgaacgctggctcaaagaagaccaggattttctggcccgcgcgctgaacgatacgcgctatctctcgcgcatcgccaaagcctatctgcaactgctgtgcccgcaaggcacgtgggcgatacccgggcaaatgacggctctgctgcgcgccaagttcggcttgaatgatgtgcttggcctgcatggcgaaaaaaaccgcgacgaccaccgccatcatgccgtggacgcttgcgtcattggcgtcaccgatcaagccttgctgcaacgctttgcccaagccagcgccacagcgcgccagcaaggtctggaaaaactcgtggaggacatgcccctgccctgggaaagctaccgcgcgcatgtagagcgcgccgtgcaaaacatctgggtcagccacaagcccgatcatgggcatgagggggaaatgtttgatgcaacgatctacagcgcatccggtcaaagccggatggccgcaaaagacaggaaagttctaccgttccacgcacgaccggaacatgcacacctgaatcgctatcgtgacaaaaacaacgcgccaaaaccctacaaaggcttgctgagcaatagcaactactgtattgaaatcacacgcaatgaaaagcgagactgggcaggaaaagtcatttcaacctttgatgcctacaagattgaaagagagctgctacgcgcctatagaaataaacatggaaaaaatgccagctcacttgctttgcttgatcttctcagcaatcatgagtccttcgatggtcaacctttggtcatgcgtttatgcaagggagactgcatagccattggtcaaggaaaagaaagagaagtgctgcaagttctgaaaatcaacagttccggctcagtcaccttcatcaaacccaacgaaaccaatatcagcgcacgctatctggcaaagcttgcagcgcaaaaagaccagaaggctggcaagttctttgatgaggctgcattgaacgacgtgttttttcaaaaagctttttccgcagggagtttgctggaggccaaagcccgccgcgtcaccatctcgcccaccggtgaactgcgtgaccccggcttcaaaggctgatcaaggggcgcagtatgatcgggcgtattgttgaaattgcagacgaccatcgacatctcttcgttaatcgtggtttcatggtggtgcgtgacaccgagggcgagcgcaaggagctggggcaggtgccgttggacgacatcgccgccgtcatcgccaatgcccacggcatcagctacaccaacaacctcctggtggctctggccgagcgcggcgcgcccttcgtgctgtgcgcggccaatcacaatgccgtgggcatgctgctgacgctggacggccatcacgtacaggccaagcgcatcgaagcgcaaatcgccgccagcttgcccacgcacaagcggctgtgggcggccatcgtcaaatccaaactggagcaacaagccgccgcactggaggccgcaggcgcgcccaccgcgcccttgactgcgttggtgcgcaaggtcaaaagcggcgatccggaaaacgtcgaaggccaaggcgcccggcgctactggggcttgctgttcggcaaggacttccgccgcgatcagaatgccggcggcctcaacgccctgctgaactacggctacaccgtcctgcgctccgccaccgcccgcgccacagtggccgccggcctgcatcccagcattggcctgcaccacagcaacgatggcaatgccatgcgactggtcgatgacctgatggagcccttccgcccggtcatcgacctgaaagtctggcaattgcagcgcgccggtgaagaacaggtcacgcccgaagccaagcgcgccttggcgcataccctttatgacgacatgcaaagccgcgctggcgtcaccccggtgatggtctgcatgcagaaactggccatctcgctggcccaagtgtatctgggcgaacgcgacaagctggaactgccgctgccgggcttgccgctcgctctggcgaaaaacttgaacccagaatgatgcgatgccatgctttcaggataccgactgatgtggatgctggtaatgttcgatttacccgtgctcaccaaagccgagcgcaaagctgcaggtaattttcgcaaggcgttattggatatgggctttgagatgagccaactcagcgtctatctgcgcttttgcagcagccaaacccagcttgatacctacacccgccgggtagaggccatcttgccggtcggtggtaaggtcagcgtattacagttcactgacaagcaatacgaacgcatcttgacatttcagggaagaaccaagcagccaccgttgaaaacgcctgagcagttcacacttttctagccagagtgatgttttttctcttctcgaaaagcagaaaaccccttgtaaaaacaatgggttactgcatagggattttagatcactgggatttgtgctctaaccggaacaacggcaggcgcagcttgccgtcctccccaattttagatcactgggatttgtgctctaaccggaacactggtacaaaagcgccgaattgcacacggattttagatcactgggatttgtgctctaatcggaaccatcgacgagtgccacaatgacatgcctaaattttagatcactgggatttgtgctctaaccggaacagcggcaacagcgcggcgcttggcacgttcattttagatcactgggatttgtgctctaaccggaacggccctgctcagggccgccgggtatgcccgattttagatcactgggatttgtgctctagagcgtgttatgaactttgagccaaccgaatcaacggcatggcattgggcagcatgagaatggcaaagaccacgaagtgcaatccccccagtacgtctggcaatcgctcgtaatcacgagacaa

SEQ ID NO: 1865 - DNA, 15064 bp, synthetic construct
  misc_feature 1..15064: note = Synthetic
  source 1..15064: mol_type = other DNA
tcttgatgttgggtctgtctgccgcattggccaatgaggggcctaagctggaccgtgcgcccattgatccttctgacaatgtttcattgcagcgcggcgctcagcattttgccaactactgtttaacgtgtcacggcgcgcagtacatgcgctacaacttgcttaccaaaattggattgagcgaggccgagatcaagagcaatcttattttaaccggcgccaaaattggcgacaccatgacggtggtgttaaaccccaaggatgccaagctgtggtttggtgtaccgcctcctgatttgtcggtggaggcccgcgtgcgcggcgctgattggctatacacttatttgcgcagtttttaccgtgatgatgagcgcgcatcgggctggaataaccgcatctaccccggcgtggccatgcctcatgtgttgtacgatttgcaaggcgagcagcaatgggtggcggaacctgccaaaacgggcgaacatgcgagcggacaactggtattatccaaacccggcaagctttcgccgcaagaatacgatcggtttgcggccgatttggtcaattatttggtattcatagcagagcctgtgagagaaacacggattcacattggtttttatgtgatgatttttttaggaatcgcttttgtcattacccgtgccttgaaacacgagtattggaaagacgttcattaacccctgtcaggccaataacacagcgagtaaaacaacatgatgaccttatattcagggacaacctgcccatttagccagcgttgccgcatcgtgctctatgaaaagggcatggatttccagatcattgatatcgatttattcagcaaaccggaagacattggggtcatgaacccctacaaccaggtgcctattctggtggagcgggacctgattctgtatgaatccaacatcattaatgagtacattgatgagcgctttcctcatccgcagctgatgcccgccgaccccgtcatgcgcgcccgcgctcggttgttcttgttccgcttcgaacgtgagctgttttcgcaagtggcggtgctggaaggcggtgtggccaaggtagccgaaaaggcccgtgggttgattcgtgaaaacttggtgcaaattgcccctgtattcgtcaaacagaagtttatgttgggcgaggagttttcgatgctggatgtggccattgcgcccttgctgtggcgtttggaccattaccaaattaacctgccgcgtaccgcagcgcccctgttaaaatacgctgagcggctgttctctcggcaggccttcattgactccatgacgccttcagagaaggccatgcgcaagtaagtgagtacttcctctaccaagccttatttgggacgtgccttatgggaatggtgtagcgataatggcctaacacccatgattcaagtgaaggttggggcggatacgcgggtgcccatgccctttgtacaagatgggcagattgctctgaatattagcagcagcgctacccgtaacctcaccatgagcaacgagggcattcagtttagcgcgcgatttagtggggtttctcacgaaattagggtgccctggtcggcggtgatgggtgtttttgcccgagaaaccagcgtgggcatggggtttgagctggaaacagtcaaccctgaagcaggggctgcggagaactctgccccaatgatcgattcattggaccctcaggcagaagtcgtggcagaaaaaccggccaaaaagccgacgttaacggttattaagtagattttcgacgaagttagcaacatattgccggcatagctcagttggtagagcagctgatttgtaatcagaaggtcccgagttcgattcttggtgccggcaccaaacaccatcttcacagcatctcataaagcctcaaaaaccctgtaaaatcaagcaattaagacataatacagcgacatactgtatcttctcatgccttgacataccgtagttttatacggtaacttgtgcggtaactgctacttacccagaggagctaccgtaaaatggcaactaaagagtttactgatacaaccgcccgcaatgccaggcctgacgcaaagccctacaagctcaatgtcgagaaggggctgtacctgctggtggcacccactggcggcaagtggtggcgttttgactatgcccttaacggcaagcggaaaaccctaagcatgggggtgtatcccgaagtggggctggcggcagcccggaaacggcgcaatcaggcccgtgagatggttgctgatggcatagaccccggcatacacagaaagactatcaaggacggcaaggccacggctgcggccaatacattcgaggtggtagcccgtcagtggtatcaggaaaaggcacctgaatgggctgagagcagtcgggggcgcattattcggcggctggagcgggatatttttccgtggatagggggcaaccccattaccgggatcaaaaccccgcttatgctggaagtgctcaagcgtatcagtgaccgagggattattgagacggctcataaggctcgccagtcatgccgccagatttttgtctatgccattcaaaaagggctggcttccgcgaacccggtcgatgctactgagggcgcactgccatcggtaaaaaacaagaactttgcagccattaccgatcctgtaaaggtgggggagtttctgcgggccattgacgcattcactggaaccctgaccgtccaatgtgccctgcggctgtccccgctggtgtttgttcgccctggtgagttgaggcaagcccaatgggctgatattgatcttgaccgcgctatatgggcataccatgtcagcaaaacggatgcggcccacattgtccccctgagccatcaggcggttgtgattctcaaggaaatctacccccttaccgggcatggtcagtttgtgtttcccggcgcacgcgctcacaccagacccatgagcgatgcagccatcaatgctgccctgcggcgcatggggtacgacactcaaaatgaaatcaccggacatgggtttcgggcaatggccaggactatcttgcatgagcggttgaaattcgaccctgtcatcatcgagcatcaattggcgcataaggtgcctgatagcttgggaaccgcgtacaaccgcacaaaattcattgatgaccgcgtggtgatgatgcaagtctgggcagactatctggacgaactcaaggccggtgccaaggtgatccccctccgagatgcccgttaatacaggcgcttgatgataagacgtaaaaagttatataatgacatcacgttttgttggttgtgttttgacctagcggaatgcttgtaagttgaagtgggcgcattcccttctttttgaagggcgacaatcgggaaaggccgataccccaaaccggggcgtgtgacgtccagcgaacggtagcccagcgtgttttttgcgctggattatctatttgcttttggaggctcacatgcccgcacgcaccaattttgatgaactgcccaatgacggcttcgtccgtcaagctcaaataatccccagtccactgccattttccggtgccactttatggcgtcgcgtacgtgatggctcctttccagccccggttaaattaggaccccgcacaaccgcgtggcgcgtgaaggacatacgcgcttggatggctgctcaatctgccaatgtgttgggttaatcatggctacaaaatcaaactcccaatcaggccaaataaattttgactatcacaaggaccgtaaacgacgtgacaagattgagctgaggcacctgctacagctccctattagccatcctaagtggctacaggcccggctttgctcagaatgcggtgttgatttttatgacgtagggcacagggcgtgcactatagtgcggtccgatgctacttatgggggtgaggggaccgtagtggttgaatttgaaggaagcccacctagattccccatcattctctgcaacgactgggtctatgtctatggcaaagcgatcaaggaaagctaccacttcactgcccgaatcctagtgatggaattccttcacgctcaccccgcaaacccggacagatctcctgtgtggataggaacgaggcaaaatgattgggtggcattatgtccataactaatactatgccgaaggtttactttaaaaactccgatgacatcccaccgctgatgagatccctgaaccagtggatcatgtggcgtactggcgaggcaaaaccggacggaaagttttcaaagctgccagtcaatgcagggacgggtatgaattgcaacgcccacgatcctaataattggctttcatttgatgcggcttgcactgcgcttgaatctgaccaattctccggcataggttttgtgcttgatggtaatccggttaccacaactgatgatggcgatcctctgtacctgatcgggctggacattgatgaaaagtcaggcatgttggacgtagagcagttccccattaaacaaacatggctccgccttggaaaaccctacgcagaagcttcaccaagcgggaaaggagttcgcatgtttgccttatccaaggaacccttaaagaaccataacaaaaacgggttggagatttataccgacaaaagatacctgacggtgaccggcaacaccttgggcggtaccttgaaggattgcaccgaggtactgaaggaggtgcatgccgaatggtttggatcagaagaaccagagccatcaaatcggtcaaccatatttcaggatttagtgcagggagcgccaccgcccgaaactcctgaacaaattgctcgtgtaaaaagcatgctggcgaccataggtgctgactgtgattatgaagattggcggaatattgtctgggccgttgctgcaaccggttgggcttgtgcagaagatattgcacatgactggagtatgacctgccccgagaagttcgataaaggcggcttccaaaccttgtggcgcagtttcaagcctgatggcggcattagttttggcacgttggtacacatggccaaggaggcgggctggaagccaccagaggcgccacaggaagaaaggcgcttcaaactgcttaagtcgtcgcatctagcactgcttcctccattgcagtgggtgatcaaaggcgtcctgccagcgcaaggcattgcagccatttatggtccatctggatcgggtaaaagttttcttgtattggatatgctggcggcagtggcgcggggtgcagattggtttggtcggcgggtgatagaggctccagtgatctatggtgcgcttgaaggcacagcaggtatcaagcagcgtgtccaggcatgggaacagaaaaacggccaaactttaccggataactttcggatcatgctgaacccactggcgttgggtagtgaaaacgatatttatgcactggcagatgaaattattttacaaggtatgggacacggcattgtggtaattgacaccctgaatcaggcagcgccggaagcgaacgaaaacgccagtgaagatatggggccactgataagaaacgccaagctgttgcaggcgttaatcaacgggttggtggttctggtacaccacactggcaaggacgctactcgtgggctgcgtgggcactcaagcctgctggcagcgcttgatgcagccattgaaatcagcagggataaggatgttcggcagtggcaagtggcaaagtccaaggacgggctggacggcgcggcatgcgggttcaagcttgagcctgtttcccttggcttggattcagatggtgatgagattacatcctgtgtcgttgcgcgatcattagtaaccattgccaacactaaaagcgaaccccaagggaagaaccaaaaagccgccctaaggataattcatggattaataaaacaatccactgagcgtggccaagctacagcatcggctgatacgcagtgcataagtgagatgcatgctgtttcgactgtagctggggtgctgctgcttgaggatcccaaacggaagaccgaacgagccaaagaagcgattgccgcgctggtttgctcagggcacttaaattcgcttgaggggtggatatggtcacccacttaaacgctccccgaaatgcaagggttcccgaagttcccgctttatatagcgggaacgggaattcgggaaaggaaagccccctgaaaattcccgaaacaggattttcgggaaaacgggaaccacccttcatgaggtcagcgaatattaatcgtcaaaccgctgcaggatggggtaaatccagtttgcccccttataccaaccactttataggagctgaaaatgcttgaatgggatcaaaaagataacggtaattatttatgccatggtgatcacggagtggcgaccgttttcaggaaagaatctggtggctggtcaggtgttcatgatggctatttcctgaaagcaacctgtgatgacgctgaaaaggccatgaaccttatggagcgatatttacttgaaggggaaacggaccttgtacggcgtccagttaccggatggcagacatccaaagcaggtggttattaccggaggaccatgaatggaacagtatcagtaaaaaaagctaaaaccggcaaatggtacttggtaatacctgatattggtatgcttaaagatcgttggtttgatagcgctgaatccgccatgcaagatggtgatcaacggttgtcactgtagccagttccatcaaccaaccttccaaatatagggtaccaccatgccactgccaaacatcacgcaacgttgccgcgccaaggcaaaatcaacccaatctcagtgccataaccctgccgcctttggcatgcccacctgccgcctacatggtgccagacgcccccatactgtcctaaagggcgaaaaccaccccaactaccggcatggcaacgaaacccaggaaaggcggcaggaaaggaagatcaagttggcagagttgcgcaggctggatgagttgatggaaaagcttggtatgatcgggtgatttctggatgcgggtcttatggtgactcgggggtgttggcctcgataacaatggccctttcaaggagcgattggcaatattgccatccaaaatgggctgggcaagatgaccaataacctgctctttggcctatagcgagttctgcaaatgtacgcgccattttctcttgaattaattgccctgtatttgtagcacaggtttctaatgatgtggccccaataatttgacatctccggctcgctgatactatctgcatagccaccatagatgcttcagccccaacagacgatgcacgctccgcttgtgtaggctctcttgcttggcacccactcaacagaatcaaaaaaaaaccagaaacaccaaataatgtggcctattgaaattccatggtaatttttcctggatccaatctacccacgttttatagtggtgtacactgctcgacaaattattatttacaatcactttaactagtcgctcctgaaataccctttgaacccgcataaatattagtattcaaaggatgatggatttgccagaattggggcaatctcctaatttctgctgaggatgaaatttatctttgtgcgaaaaacattgccccaaaagaacctgatgtgacctcaagtataagttgagtagttccagtcgtagttggataagcaaccgcaatgcccgaggctgttacccccggattcgcgcatggacttccaccaaccgtaatcgtgcctgtataggcgtttacagccccctgtggagtaatcattccggtgaaagtacacccgcttgacgtgattccgctcacagctcccgttgatgagttaacggtaacagtgcttgtaactgtgcccccggataataatgttccattccatgttccagaaatagtggatagcgaggcgggcgtgttgtagttataacctgccaaaggtacaagattaaaggtggtggtgacacctgttgaataagcgatgcttcccacaatagatgagccagttgctacagttgcggacacactaccagttgctgacagccctgtcacaccatatgcgttgatactcgctgtgagtgaattgccatttatcgttccagatccggtgtcaaagccatacacaagcaatccatttccacctgcgggtgtaccaaaaaccgtagcaaactggttattgggcaagacgattaagtccgctgcgtaacccgtggacgatgttccatgccaaacgcccgcggctgtggcgtttgtaactggagtagatccacccccacccccgccaccacatgcagccagtgccaaagcaagaacggaacacactaaccctttgtaatttttcattgtcttcatccccttgatgtttttattttttccagaaccctgcttcaacggctcactgtagctgataaaccgtggccatacaaccgtggccagttagccgtggccataaggacatacaaggcgaaaactccacatttagggaggatgccttatgtcagatcagggatttattcagttaaaggccgtactaagtgccaacatcaaggcgctacggaaagccaagggtattgcccaggagcgtttagggctagattcaggggtggaccggaccctggttagtaagattgagagggaactggctaacccgtcactggagatactgcacaagctggcaacctgtttggatacctctgtacctgccttgcttacagcacataaagtaaagaaagtcagcgctaaatagggcctacctaaaacttgtgcagtacagcaaaggggccgcatatagcggcccctcattttgtgcatctttctgcttgttagcggacagagcgcatatcctgatgtattagcgccattagtctatactttccacaacaaaataacaacaatggaggcaacatgctgccgaagatgcgttaccgcttagctttggacatcggatctacctccattggttggtgccttattagattaaacgctgatgacgctccagtcgccgtcattcgtatgggtacacgcattttctcggatggacggaatccaaaggacggaacttcacttgctgtaactcgcaggaacgcccgccaaatgcgtcgtcgccgtgaccggctgctcaaacgtaaagaacggatggttaatgcgctgacacgattgaatttctttccgaaaaacatagcccaacggcaagaacttgcaaacctcgacccataccccctccgtaagaagggtctttaccaccccctatccggccctgaatttgcccgtgcattgtttcatattacccagcggcggggcttcctcagcaaccgcaagacggacaagaaggacaatgaaagtggtgcactcaaaaaagccattagggacttgcgtgagagactgaatcaggagggctgccaaacgctgggggaatggcttgccaatcggcatgaggcacgtttgagtgtccgtgcaagacttcgtggaaaaacccaaaaggagaaggcgtacgacttctatgccgaccgctctatggtcgagcacgagtttgatgccctgtgggctaagcaaagtgaattcaacccctcgcttttcaataccgcagcacgtgacgaactgaagggtattttattatttcagcgagacctgagacctgtccgcccgggtcgctgcactttgctacctgatgaggaacgtgcacctctggcattacccagcacccagcgcttccgtatttatcaggaactcaataatctgcggattttaacccatgatctccgcgaagtcccgcttacactggaacagcgtgacaagcttgcgcaattgctggaacgccaaggccaagtgagtttcacggcaatgatcaaggcactctccctcccgggaactacaaaattcaaccttgaggacatcaagcgcgacaagcttaaggggaacgtgacaggcgccatactggcaaaagatcagcacttcggagatcactggcacaattttaatttgacccttcaggatgacatcgtttccaaactgcttaatgagccagacgaatcagccttaatcaggtggctacaggagcaaacagggatcgatgaagctgccgctgaacgaatatccattgtcagcctgcctgaaggctatggcaaccttagccaagccgcacttgcacgcatacttcctgaactcatgaaagacgttgtggtttattcagaagcggtaagtcgggccgggtttgacagccacagtgcgctttcatatgcacagcaaactggggaggtcatggactccctgccctattatggcaatccgcttcgccgccatgttgcttttgccaaggacaacccggtcaatgatgaagaacgttatggaaaaattgctaatccaacggttcacattggattaaacgaactgcgcaaggttgttaatgccctcatcaaacgctatggccaccccagtgaagtgattgttgaagttgcacgtgatctcaagttgggcagagaaagaaaacgtgaaatcgaaaaggagcaaaaaacgaggcaggacctcaataaaaaacatatcgctgaagcctgtgtagtacttggtcttgatccaaccaatctggatcgttccaaacggcgtgaaatctcacagaaaatgcagctttgggtcgagcttaacaccaaaaatatagctgaccgacagtgcacctacaccggggagcagatcagcattgagcgcctcctttcaagcgaggttgaaatcgaccatatccttccgtactccatgacccttgacgatagtatgaataacaagaccgtggccatgcggcgtgcaaaccgcgacaagggtaaccagactccatatcaggtatttagtgagaggcttttgcccggatacgactacgaggccatccttcaacgtgccgcgctcatgccccgtgaaaaggccaagcgttttgcccctgatggataccagcgctggctgaaggaggataaggattttctcgccagagccttgaatgacacggcctacctttctcgcattgccaaggaatatctatcgctgatctgcccacccaacagggttcgagcaatccctggccggatgactgcgttattacgaggaaaattcggactgaaccacttattgtctggttctgatttgaaaaaccgtaacgatcatcgccatcatgcaatagacgcagccgtgatagccgttactgaccaagggttattgcaaaaatttgcaaaggccagtgccagcgcaagggaaagacaattggatcgactggtggaggatatgcccctaccttggcccacctaccatgagcatgttgcccgcgcactagaccatatcatcatcagccataaaccagatcacggttatcagggcggcatgatggaggatacagcctggggactgcgtgatgatggcgttgttgtacggcacgtacgcccagaaggtgggggccatcgtgaacaagaggttaagaacaagaatgttgtaaccatcaacaacacccgcaaccctgaacgtcatggccttgatgaaaatggccagccaaggccttacaaaggttatgtagggggcagcaactactgcatcgaaatatggcgcgatgacaaagggaaatggaacggggatgtcatttcaacattccaggcctatcaagtgatcaggcaatttggtgaagcagaagggctgaagaagctgagaaatccaaatttaagccaatccataatgcctttagtgatgcgactcatgattgacgatatggtgaagcttgatattggatcggggttacagacgatgcgcgttgttaaaatttccggcaacggtcagatttgtctatgtaaccacaatgaagccaatgttgacgctcgaaatcgtgacaaggatgattcttttgcttatacaacaaaagtaccgtcgtcccttcagggtgccaagtgccgtcacgttaccgtttctgaagttggtgaagttcgagattcgggattcaaaggctaaaaggtatgattggccgcattgtcgaagtggcagacgatagacgacatctatctgcgtcacgtggtttcatggttattcaggacacagacggcgagcgaaaagaacttgggcgagtgccgcttgatgacattgccgccgttatcggcaattcacatggtttgagctatacaaataacctgctggtagcattagcagaacggggcgcaccattcgtactgtgtgcagccaatcacaacccaataggcatgctgtggcctgtagatggcaacttccaacaagccaagcgctttgacgcacaaatcgctgcaacccgcccaactcataagcgtttgtgggccgaggtagtacgctgcaaactgcaacaacaggctgctgcgttggaagcgaccggtgcacctactgtaccccttgcagtcctcgccaacaaggtcagatcaggtgatccggataatctggaagcacaaggtgcccggcgttattgggggctattgtttggtaatgatttcaggcgagaccagaatggtgaaggcctcaattcactgctcaactatggatataccgtcctgcgtgccgccagcgcacgtgcaatcattgccgctggactacatcccacccttggcctgcaccatactaatgagggaaacccgatgcggttggtggatgatctgatggagccgtttcgccccattattgatttacgtgtttggtatctacagcggaccggtgatacgaacattacacccgctacaaaacgctctctggttcatgttctttttaatgatatgcaaactaacactggttgcactcctgtgatggtgtgcatgcaacgcctagcggtatcgcttgcacaggtgtatctgggtgaacgtgacaatctggatttgccgttgccaggattggtgttatctatggcatctgatgcggaaaataatcagtaacctgctatgctcagcgggtatcgcttaatgtgggttaccgtcatgtttgacctgccagtggtagaaaaggttgagcgcaaggccgctatgaattttcgtaatacattattggacatgggttttgaaatggcccaattttctgtttatatgcgcttttgtacaagtcaggcccagattgatacctactgtaagcacgtggaggaagtgttaccagatggtggtaaagtaaatatcctaatatttactgataagcaatacgaacgcataatttcctatcatggtaagaccaaagagcattcaaaaaaatcaccagaccaattcgatttgttttgaaatgatcacttttttctatcccagaaaggacaaaacccacataggaatcagtgggtttcatcacaagtagtttactacatcaggatatgcgcactggccggaacttaaatgggtaatgtcaacccaaaaaggggagtttactacatcaggatatgcgcactggccggaactcgcactctagttctagttccaaacccaacagtttactacatcaggatatgcgcactggccggaactaacgtatgcgtaaattgatgtgttcatagagtttactacatcaggatatgcgcactggccggaactatgaacggatcttgcgatcatgcccctaaagtttactacatcaggatatgcgcactggccggaactcagagtcgaagccatcagcgttgaagccaagtttactacatcaggatatgcgcactggccggaaccgcggttcctgaccccattactggcaaaaaagtttactacatcaggatatgcgcactggccggaactatatataggcactaagccggtcccaatgaagtttactacatcaggatatgcgcactggccggaactgatgggtcatgtccaagtttgtgatgttgagtttactacatcaggatatgcgcactggccggaacgacacggagttgatgtaccggcctgataagagtttactacatcaggatatgcgcactggccggaacattctggcatacggcacagccgtatatgctagtttactacatcaggatatgcgcactggccggaactatcccattataggatactttttaatagacagtttactacatcaggatatgcgcactggccggaactttgaggcatacgatcaggtttctaacataagtttactacatcaggatatgcgcactggccggaactcagggcttgcgccagagcgttcgattgtagtttactacatcaggatatgcgcactagccccaaggattaaaaataattaaatacaagataatagagtaagaaattacccaacctctataaataggacttgtaattattttttccatcaaactcatttctagaccattgtctttaagaaatttccttgtattccaatcggtaaaatcaatgccatggttatctttgtaataggcttgaattctatctatcctaaattgtattctgtgctgaaaaaagaaatggaagaatccacgacttaagaaagccgtattattatcgttccaatctttcggatcttttttactgaattcaagaagctctagtaaattgcttccccctttgactacatattcagcctcttcttttgttcttccatctgatggaataacgtcaacaaaaatattgaagataaacatgaatgctttatctagccagtttaaaaaaatagctaaaagtatttctataaatagcacagcaagcaagctaaccaaaatttgtagaattcggttattggaaacttgtaaccccaattcgtaatataaaaacggcaaaccaattatggttgcccatctcaatatgaataagggaattccaaaaaggaggatgtacagtttatttgctctgtaatctaacattccaaacataaataatcccactcaatagtaacgtaagtttttttctctttataatcaatcacttacatactcctttgggttaatgtgtaacttttgtgtaactgaacgtgtactaaagcagtttacgcaacttaagtaaaactcaataataacaaatggttaagtaagctactgttacacgatgtgctgaatcgcccctaatttgctagacactttcaagcctcgaaaagtactgcttctc

SEQ ID NO: 1866 - DNA, 14851 bp, synthetic construct
  misc_feature 1..14851: note = Synthetic
  source 1..14851: mol_type = other DNA
ggcatgacaaagcgtggcggatacggctaaagcaccttgtccagggccgcagccaactgcgctaccgtgcggtccacgttgtgccatttgtcaagaccaaacaggccaatgcggaaggtcatgaagtcagccggttcgtcgcattgcagcggcacgccggccgcagtctgcagacccacggcgagaaacttgcggctggcctgaatctcggggtcttccgtgtagctcaccacgacgcccggcgccttgaagccctcggcggccacactcgggataccacggctctcgaacaaggcgcgcaccttggtgccgagttcgatctgctcggcgcacaccttctcaaaaccataggcctgtgtttccttcatcaccgcgcacagcttggtgagggcatcggtcggcatggtggcgtggtaggcatgggcgccgccttcgtaggcctccatgatctgcagccacttcttcaaatcgcaggcatagctgctgctggtcgtagcgtcgatggcggcgcgcgcgcgttcgctcatcatcaccatggcgcagcagggcgaactgctccaacctttttgcggcgcgctgatcaggatgtcaacaccggtatcaaccatgttcacccagaccgcgcccgatgcgatgcagtccaacacaaacagaccgcccacttcgtgcacggccgcagcgacggcgcgcaggtagtcgtcgggaaggatcatgccgcaagcggtctccacatgcggcgcaaaaacgacgtcaggcttcttggcgcgaatggtggccaccacctcttcgattggcgccggcacccagggtgcttgtttgccactgccgacacgacgtgccttgagcaccgttgattcggcagcgatgcggcccatgtcgaggatctgggtccagcggaaactgaaccagccgttgcggatgatgagaaccttcttgtcggcggcgaactggcgcgccacggcttccataccgaaggtgccgctgcccggcaccagcgcgaccgacttggcgttgtaaaccgtcttgagcatcgccgaaatatccttcatcacaccctgaaaactcttggacatgtggttgagggcgcggtcggtataaacgaccgagaattcgagcagaccgtcgggatcgacgttggaaagaaggccgggcatggaagctcctgttcaggttgaaatgggcagggccgacagggccgcgcctgagagtggcgtcagcatagcacgcgccccgcacgcatctgaggccctgctcaatagcccagcgcgagcccggtattgcggcgcggatcgttggcgccgtagaagcgattgttggccaccggcttgccgccaagcgacggcgcgccaaccaggatcgccgccagatgactgcccggctgcggcgcacccagtttgtgccccatgtcgaccagcatcttgcgcgaatcagggctcaggccaaaggtatcgacgttggtcagatccggcaaccattgctgatgaaagcgcggcgcatcaatcgcttcctgcacgttcatgccgtagtcgatcacgttcagaatcgtgtgcgtcacggccgtgataatgcggctgccgcccggcgttcccaccaccatgaccggcttgccgttctggctgacgatggtcgggctcatggaactcagcggccgcttgcccggggcgatggcattggcttcgccctgcaccaggccgtagatattgggcacgccgaccttgacggtgaagtcgtccatctcgttgttgagcaggacgccagtgccggcagcagtcactttggcgccgaaccagtcgttgagcgtgtaggtcacggccacggcattgccatccttgtcgacaatcgaatagtgcgtggtgttcatcccttcatgcggctcgacaccgggcttgatgtctttcgacacgccagccttggccgggtcgatggcggcgcggatcttggctgcgtagcccttgtcaagcaggcgatcgagcgggttcttgacaaagtcggggtcacccaggtagctgttgcggtccacataggcgtggcgcatcgcttcgatcaggtagtgcaccgactgcgccgagcggaagcccaggtccttgagcggatagccttcgacgatattgagaacctcgcagatcacgacaccgcccgaactcggcggcggcgccgacacgatgtgatagccgcggtaatcgcactccaccggcgccagctcgcgcacgctgtactggtccagatcagcctgcgtcagcagcccctttccggccacactcgcagccaccagcgccttggcgaccggtcccttgtagaaaccatcagcacccttgctgctgatcagcttgagcgttttcgcgaggtccttctgcaccagcttatgacccgccagcggtaactcacccttgttcagaaagatggcagccgacggcgcgtcagcgcgcagatcagcgcctgcgctctggaagaaatcggcatcgccctgctgcaacacaaagccgcgctcggcgagcttgatcgccggcgccatcagcgcggcgcgcgacagtgtgccgtacttggcgcgcgcggtctcgaagccggccacggaccccggcacggcgacggccagatgacccttggtgctcaggcccttgatgacgttgccgctggcgtcgaggtacatgttggcgcttgcgcccaggggtgctttttcgcggaaatcaagaaaagtcttgcgcccgtcggccagttgcaaggtcatgaagccgccgccacccagattgccagcggccggatacacaacggccagcgcgtagccaacggccacggccgcgtcaatggcattgccaccttttttcagcacgtcaacaccgacctgcgttgccagatgctgggccgtgacgaccatgccgtgctcggccgccaccggcgccaccgaggcggcctggctggtgctgcaacaaaggacggcgacgctgccgagcagcgccaggcgcatgggaaattttggtttcatggtgagtctccttgtaatgggttcaggcagcgacgccgcatggcatcgatctccccgccaatgtagcagggacacgggatccgcgcaggcaaactatgttttgtcatcgctggccagcgccgccgcatgcagggccaccagacgcgagcgctgcagtttgccagtcgccgtcaggggcaaggcgtcgacccaatgcacccagtgcgggcgccggtaggtcggcagcgaagcgattgcatcccgaacgcgctgctgcgccaattcccctcgccccggcgcggcgatggccagcattgacaaggcggtcaaaccttcgggcgtgcgcacgccaacgcaggccagttgcacaacgctgtcacccgcagcattgacaatcgcctgttccacccacagcgtgctgacccagcgcccgctgatcttgagcatgtcatcgatgcgcccggcaaattcaagctggtcattggcgcggcgcaggaacatgtcgcctgggcagtaccagccgtcacgaaagccatcggcctgcgcctgcggccgcttccagtagcccagcgcgacggcgctgctgcgcaaccagatgcgctgtggccgatccggatcggcatcgcttgcgaagcgcagttgcgtctgcggcgtggtctgcaacaggccgctgtcgtcatcgctgtagagcatcaggcacagggtctcggaggtgccgtagccgctgacaatggagaggccagtggccgcgcgccagccctggcgcacggccactggcaggctctcgccggccgagacaaagtgccggatgccgtgcccggccagttgcggtgcaatgccgtcctgcagcatcttgctgtagagcgtgggcacgcaaaacgccagggtcggccggtgcgcgcgcaccatctccagcacgcgctgcgggtccggccagtgccgatccagaatgacggtagcgccagcgcgcaggcccgcaaacaggctgttgcccagcgcgtaggcaaagaacagtttggagctggcatagagacggtctgccgcgctcagttgcagaatgccgcgcgcaaatgaatcgggctggccagccgcgcgctgcgcgtgcacaacccccttggagacacccgtggtgccggaggtgccaatccacagcgcgggcgcttcttcgtcctgcagcgcgtgcgccatttcctgcgcaagactgaactcgcgcgcccagttcgaatcgtcagtaccgctgaccatcagcgtcggcgcctgcgccatgcccgccagcagttgcgccagtgaggtcacgctgtcggcttcgcaccagacatagcggacttcgctctcctgcagaatcggtgcgagttcgctcggtgacaggcgcgggttgacgccaatggccacgccgccggcccagatcacacccaggtaggccagcacccattcaatgctgtcgggcgccgtgatgatgacccggtcgccctgacgcaaaccgagtctgtgccaggcgccggcagcgcgccggacccgctggcgcagcgcgtcatagctcaagcgctcgctgccgcattccagcgccgtagctcccggcgcaccggcctgcaacagcgtctgggccgcgttcatgcgcatcgtcgcgtcttacttgtcgtactggttcagcagcgccttggccgattcaagcagttgcttgccatccgcgcctttggccgccacatccttgagccaatcctgcgccacgccttcggttgctttttcccagcgctgaacttcagcggccgtgagcacattgacgacgttgccgcgatcggtggcggacttgcgtcccggctcaattgtgctgtcccagatgcggccggcccaggctgatgcttcagcgccgctgttggcatcgatcacctttttcaggtcggctggcaggctgttgtacttggcctcgttcatggcgacgacgaagatggtgttggacatcttgcgctggcccggcccggtctcggtatgaaacttggtcacctcatgcaccttgatgccgggcacaacttcccacggcagtgaggcgccatcaaccacacccttggagatggcttcctgcacctgcggcgccggcatctggatcggtgtggcgcccagcgctgtgagcatgcgcgtgccgattcgtgtgggggcgcgtaccttcaggcccttgatgtcttccagcgttttgaccgacttgttggcgaagtggagttcggcgccgtcatgcacatgcgccatcaaaatcttggtgcccttgaattcatccagtgagttcttctgcaagtactcccaaaaagcgcggctgccgccttcggcgctcttgatcatgaagggcaactcaaacacctcggacttggcgaaacgcccggcctggtaggtggggacggtccagacgatgtcggccacaccgtccttggcctggtcgaacagttgcggcggcgtgccgccaagttgcatggccggatagatctggcacttgatgcggttgttggactccttgcccagcttctcgcaccagggaccgagcagcagcttttgcgaggtcgcgttcggcgccaggaaatggtggaccttgagtgtcacgtcctgcgcccagacgccccctgcgccaagggccagcgcagtggcggccaacacgggggtcaatgtcttgcggatctgcatgtcgaatctcctcattgttttggttgggaaacagagtgaacaggaatcaggcgccgaaggttcgcaccaggtacagcgagatcaccggaaagaacaccagcagcgtgatgcggatgaagtccgagatcaggaacggaatcacgcccttgaaggtctccatcaacggcacgtcaacggcgagccggttgatgacgtagacgttcatgccgaccggcgggtgcaccaggccgatctcgaccaccatcaacgccaggatgccaaaccagatcgacttgtcgacctgtgccaggccaaagaaatcgaggcccatgatcatcgggtagaagatcgggatcgtcagcaggatcatggccagcgaatccatgacgcagcccagcaatatgtagatcagcaggatcatggccatcaccagcagcggcgacattccgctgttcttgacccactgtgcgagctcgaccggcatctgcgagatcgccagcgccgtgttcatcatgtcggcgcccagcagcaccagaaagatcatggccgtcgccgtcgcggtacccagcagggtcttgcgaatttcttccatgcccatgttgcccgacagcagcgccaggatgccgcaggaggccgcgccaatcgatgcggcctcggtcggattggcccagccgccgtagatgccgacgatcacgaccacaaaaaccagcagcaccggcagcacttcaatcaagcaacgcaggcgctgcggccagggcacgcgcggcccggccgggccggctttcggatcgagcgtgaccatgatctgcaccaccagcatgtaaccgagcatggcgatgatgcccggcagcacggcggccatgaacagcttgccgatcgactcctgcgtcaggatcgcgtagatcaccaagggcaccgacggcggaatcatgatgcccagcgtgccgcccgcggccagggcgccggtggcgagcgaaccggaatagccatagcgccgcaactcgggcagcgcgacctggcccatggtggcggccgttgccagcgacgagccgcagatcgcgccaaagccggcacaggcgccgatcgccgccatggcaatgccacccctgcggtggccgatgaaggcgctgacaaaccgaaacagcgatcgactcaggcccccgtgcgtggcgaactggcccatcaacagaaacagcggaatcacaatcaggtcgtagttcgacaggcgggcgtaggcgaggttcttgagcgagttcagcagcacagcgctctggccgccgttgaggtagaggtagccgccggcaccggcgatgaacatggcaacgccaatcggaacgcgcagcaccagcatcgtcagcaggaagccgaagatcaggaaaccgagttgcattccggtcatgatttcatctcgcggcgggtccacggatgccagcacatgtaaaaaccggccagtgccagcagcacaaagctcggcaccatcagcgcctgcgccagccacaccggcaactcaagaatggccgaggtctcgcccgcttccttcaggctgatggcgcccgccgccgtgcgccaggccagcagtgtgccgagcaggccgaccaacagcgagccgacggaatcgagcacgagacgccggctgctcgtcatgttggcggtgaagaaatccaccttcacatcgccgtgcatcagatggcaataggcgaagaaagtggcagaggcgaaggcggcgcagagttgcagcagttcgacgtcgcccggcaccggcgcattgaacagcttgcgtccgacgatcgacaccaccgacatcagcaccagggcgatgaacaccagaccgccggcgaaggcaaaccaggttgccagcgtcaacagcaggcgaccgtacggcccccttttttcgtcggcaggcggcggcgcagggactgcactctcctcttgcattcttgtctcctactgtcattatttttggctttccggcaatcgcaaactggtatagcaatgccggaattgactgggtgaccggatagtacatcaacattgcggcagcgaacagcgcatttctgatggttttccctgactctgaacatcgcctgctaagcccaactttacccacacgacatgcagctgacgcttgcaattgctaagctcgccaccaagttgcgcaggtcaggccttcacgctttacaggaaacccccatgaaacagacatcaatcatctcccgcgccagaatctggctgctgctcgccttctgcctgagcttcggctttgccatggcgcaatccgagcccggcatcaaggagatctatgcggccgcgcaggctggcaggcttgaggaggcgcaggtcatggtccagcaggtgctggtcacccatccaaaaagcgcaagcgcgcattttgtgcaaagcgaactgtacgcacgccagggcaatctgccgcgcgcgcgtgaggcactggcgcaggccgaaagcctgaaacccggattgccgtttgccaagccggaagctgtgcaggcgctgcgcgcgcaactcgcagcgcgcagcagcccgagcaacccgcagcgctccgtcgcgcgggaacgtgcaccagctgaaccggtgtcctcgtcctcctgggctctgccgctgttgctggccgttggcgtgatcgcactgggttactttgtatttcgccggcgtgcaccggcaccccttgaacaacaaccggcctatgcagcgcccaatggcatggccggaccacagaccttcggcatgggcggcggcaccgccatgcagccggcttatggtcaacccggctacggtcagcccgcctatggacaagcacccggcaccggtctgggtggccgcatcatgggtggcgtggccaccggccttgcagtgggtgcgggcgttatggcggcccaagcgattggccgcaacctgatgggtcacgacaaccagccgtctggcaacttcgacaatgccggccacaacgttgacccgggctttgaccgcaatgccgacatgggcggagcgaactttggcctcaacgacagcagttcctgggacgacggcggatcggttgatgcgggcggcggcggcggcggcgactgggataattgagttcccactccacaggaagatcccatggttttgcttgaattctcgatggcgccgtccggcaagggcctgagcgtgagccccttcgtcgcgcgcatcctcaacatcatcgaccaaagcggcctgccctaccagctcacgcccatgggcaccatcattgaaggcgaatgggacgaggtgatgggcgtcgtcggcgcctgctatcgcgacctcgccgtcgactgcgaacgcatcggcgtgcacatcaagattgacgcccgcagcggcccaggcgggcgcatcaagagcaaggttgaagcggtgcagcagaagttgggccgcaagctctcgacctgaacgccagcgcgtagttgcgcagcccgtatgcagcgcagcggaatacgggattggctcagtcggggtttaacgcgtggaacacgcgcagcgccgcataggcgtcgttggcggcgtaaatcagttgcgactggctcagattgggcgcggcccagttcgaggttgtggctttctttgacttgataaaacgctgctggaacagcaccgccaccgcgcctttgacgcccatgtccttgcggtagccgcgctggtgaaaaatgctgttgagatccagcacgtcctgcgcctgcaccgcgagcttggctgcgatgcgcttgcggtcatcccccagtccaaaaccggccttggtgaaacctggcagcgcgagcaactgcgccacgatggcgctgcaatccgggtcgtgcagctgaaagacccaggcccgatccaaagtcgataactgcacgatgtgcgggccttcggaaacctgctccttgaagaaggttggtttcgactccgtatcaaaaccccagacctcggtgtcacgcagcgctgcatccgcctcgcgcgcctgcgctgccgtagccaccagcgcaatgcgctccgggcccaggcggtcgaactcgggcagcagtgcgatttcttctttgctgggggtactgtggcggatggacatgggccattattgatcgtttctgaatgagccccctgccatcccggttcgtcatcgcaaggcaccgaaacaaaacgtcactgcgaggagcgcagcgacgcggcagtccatgacttccgattgcatggattgccacgtctttaccagtctaaaaagacgaaagccgcgcactgcgcggctttccatttggtgcatctttcagcttgttagcggacagagctcatatcccaatctctaggcgtttgcactgtacctgctaccttgccaaaaagcaatacacttataaaaaatagatcggtcagacaagggaggaaaaaatcatgctgccaaaagtgccgtaccggctcgcgctcgatattggctccacttctatagggtggtgccttctaaggctggacaccgataccccccccaaacccaaggccatcatgcgcatgggggtacgcatatttccagacggtcgaaacccaaaagatggcacatcgctcgcagttacccgccgcaacgcgagggccatgcgtcgccgccgcgaccgtttgctcaaacgcaagacacggctgctcaacgcgttaatccgcctcggcttctttccgcaagacgatgccacgagacgcaatttggtgtttcttgatccctatgctttgcgaaaaaagggcttgcatgagccactgaccggccccgagtttgccagggcgttgtttcatatcaaccagcgacgcggtttcttgagtaaccgaaagaccgacaagaaagacagcgacagcggcgccctcaaaaaagccatcaaggacttgcgggaaaagctggcgcaggaggactgccagacgctcggcgaatggctcgccaaacgccactcagcgcgtctgagcgtgcgcgctcgactgcgcggcaagacgcaaaaggacaaggcttacgacttctacgcagatcgcgccatgatcgaacatgagttcgatgcgctatggttgaaacagagttgcttgaatcccgttctttttaccgaggcagcgggggtcgaactcaaagacattttgcttcaccagcgcaacctcaagcccgtgcgccctggccgctgcacgctgttacctgacgaggaacgcgcaccacttgccttgcccagcacgcaacggttccgcatctatcaggaactcaacaatttacgtttgctgacgcctgaactcacggaggtatcgctgaaccttgagcaacggaacaagatcgcgactctgttggagcaccagggtgaagtgcgctttacggccatgctcaagactctgaaactgcctggcaccacaagattcaacctagaggacatcaagcgtgaccgactcaagggcaacgccaccacggcaatattggcgaaggattcaaattttggcgaagcatggtttgagttcgaccaagttctgcaagacacaatcgttgacaagttgctcaacgaagccagcgaatcagcacttattgcctggctccatgccaacactggcgtagatgaaggcacggccgagcatatagccaatgctggcttacccgagggttatggcagtcttagtcgcgaagcactggccgtcgtgctgcccgaactcatcaaggatgtggttgtgtattcggaggcggtgacgcgcgccggttttgatagtcacagtgttctctcacattcggcgttgaccggcgaggtgatggacgaactcccctattacggcgacccattgcgccgtcatgtggctttcgccaaagaaaacccgcgcaatgacgaagagcgttttggcaagatcgccaaccccactgtgcacatcggcctcaatgaactacgcaaggtggtcaatgcactcattcggcgctacgggcacccgagtgaagtgattgtggaagtcacgcgtgacctgaaaatgaaccgagaaagaaagttggaaatccaacgcgatcagaagatcagacaagacctgaacgatcaacaggtggctgaagcttgtttcgtcctcggactgacacaggctaacctggaccgcgccaagcgccgcgaactttcgcaaaagatgcaactctggatcgaactcaatgctaagaacgttgccgaccgccaatgcccttacaccggagagcaaatcagtattcaacgcctgctttccaatgaagtggagattgagcacatattgccctattccatgacgctggacgacagcctgaacaacaagaccgtcgccatgcgtcgcgccaatcgcgacaagggaaacttgacaccgtttgacgcctttggcaaagaacctgtacctggctacgactaccaggcgatgctccgacgtgcagcactgatgccaaaggagaaggccaagcgttttgcgccagacggttaccagcgttggctgcgtgaagacaaggactttctggcccgtgccctgaatgacactgcctacctttcacgtattgccaaggaataccttagcctgatctgcccgcacaacaaagtgcgcgccatcccgggccgcatgaccgccctgctgcgcggcaagtttggattgaaccaattgttgtccggcacaagcgagaagaaccgaaacgaccaccgacaccacgcgttggacgccgcagtgatcggcatcaccgatcaaggcttgctacaacgtttttcccaagccagcgcccgagcgcgagcgatggaactggacagactggtggacagcatgcccgacccctggacgacataccgcgagcacgtcaagcgggggctggaacatatcatcgtcagccacaaaccggatcatggttaccagggcgccatgcatgaggaaaccgcttggggtttgcgcgatggggggcaagtaacgcggcgcgtacgaccggaagatggtgggccacggcaacgcgagttcaagaacaagaccgtggtagcgatcaacagcaccaacaacgtcgcccgacatggatcggatgagaacggcaatccgcaagcctacaagggatacgtcggcggcagcaattactgcattgaaatctggcgcgatgagaaaggacgctggaacggcgatgtcatttcaacctatcaggcatatcaagcggtgcgtgaactgggagagtcggaaggtctgagaatgctccgatccagggacattagccaatccggaaaccaactgataacccgattgtcgattgacgacttcgttcgacttgaaattgatggacgggaagagatcatgcgcgttgccgttatcagtggcaatggccaggtcttcatgtgcccccacaacgaagctaatgttgactcccgcaatcgaaatcagagcgacgatttttcgtacatctcaaaaatggccggatcactgcagaaagctaaaggccgccgcgttacggtctccgaaataggggatttgcgcgattctggtttcaacaactaaacaccatgattggccgcatagttgaagtgaccgatgaccggcggcatctgttcatgtcgcgcggcttcatggtagtccaggataccgacggcgaacgcaaggaattgggacaggtcccgctggacgacattgcagccgtcatcgccaatgcacacggactgagctataccaacaatctgctggtggcattggctcaacgcggcgcgccctttgtcctttgcgccgccaatcacaatacggtcggtatgctgctgccggtggatggcaactacagtcaaggcaagcgctttgatgcgcagcttgaagccaccaaaccaactaccaagcggctatgggccgaggtggtgcgcgcgaagttggagcagcaggcggctgcactggaagccattggtagccctaccgcaccactcaccgcgctgattggcaaggtgcgctcaggcgacccggacaacctggaggcacaaggcgcgcgccgctactggactttgctgtttggcgatacgtttcgccgcgaccaggatgctggcggactcaacgccatgcttaactacggctataccgtactgcgcgcagcgaccgcacgtgccgttgtcgcggcaggactgcacccgacgctcggtctgcaccacagcaacgacaacaaccccatgcgcctggttgatgatctgatggagccatttcgcccggtcattgacctgaagatctggcacctttgccgtaatcatgaaacagaaatgacatctgaaagcaaacgtgcgttagtgcgcacgctgtatgacgacatgcagacagatgtgggcgcgacgccggtcatggtttgtttacagaagttggcaacatcactggcgcaggtgtacctgggtgagcgcattaggctggatttgccgttacctggtttgcctttgactttggcggcaacgctgaatgatgaatagccaaacaaaccaatcatgttgtctggatatcggttgatgtgggtcgtcgtgatgtttgatttgccggtcgtcgagaaagccgaacgcaaagccgccacagccttccgcaattcactgctggatatgggatttgaaatggcacagttctccgtctacatgcgcttttgcacgagccagacgcagatcgacacctatggaaaacgagttgaagacgcattgccagaaggcggcaaagtaaatatccttcaattcacagacaaacaatacgaacgcatcatctcgtttcacggcaaagccaaacagcccgcgaataaaacgccagaccagttcgatcttttctagtattcattatgattttcaagttccagaaatcaagaaaccccttgacgaatcaaggggttactgccgacctagtctagtcgattgggatatgagctctgaccggaactctgtatggagtttgtttaatcgtgctgccagtctagtcgattgggatatgagctctgaccggaaccgaaacactgatccgccagcgccgcctggtagtctagtcgattgggatatgagctctgaccggaacactcacagagcccgggcgtccgcgcggtgaagtctagtcgattgggatatgagctctgaccggaactctagcagttgcctcaattgacgctccaggagtctagtcgattgggatatgagctctgaccggaacgcaacaaatgagacaccgccatatcttcacagtctagtcgattgggatatgagctctgaccggaacctaatcgcatcggtcacgctcagggttccgagtctagtcgattgggatatgagctctgaccggaac

SEQ ID NO: 1867 - DNA, 14746 bp, synthetic construct
  misc_feature 1..14746: note = Synthetic
  source 1..14746: mol_type = other DNA
acgcccatgacgtttttatccggggtattttttcctctggaagccatgcccgcgtggttacaggccatcgcagtgtggctgccgttgacggcggcggtagatctggtacgcccgctcatgattgggtcctggccgcagcacccgggaatggatatagtcattttgttgctgaccttattgatgtgcttttatgctgccctggttttgacccggaaacgattgctgatataaaaaaatgacgacgcccctgctgactctgatgacaacactgcccgatcgtgacagtgcgcgccaactggcgcagaagctggtcggcgagcaactggcagcctgtgtcaatattctgcctggcgttgagtcaatttatttttggcaaggaaaaatcgagcagtctgacgaagtattactgctcatcaaggtgccggaagcgggctatgaggcagtgcaacagcggctgaaaaccttgcacccgtatcaggtgccggaattgattgctctgccagtagtcaaagccttacccgaatatgtgcaatgggcgcatgaaatgacgcgcccgccaacgaggtctgatatatgaaatggaattcgaaactggcttgggggctggtgttgttactcagcggtgtcgctgcatgggcgcaaacgacttttctcgacccacaaaaggcattcctgttttcggcacgcatggtcgaggcgcgcaccatagaagcgcggtttgaagccagaccggggtattacctgtaccacgaagcattccgctttagcgccaataatggcgtagtgctcggtatagctgacctaccgcgcggccagatcaagttcgacgaagcctttcagaaaaatatggagacgcatcgaggcgtggtactggtgcgtataccggtcagtagtggccagggccgattcacactgacagctcatatgcaaggctgtgccgatgccgggctgtgctatccacccgaaacgcgtagcgtgacgctgaacctggccaaagccatgccagtctcgtgggaccgcccaggccagccagaacagattctgcgctctgactctttatgggccgtattcggagcgtttatcactatagggctgttactgagttttacgccgtgtgtcctgcccatgttgcccatattgtcgtcactgatattagggcagaccaacccgcatcaggggggtgaaggcgtacaccatgcctatggactcagccgcacccgtggttttttgctggcattgtcttactgcacgggcatgatcctggtttataccgccctggggattgcggccggcctggcgggtgaaggtctgggcgcggccctacaacagccctggctgctcagtctgtttgcactgcttctggtgctgtttgccctggccatgttcggagtctataccctgcagttacccaatagctggcaggaacgcctgacccgttggtcgaaccggcagccgggtggacgattcatgagcgtctttatcatgggcgcactcagcgccttgatgctagggccgtgcatggcggcaccactggcgggtgtgctggtttatctgtcgcaaacccgtgatgttctgacagcggggagtgcactgttcgccatgtcagtcggcatgagcgtgcctttgttattactgggggcttctgccggcagtctgttacccagagccggtgactggatgaatactgtccggtatttaatcggtgtcatgttgctgatgctggccttatggatgctgaactcggtgtggccgacgtggttattgatgttgtcctggggtgttttgctgatggtctgcggagtttatttacgtgtctttgaccggttgaccgagcaggcctcgggctggcaccgactcggtaaaggcctgggcgtggtgctggtgttgctaggcagcctgcaactggtgggcgtggccagcggttcacgtaacctgctgcaacctctggatcaattgtccgtcagcaccagcccggcagcgcgaccaagcgaggacaacaggccgctcaactggaacaaggtcagcagtgtgcaagagctggagcgcattttggcttcagccccagggaaaattgtcatgcttgatttttgggcgcagtggtgcgtgagctgtgttcagatggaacgcctgactttcagtgacccactcgtcatggaaaaaatgcacaatatgctgttactgaaagtggacgtgactcataacactgaacaagacaaagccttgctgcggcgcttttcgctattcggccctccgggcattatttttttcgacgctcaggggcaggaagtgccgggtagcaaagtcatcggtttcatgcaagcggataaatttttgcagcatctaagtcttgtacagggctgatggggcttgaccgacggctgtaacaggcactatgcgcggcaacaggctaggggacaatccactgaagcagcccggccgcgacaccatataaagccaaggggattcctgcaaaggctagtgcagcgcggaatccggattgtccacgatgcggacgaaaaagataagccagcaccagacctatcactacagcaagccaggcaagattgaaccaggtaacagccaccgcgatggcggtacagactactaccgcactcatgctgatgatgaatcgtttggctccaagtccagtttcaacaaaggtgctggccagactattcagtaaggagccgttttcaggtgtctcaggctcagaccgagagaccggcttacgtcgtttctgataccagtcctccaggaaaataactaacccaacaggcagcaggacgacagcgccaacctcgtatttggtgccgcccagaaagccaacgatcaaacccgctggcgtcgaaactaacagcacccaccctgcccagggggtaatacgtacatcgcgcgatttgctggaaaacgggtcttgatcctggctcatgtgatgcgcttcataatatgctgctgctggctctgacagtattcagagcatctgccgtgatgatagcggttactgcattaaccaagtctgctctcacggaaaaacagaagctcgttatgcagcaggccgccagcatatatctatgccttcagaattacccagagcgtttttaagcaaactgatcaagtctgaactggcaccgttttgttccagtaaatcaaccgtatccatacatatatagtagtcagtatcgttcttgtgctcttcttccagttgaccaaccaaatattccaggtcggagtggttgatggtacccagaaacgcgccgctatcttttattgacaataggtacatgaggcaatccttttagttaatgtggtaatgaagttctgtacaagtttgattgaagcgaaattgtgcccagtctggccaacagactgcatgataatgatctggctatcgaacagcaatatttgccttgttgcgatcttgtaatagcagaatttatgatcctgataccgattcactggttcagcctgcgcgttgccatcaagggtatggcaaacatcacgaggaaaaacagattcaggacagcgttttgccaaaaaccggaccataaagaataggtggtatcgggcaggaaccacgccagtacggaaatggcaatgatgcgccagcctatgggctgcgcggcggcgaaaggcccttgaattaccagaaaaattgctacaccccagccgaccatgacgctacccagcaccgcatgtgtcagcctgatataactgacagccgccgggtcaaagctggccaggcgctggctgtcgccaaaagccagtgccgaaaaaccaagttgtgtccaatcaggtgccactaccagtatcagaccaaaaacgacaacactgagcgagacagcccgtaaccagtttatccagaacgcagagggtttttgcatgggcggccagtttaccccgattgactgaaacagttcaaaggccgggtgcagcgccttttttcagcaagtcatacaaggcatcttttagcgccagacgctgcttcttcagtccttccagtgccagatcgcctaaatgttccacaccttcctcggcgcgtataacggccttgtctgcggcttcatactcattgaacaggcgggcaaaatgggtgtcgctggttttaagcgtatgaatcaaggattgatattctgggaattcacgtgccagagaatggttgtcgatgtgcatgatgagcctgtttgaaaattgacaaggcattatccatggcggtttcggtgggtgctttgatgtacatcaagccttcggcagcagcacccacatttcgccgctttgcttcatttttccggcctgttcacctgcttcagtaccaaagccccaaaagaagtcggcgcgtaccgccccgcgaatggcaccgcccgtgtcttgtgccatgaccagttgccgcaggggctgttgcgataacgggtgggtggtcgataaaaagaccggaacgcccagcggaatgaaacgtggatcgacggcgatcgaccgcctgggtgtcaggggcacgcccagcgagcctctgggcccaatgcgcgggtcgggcaaggcttcttcacgaaaaaatacataagacgggttactgtttaacagctcatccactttgtcagggttggcctgcgcccaggccttaatcgactgcatcgaggcttgctcgagcgtcatgacaccacgatcgaccagaacccggcctatggagcgataaatatggccattggtatcggcataagccaggcgtagtacgctgccatcgggcagttgcacccggcccgagccttgtacttgcaggaaaaaagcttcgaccgggtcatcgacccacacaatctctttaccttgcagggcggtttgtcctgccccgctaagtaattcggcgcgggtgtaatacggtatgaccgtggcgcgcccctgggcgttactgctcaggcggccacgtacgcgctggtgtttaagctcggggaaacgctgttccagttgcaagggcagcaggtcgtcaggtaccgcatgcaatgccgtttggaagcgcccagcgcgttgacgctggccgcgtaatagcggttcgtaatagccggtgaccagaccactggtttgaccttccgggctttgcacccgtttgacttcaaaaaactgtacgaagtaggcacgcaggctggcggggtctggcgacttcagctgttgtgcctggtcgcaagcaacgcgccagttgtcgcgcgccttcagcgcctggcagctttgtaaaaaagcgggccagacttcgctcagagggtcgtcattccagccgggcaggtcggtaaactgcgccggcagcaacaccggctgtagggcggtggtggcaggcgtttcgggtttgggtgccgtgctgcaacctactacaatgctcatggtcaatatcagtattgcgctcgcattgcgttggggcattttgacgaaagacatcatgtggattttcctgttagaagctgctatcgcagtatcgctattaatttttattgtctggtggaccatgaagccaccaaaaaaaaagcgcccgcccgctgacaaaaaggactgatcgcgccacgcttaatgcagtgtgcgtggtaccgccagcacaaaagctggtattggcgtttcaaactgggtgccgtcttcagcggtacaaaaataggtgccttgcatgacgccggtaggggtggtgagcacggtaccgctggtgtattcaaaggcctgacccggcggtaacagcggttgatgaccgaccacgcccagcccgcgtacttcctgtgtggcctggttttcgtccgtgatgacccagtgccgtgaaatgagctgcgccggtatgtcgccactattgcgtatagtgacggtataggcaaatgcaaaccgttgctgtgccgggtcggactggtcttccaggtattgcggctgcacggatacggtaaattcaggtttcgacataaaatctcgctatggatacgtctgcaatgactgcacaatttcgtattgccccgtctattttatcggctgactttgcccgtttggggcaggaagtcaaggcagtcatcgacgccggtgccgattttattcattttgacgtcatggacaatcattatgttcccaatttgacctttgggccgatgatttgtcaggccatcaagccctacgccaagcgtgctgatggcacttcggtaccgctggacgtgcatttgatggtcgagccggtcgatgccctggcgactgcctttgccgaggccggagccgattacattacctttcacccggaagcatcacgtcatgtcgatcgcagcttgcaattaatcaaaagcctgggctgcaaagccgggctggtattcaacccggcgacgcctttggccgtgctcgatcatgtcatggagcaactcgacatgattttgctgatgtcggtcaaccccggttttggcggtcagagctttattcccgcgacattgaaaaaaattggcctggcacgttcacgcattgatcagcatgtcgccagtggtgggcaagcgattctgctcgaagtcgatggcggcgttaaaaccaataatattcgcgcgattgccgcggctggcgccgatacctttgtcgcgggcagtgctatttttggccagcctgattaccgccaggtcatagacgccatgcgtgctgaactggcgcagagtcagaaagagggatgatgactgaaatagaattcgacgcggtggcggctcagggttacaaccgcattcctttaatgctggaatgcttcgccgatcttgataccccgctatcgttgtatctgaaactggcgcacgccaaagacggcgggcgttacagctttttgctcgagtcggtggtcggtggcgaacgctttggccgctattcgtttgtcgggctaccggcgcgcaccgtgattcgttcccgtggttcacacaccgaagtcattaccgatggcaaggtggtcgagacgcatcaaggtaatccgcttgattttattgcagcctatgaacagcgcttcaaggtggcggtgcgcccaggcttgccgcgtttttgcggcggtctggccgggtattttgcttacgactgtgtgcgttacatagaaccacgcctcgaacgtttcagccagcaacagcacccgcaaggcaagcccgaccctcaaggggtgccagatattgaactgatgctgtgtgaggaactggcgattattgacaacctgtcaggaaaaacctacctgctggtctatgccgacccgaaccagcccgaagcttataccaaagccagacaacgcctgcgtgagctgcattcgtttctcaggcgcacggtcgatattccttacagcaaaccctccatgcagaccgaggtgcggcgcgactttgacaaagaagactataaagccgcagtgctcaaaaccaaagactacattgccgctggcgatgtcatgcaggtggtcatcgggcaggtgttacgcaaaccgttccgtgattcaccgctgaccttgtatcgtgccctgcgctcgctcaacccttcgccctatatgtatttttatcatttcggtgattttcatgtggtcggtgcctcgcccgaaattttggtgcgccaggaaaaaatgagcgatggttcgagcaaagtggtggtgcgcccgctggcaggtacgcgcccgcgtggcgagtcgccggaaaaagatgaacaactggcaaaagagttgctggccgacccgaaagaaattgccgagcacgtcatgttgattgatttggcacgtaacgatattggacgtattgcccagaccggcacggtcaaagtgaccgagcagatggtggtggaaaaatacagccatgtgcagcatatagtgagcaatgtcgagggcgtattgaagcccggtttgtcgaacctggatgtgctcaaggccactttcccggccggtacactcagcggtgcgcccaaagtacgcgccatggaaattattgaagaactggaaccggtcaagcgcggtgtctatggcggtgcctgtggttatttgagttttggcggcgatatggatgtggcgattgccattcgcaccgcgattatcaagaacggtatgctctacgttcaggcttcagccggcatcgtcgccgactctgacccggaaatggaatggcgcgagaccgagcacaaggcacgagccgtattgcgtgccgccgagcaggtacaacaaggtctggacgagcaggtataaggaattagcgcatggtactcatgatagacaactatgacagcttcacctacaacctggtgcactactttgcccagctcggtcaggaagtcaaagtggtacgtaacgatgaaattgcggtcgaggaaattgcgacgctgaaacccgactttatttgcatctcgcccggcccttgttccccggcagaagcgggcatttcggtcgccaccttgcagcactatgccggcaagataccgattctgggcgtatgtctggggcatcaggccataggcgaagcctttggcggcaaggtggtacgcgctcaaaccattatgcacggcaaaacctcgccggtgtttcatgccggcaaaggggtattcgccggcttgccgtcgccgtttaccgccattcgctaccattcgttggccattgaacgcagttccttgcccgactgccttgaaatcacagcctggactgaagatggtgaaatcatgggcgtacgacataagcagttcaaggtcgaaggcgtgcaatttcaccccgagtctattttgagcgagcatggtcacgccctgctgaaaaactttttgttgtcggcctagccggctcaggagcctccatgtccattaccccgcaagaagccctgctgcgttgtattgaacaccgcgaaatttttcatgacgaaatgctgaaactcatgcgcatgatcatgagtggcgaaatgtcgccggtcatgatagccgccttgatcatgggcttgcgcgtcaaaaaagaaacggtcggtgaaattaccgcggcggcgcaggtcatgcgtgaattcgctacccgggttgaagtcaaaaacagcgaacatctggttgatattgtcggtacgggtggcgatgcttcacataccttcaacatttcgactaccgccatgtttgtggcggctgcggctggtgccaaagtcgccaagcacggcgggcgtggggtcagctcaacctcgggcagtgccgacgtactggaacaattgggtgtcaatatcaacctgccgcccgcccgggtagcgcaagccattgagacgctggggctgggcttcatgtttgcgccgaatcatcatgccgccatgaagcacgccgcgccggtgcgcaaggaaatgggcgtgcgtaccttgttcaatattctcggtccactcaccaacccggccggtgcgccgaatcaattgctgggcgtgtttcatcgtgacctggtcggcattctggtgcgcgtgttgcagcgactcggggcgcagcacgtgctggtggtgcatggccagggttcagagtccaccggccttgatgaaatttcattatcgggcgccacctgggtcggcgagctgaaagacggggaaataagcgaatatagcgtggtgccggaagaattcggcttgccacgttgtgagctggggcaattaacggtagcttccagcgctgaatcgaaagcgcgcatactggaagtactgaacaaccagagcagccctagccgcgatattgtgctgctcaatgccggggccgctctgtatgccgccaaccgcgccgattccatcaagcacggcgttgaactcgcgcgccacgccctggccagtggcgcggcacggcaaaagctgcacgatttagtgcaattcagtcaaggcagcgccccagtggtttgaggggggtaaatggcgagagccgcatatagcggctctccatttggtgcatctttcagcttgttagcgtccagagcgcatatctcaatgatttagagcttgcaatgtaaatcactcctgagcaaaaatcaagcgctccaattgccccaattgcaaaaaaaacttttacatcacatttaggtgaccagatgaaaaacaaaatgcaataccgtttggctcttgatctaggcacaacatcactaggttgggcgatgttgcgtgtcaagcccaatgaggatggacaattacagccctgcgcaattatcaaagccggagtgcggattttttctgatggcaggaatcctaaggatggcagttcgctcgcggttacgcgccgtgaggcacgcgccatgcgccgccgccgagaccgcttgctcaagcgcaaggcacgtatgttgcagcagctaacgcactttggcttttttccgactgaccttgcagagcgtaaggctcttgaaacgctcaacccctacgaacttcgtgccaagggactagatgaagccttaagcccctatgagtttggccgggcgctgtttcatattaaccagcgccgtggcttcaaaagcaaccgcaaaaccgataaaaaagaaaatgacagtggtgccctcaaggcagcgattaaatttgtacatagccaaattgatggcaacacacaccgcacggtgggtgaatggctatacaaacggatgttaaatggtgatccagtacgcgcacgctatcgacaaaccaagcaggttaaagaagacggcaaaaccaagattgataaaagctacgacttgtatattgaccgcgccatggtggaagccgaatttgaagcaatttgggctacgcaagcgacacttaatccaacgacatatagtgaacaagccaaggcagcactcaaagatgttttactcttccagcgcaatttacgacccgtaaaacccggtcgctgcacacttattcccaccgaagagcgcgcaccactggctctgcccagcacgcaacgctttcggatttatcaagaagtgaataacttgcgattgttacgtgcaggactgaaagatgaggcactcacactaacacagcgcgatcaactggtggttgcccttgagcaaaacaacaaacggacttttactcaaattaaaaaactgctcggtctagatggacaaacgcaatttaactttgaagaccccaagcgagaagaactaaaaggcaacaccaccagcgcgatcttgagccataccaagcactttggtgaggcgtggttcgggtttgatgaggccacacaagatgctattgtttggcaattactcaacgaagaaaatgaaagcaggctgattgcttggcttatgcaaaaaacaggggtagatgcagaaaaagcggaaacgattgcgaatgtggctttgcctgaaggttatggttcactcagccgccaagcactggcaagaattttgcccgaactgcgcaagacagtcataacttacgacaaagcagtgcaagctgctgggtttgaacaccatagtcgcctgaataactacggcgaagtctccgggcgaacattcgatacaggcatcgaacgcatagaccaaaaaacgggtgaaattcagcgtcttcatgcatttcatgaactcccctactacggcgagtttttacaacgacacgttggctttgctgatcccaaagccacccccgccacaccagaaaaatacttcggcaaaatcgccaaccccactgtccacattggcttgaatcaagtccgcaaggtagttaatgccctcatcaaacgctatgggcaccccagtgaggtgattgtggaagtggcgcgcgacctcaagcaaagcaaaaaacagcgtgatgaagaaaataagcgtcaagcggaaaaccagaaaagaaatgatcgtattcgcaaagatattgcaaacacgctcgggattagcgaagaacgggttcggcatgctgacattcaaaaatggattctctgggaagagctgagttttgacccggccgatcgtaaatgcccttactctggggtacaaatcagtgcgcaaatgctattgagtgaagaaatagaaattgagcatattctgcctttctcgcgtaccttggatgacagtctcaacaacaaaaccgtttccacgcgccaagccaaccgtattaaggaaaataaaaccccatgggaagcgtttggcaaagagaatgcgctaggcgtgatctatgctgacattctgctacgcgctcaaaaaatgcccaaagccaagcgctatcgctttgcagaagatggtctggcccagtgggacaaagaaggtaagggctttctgcctcgcgcactcaacgacacccgctacctgagtcgtgtagcgcgagaatatgtaagcctagtctgcccccaagccacacgagtcatccctgggcaaatgaccgcgcaacttcgcgctaaatttggtttgaatgatgtgctgggtctgaatggtgaaaaaaatcgtaacgaccatcgccatcatgcggtcgatgcctgcgtgattggtgtgaccgatcaaggcatgttgcagcggtttgccagtgccaacgccagtacgcgacaaaaaggtttaacgcgcttggtggaaaccatgccagaaccgtggccaacttatcgccagcatgtagaacgcgcggtgcagcagatttatgtgagccataaacccgaccacagccatgaaggagctatgcacaatgacactgcttattccttacttgccgaaggtttggtgggcgcacataaaactattgaaggcaaacgggaatatgtagaagaaaaattggcagtaatcccctttactagccagaaagctgcggaacggcatggctacttacccaatggtgaactccgcccttacaaaggctacaaaggtgacagcaattactgcattgagattgtgcggaatgcaaaaggaaaatgggagggcgaggtcatttctactttccaagcgtatcaagtggtgcgtactgccaaaacgccaaaggaaggagctgcgctattgcgaaacccacatcgtagtttgagtgggaagccattggtcatgcgattactcattgatgatctcattcgtctcaaattagaaaacacaacccgcataatgcgcatcgccaaagtggtcggaaatggtcaaatttttatggcggaccatcaagaagctaatgtagatgcaagaaaccgagacaaggaagattcatttacttacattagcaaaacagccggttctttgtttaatgcgcaaggtcgtagagtcaccctgtcccccatcggtgaactccacgaccccggctttaagggctagccatgattggccgcattgtggaagtagcccatgaccgccgtcatttatttatgtcacgcggctttatggtggtgcaagatactgaaggcgaccgcaaagaactcggccaagtgccgctggatgatattgtggcggtgattgctaatgcccacggcctgagttacaccaataatttattggttgcattagcagagcgaggcgcaccgtttgtcttatgtgccgccaaccataatgcggtggggatgttgttgtcacttaatggcaatcactatcaagccaaacgtatcgaatcacaaattaacgctaaccaacccacgcacaagcgcttatgggcggcgattgtacgaagtaagctcgagcaacaagctgccgcccttgaggcggtggggaaaccgattgccccactggcggcgctggtagccaaagtcaaaagtggtgaccccgaaaaccttgaagcccaaggcgcaaaacgctattggggcttactgtttggtgattcgtttcggcgtgaccaagaagcgggcggtataaacagtctgttgaactatggctacaccgtactgcgtgctgctaccgcacgcgctgttgtggccgcaggtttgcatcccagtattggactgcaccacagcaatgacagcaatgccatgcggctggtggatgatgtgatggagccttttcgccctgttattgatttaaaagtctggcaactacaagcacaaagcgaagggcatatcactccagagaccaagcgcgcactcgtgcgaaccctctacgacgatatgcaaactagccatggttccacgccagtcatggtgtgtattcaaaagctggcaatatccctggcgcaagtgtatttgggcgaaagagagaaactagagctaccgttgcaaggcttgccgctcatgctcgcgagcagtttacaaaatgaataaacatgctctcaggttatcggcttatgtggatggtggtcatgtttgatttacccgtgattgaaaaagctgagcgcaaagcagccactgattttcgcaatactctgttagatttaggtttcgagatgagtcaattcagtgtgtatatgcgcttctgtaccagccccacgcaagttgaaacctattgtaaacaagtagaagcggccttgcctgaaggggggaaagtcaacatactgcaatttacggacagacagtatgaacgcattatcacttttcatgggcaaaccaagttgcccgccaaaaaatcgcccgatcaattagatttgttttgatcaagcacagtgaattcaagtaccttaaaagcgaataaccccttgaaaaatcaaggggttatcctagtgggattttaaatcattgagatatgcgcactggccggaacaaccgggtcagaatctttccagcgtcttgaattttaaatcattgagatatgcgcactggccggaacgacttgcaagcaccagcatggcagacgttaattttaaatcattgagatatgcgcactggccggaacctatgtttcgggaagaatgtaaatttataagttttaaatgatttagaatagagagctcgcaggaaagaaagaaagtcaatataagatatcttataa

SEQ ID NO: 1868 - DNA, 14739 bp, synthetic construct
  misc_feature 1..14739: note = Synthetic
  source 1..14739: mol_type = other DNA
cggtcttacaaacgaataccacccctgccagatcctcgctgacatctacacctacatcgagcatcgcggcagcatccaaggcaagaccgtggcgtggatcggtgactccaacaatatgtgcaacacttggttgcaagccgcagagatattggacttcaacgtccacgtctccacaccacccggctatgaagtcgaaccggaacgcgctggcttgtacggccacgaacattacgaagaattcaaagaccctatggaagctgctcgtggcgccgatctggtgaccaccgacgtgtggacttcgatgggatgggaagcggagaacgaagagcgcctgaaggactttgccgattggcaggttgatgcagacatgatgggcgttgccgctaaagacgcgctattcatgcactgcctaccagctcatcgcggcgaagaagtatcagcagaagtcatcgacggcgcgcaatccgttgtgtgggatgaggctgaaaataggctgcatgcgcaaaaggccttgatggaatatctactgctcggaaagatcgcttgaaatgaagatatctccacgactcataccgtatttattcccattctttatgtcgctgatcatggcgttcatcatgaccgccttcatcacttggattaacacaggcttagccgatggttacatcggtcgttggatgcattcattcatctacgcttggccgctcgccatggcttgtatcgtgctgttcgccaatcgtattcgcggcttcatcggcaagctcaccactcaataaatctatctcataggaaatcaacatgtctgacatcaaaaaagccgttctcgcctactctggtggactcgatacctctgttatcttgaagtggctgcaagacacttatcaatgcgaagtggtgacttttactgctgacgtgggtcaaggcgaggagttagaacccgctcgcgccaaagcactaaagatgggcatcgcagcagacaacatctacatcgatgacctgcgcgaagagttcgtgcgcgatttcgttttccccatgttccgcgccaacaccgtgtacgaaggcgaatatctgctgggtacgtccatcgcccgcccactcatcgccaaacgcctgatcgagatcgcggccatgacgaattcccaagccatctcacacggcgcaaccggcaagggtaatgaccaagtgcgttttgaactgggcgcgtatgcactcaatccaaacatcaaagtgatcgcaccttggcgtgaatgggatctgttgtcgcgtgaaaaactgatggcctatgccgaaaaacacggcatccccgtcgaaatgaaacacaaacaaggcggctcgccctactccatggacgcgaacctgctgcacatctcctacgaaggtcgccatctggaagatcctgcggccgaagccgaagagagcatgtggcgttggacggtttcgccagagaaggcacctgatgcagccgaatatctcgacctcgaatacgtgaagggcgacatcgttgcgctgaatggtacgaaaatgtctccctctcaagtgttggccaaactgaatgaactcggcggcaaacacggaatcggacgcttggatttggtcgagaaccgctacgttggtatgaagtcacgcggctgctacgagacccctggcggaaccatcatgttgaaggcgcaccgcgccatcgaatccatcacgctggatcgtgaagtcgcccacttgaaggacgacctgatgccacgctacgcatccatgatctacaacggctactggtggagcccagagcgtctcgccatccaaacattgatcgatcacacgcaagccagcgtaaatggttgggttcgcgtcaaactgtataaaggcaatgtcattgtcgtgggccgcgactccaagacggattcgctgttcgactccagcatcgccacgtttgaggatgacaaaggcgcttacgaccagaaagatgcagcgggcttcatcaagctgaatgctttgcgtatgcgtatcgcggcgaatttgaaggggcggaaataatttgtagggtgatggcgaaaaccagcgcaccccagcacgtttaaggtttcaacctgctggagttgctaactcaccgccgcctatgtgatgtaactcacccagcctacggccaagcaaacacggaggaattatgattcacgaacttaatggtgacatcctgtttagccgcgctaaagccattgtgcaaggcgttgcaccgaatgatgactttcatcacggtctcgcgttacaactacgtgaacgcatgccggcgatgtacaaagattttcgccatttttgccagacacagcatcctaaatcaggtggcttatggacgtggatgagtagcgatggacgttacctcgtcaatctcttcacgcaggatggcgcttacgctcatggcagcaaacccggccatgccacattaagccatgtgaatcatgctttgcacgctttgcgtgccttggcacaaaaagaaaaaattagcagcctcgcgttacctcgtctcgcctgcggcatcaacgggttagattgggctgaggtcaaacccctgattgagaaacatctcggcgatttgaacatccccatttatctttacgtgaattatcaaaaaggcgttaaagccaacgaacccgcaaaataattatttagaacaaaggaaattcaacatgtcagacaaaatcgcgaacgtcagcgtcggtaaaaaatccaatgtattcttcgacggcaaatgcgtttcgcattccgtattttttgcagatggctcacgcaaaacagtgggcgtagtgctgcccaacagccaactcactttcaacgtgggcgtacctgaattaatggaaattagcgcgggcacttgccaagtcaaactcgctggcgaaaccagcttcaagacctacgccgcaggcagccacttcaatgtggctgaaaacagcagctttgacattcacacaggcgtagaggcagtggattacgtttgttcctttggataatttccccgtcattcccacgaaggcgggaatccagcgggtttaaccaaaaggcattttattaactggattcccgccttcgcgggaatgacaaaactaataggagtccctatgccctcattcgacatcgtttcagaagtagaaaaaactgaagttaagaatgccatcgagcagacgaacaaagaagtcagcacgcgcttcgatttcaaaggctcagatgcgcgcgtagaacaggccgaacttaaattgacgctgtgggcggataacgaatttcagttggaacaagtgcaagacatcctcaatggcaaactaaccaagcgcggcgtggacatcaagtgcatggaaatcagcgacaaagttgagaaggtcagcggcaataaaattaaacgcggctgcgaagtgaagacaggtatcgaaattgaattagccaaaaaaatcgtcaagcacctcaaagacagcaagttgaaagtgcaagccagcatacaaggcgataccgtgcgcgtcacgggaaaaaaccgcgatgacttgcaagaggctatcgctttcgtgaaaaaaaccatcaccgatttcccgctgcaatatcaaaactttcgcgactaatctgcccatgaaaaaaactatctccgccctagccagcgcacttctccttacactttccaatcacgcacacgccgccgattcgatttcctaccccgccatggtgtgggatgacgtgacctacgaattgagcgcccctgcgcgctgggaaaaaagtgactggcaacaagtgggctgggaaagtttagcggtgctgggaacctttgcagttatcgacaaacctgtacgtgactacatggtgaaacaagatcaaaacagcaaggcttggctgcaagttgaaaagtttggacgtgaatatgcagtgggcacgataagcgtgttctttgtcgccggactgttgggcgatgaaacgtccatgcatgtgacgcaagatgtggtggcggccagccttatttccagcggcatcatcggtgttgccacgaagacggtggtcgggcgtagccgtccgctggctaatcaaggaacaagtcatttcgctccgttcaccgacatgaatagttctttcttctcggggcacgccacacaggcttttaccttggctgcggtgattgccgatagctatgacgcaacatggattgacgtaaccgcttacagcctcgcctcgctggcggccgtcgcacgcacctatcacgacaagcactttgcttccgacatattgacgggcgcgatagttggtaccttggtaggcaaaagtgtggttgcgcataacaaagatttacgcggcaacacactgctcatcacacctgtcgcatcgtcaagcatgttgggcttacaagtcgcaggcaacttctaatgcctagcgttctcctaccgctggcgcaaggtagtgaagacctagaagcgattaccgtcctcaatatcctgcgtcgcgcaggcattgaagtggtgagcgccagcctagatgggcttgccatacgcggcagtcgcggcacagtcatcacgcctgacacctcgctcgatgcggcgcttaagcgcgacttcgatatggtggtgttacctggtgggcagcccggcacacgcaatctcaaagcagataaacgcatcatccaactagtgcaagacatggcggcagcagggcattatgtgtgcgctatttgtgctgcgccatccatcttggcaagcgcgggattgctgaatggcaagcgtgccacttgctttcctgaagcattgaatgactatccaaaagtgttgctgcaaacacaggcagttgttgaagacggcaaaataattacctcacgcggaccgggaacagcgatggattttgctttgaccttggttgagcgattagccggaaaagcccaacgcgacatcgtagaagccgctttagtccgctaattcttcacctttacttcaatgacttaagacgccgtttgcgaaagacttcccaaccccgttttttttggttaggatgcgtgccaatccgttgtacatcaaacacaccctgtaccacccccaactactaaaagagaatttcacatgagcgaacacatccgttatgtcaccgatgcaaccttcaccgcagaggtgttgcaatcacctgttcctgtcctcgttgattactgggctgaatggtgtggtccatgccgcatgattgcccccatcttggatgaagtatccaaagagtacgcaggccgcctacacattgccaaagtgaacgtggacgagaaccaagaaacgccgcaaaaatatggcgtgcgcggcatccccactttaatgctgttcaagaatggcaatatcgaagcgactaaagtcggcgcattgtctaaatcacaattgaccgcgttcatcgacagccacatctaaactttaacgccgcgcgccaaactgcatcgcttcttcctgaagtgcaaaaaatacaagatataaagcagtttggcgcagacattcacgcagcactccctaactaatccgtttcacgtcacctcccctccatcaacctagcgcttacgcgcccatcctgactatgcatctatccgacctcaagacaaaacacatcaccgaattagtggaaatggccaccactaaccaaattgacaacgccaatcgcatgcgcaaacaggatttgatgttcgcactgctcaagagccatgcgaaaaaaggcgagagtatttttggcgaaggtacattggaggtactgcccgatggatttggctttttgcgttcgccggacacgtcatacctagccggtccggacgacatttacgtgagccccagccaagtgcgtcgcttcaatttgcacacaggggattccattgaaggtgaaattcgcacccctaaagagggcgagcgctatgtcgcgctagttaaagtagatcgcgtgaatggagagccgcccgaaaacgccaagaacaaaattttgttcgagaatttaacgcctctgtttcccaccaaacaaatttgcctagagcgcgacattcgtgctgaagaaaacatcaccggtcgcatcatcgacatcgtggcgccgattggtaaaggtcagcgcggcttgctggttgcttcacctaaatctggcaagaccgtgatgctgcaacacatcgcacactccatcgccgccaataatcctgatgccacgctaattgtgttgctcattgatgagcggcctgaagaagtgaccgagatgagtcgcaccgtacgcggcgaagtcgtggcatccaccttcgacgagcctgcaacacgccacgtacaagtcgccgaaatggtgttggaaaaagccaagcgtttagtcgagcataaaaaagatgtgattattttgctcgactccatcacccgcctcgcccgtgcttacaacaccgttattccttcctctggcaaagtgttgaccggtggtgtggatgcgaatgctttgcaacgtccaaaacgcttcttcggcgcagcacgcaacatcgaggaaggcggctcgctcactatcatcgccacggcattggtggataccggcagccgcatggacgatgtgatctacgaagaatttaagggtaccggcaatatggagatccatttggatcgccgtatggccgaaaaacgcatctacccagccatcaacgtcaatcgctccggcacgcgcaaggaagaattgctcatcaagcaagacctgctgcaacgtatctgggtgttgcgtaaactgttgtatccaatggatgaattggaagcgatggagtttttgttggacaaggtaaaagccaccaaaaacaacgccgaattctttgattcgatgagacgttaagccctgaaaaggaaaagtaaaaaaggttttggacgaacggggtggtttatgtataatgcgcgcctttcggaaaaccgcatttagcgaggtcgttatgtacgcagtaatcaaaacaggcggtaagcaacaccgcgtcatcttgggcgaaacactcaaggtcgaatctatcgttggcgaagttggcacatccttggtattggacaaagtgttgatggttggcaatggtgacaaaatttctgttggtcagcccctgttggctggtgcaactgttaaagcgaccatcatcgctaacggtcgtcacgacaaggtaaccatcttcaagatgcgccgtcgtaagcactaccaaaagcatcaaggtcatcgtcaaaactttaccgaaatccgcatcgacggcatctcggcttaattatcaaggagctagaaaatggcatcgaaaaaaggcgggggtagtaccagtaacggccgcgactcgcactcgaaacgattgggtgttaagagttacggcggcgaattgattagcgcaggtagcatcatcgtgcgtcaacgtggtacagaatttcatgcgggcgacaacgtcggcatgggcaaagatcacacactgtttgccaagatgaccggcaaagtggtgttcgcaatcaaaggcgcggctaaacgtagaacggttagcatcgtcgctgcttaagtagttgagcagccaaaactagccctatcgtaaggtagggcttttttattttcaaaataccggcagcatcgtcattcgtgcaaaggtaagaatgacgaaattgaattattgggtttgaaacaaaatgaaattcatcgacgaatcaaaaattgaagtcattgcaggcgacgggggtaacggcgcagcaagttttcgtcgtgaaaaatatattgaaaaaggcggcccggatggcggtgacggcggacgcggcggtagtgtcatcgccatcgctgatagcaacatcaacacgctggtcgactttcgttttatgaaaacgcatcgcgctaaaaatggcgagcgtggtggcagcgcggattgctacggcaaaggcgcagacgatgtctttctgcatatgcctgtgggcacggtcatcaccgacattaacagcggacaagcccttgccgatttaacccacgaaggccagcaagtactcctcgctaaaggcggcacaggcgggctaggcaatctacatttcaaatccagcaccaaccgcacaccacgccaatgcacgccaggcgaagaaggtgaacgccgcgagttgcaactggaacttaaagtgctggcggatgtaggtctgctgggcatgccgaatgcaggcaagtccaccttcattcgcgcggtatctgccgcacgccctaaagtagctgactaccctttcaccaccttgcatcccaaccttggcgtggtgcgcgtatcgcatgagaaaagttttgttatcgccgatattccaggcttgattgaaggcgcggcagaaggcgcaggactggggcatcaattcttgcgtcacttggcgcgcacgcgtttgctgctacacatcgtggacattgcaccgctgcacgaaggggttgatccggtacatgaagcgcacgctctcatcaacgagctaaaaaaatacgacgaagcgttgtacaacaagcctcgctggctcatcttaaacaagcttgatttgctgcaagacagtgatgaaaaagtcgccgctttccttaaagaatttggcggggtcacgcgccacttcagcatctctgccatcagtggcgaaggctgtaaagagctgacctacgccatcatggaacacctgcttaaagtggccgctgaagaaaaagaagcggtgtctgaaagcgcgcaagaaacagaaatcattgtttttgatccacttgcatgaaaaccgttctgacccaatccaaacgcattgtcgttaaagtcggcagcagcctcgtcaccaattcaggtgagggactggatacacgcgcgattggcaattgggcgcagcaaatttctacgctgcgtgcacaaggctgtgaagtggtcttggtctcttctggcgcgatcgctgaaggcatgcaacgtctgggttggaaacaacgccctagcgccgttcacgaactgcaagctgccgctgctgtaggtcagatgggcttggtgcaggtctatgagagctgtttcagccaacacggtctgcgcgccgcacaagtcttgttgacccatgccgacctcgccgaccgcgagcgttatctgaatgcacgctctacccttcgcaccctactcactcttggcgtcatccccatcatcaacgagaacgacaccgtcgtgaccgacgagatcaagttcggcgacaacgacacgctaggcgcgttggttgccaatctgatcgaagcggatgcactcgtcatcctcaccgaccaagtcggcttgttcaccgccgatccgcgcaaagatacgagtgccacactcatcagcgaagcacaagcaggcgatgccaaattggaactgatggcaggcggcgcaggcagcagcatcggacgcggcggcatgatcaccaaggtactcgcagcgaaacgcgctgcgcgtagcggcgcacataccgtcattgcatcaggccatgaacgcgacgtactaccgcgccttctgcaaggcgaatccatcggcaccttactggtcgcccccgccctctcactcgacgcacgcaaacaatggctggccgaccatctgcaagtcaccggcaaagtgacgctggatgcaggtgcggtacgagtgctcaagaatgatgggaagagtttgctgccgattggcgtgacgcaagtcactggtgaattccaacgtggcgcagtggtaggcgtactcgacacagaaggtcgcgacatcgcacgcggcctcatcaactacagtgccgccgaagcccgccgcatcgctggcaaacccagcggcgagatcgaaagtatcctgggatatgtggatgaatcagaactcatccacagagacaacctcgtactgctgtaactcaactcaccacatttccctcacaaaataaaaagagccgcatatagcggctctttcatttggtgcatctttcagcttgttagcgttcagagcgcaaatcccaatctactggtgcggcgcatcctagtgtctaaaaacaatgccgtcaagaaattcatactaaaatccgcccttcaatcaaaagggaaataaaacatgctaccgaatatgcgctaccgcttggcactggacttgggttcgacttctcttggatgggcgatgattcggctcaatgcagctaatcagccgtgtgcggtgattaaggcgggggtacgcattttctcgaatgggcgcaacccaaaagatggctcatcgctagcagtcacacggcgcgaagcacgcgccatgcgccgtcgccgtgatcgcctgctgaaacgcaaagcacgcatgatgcgcacgctcatcgaatacggattttttcctgccgaagaatcgcaacgaaaaatgctggaaaccattaacccttttacgctacgcgctaaagggctgaatcaagccctcactcccgccgaatttgcccgtgcactgtttcacatcaatcagcggcgtggcttcaaaagcaaccgcaagactgacaaaaaagataacgatagcagcgcgctaaaaatcgccattagcaatgtgcgcgcaacgattgctgcagaaggttgccgcaccgtgggcgaatggctaaacaagcgcgacgtggctggtcaaacagtccgcgcccgttaccgccagagcaaaatagtcaaagacgacggcaaaacaaaaatcgacaaaagctatgacctgtacatcgaccgcgtcatgatcgagcatgagtttgatgaattgtggaagaagcagtccgaactcaatccagcgctattcaacgacaaagcgcgggacgatttgaaagatgtgttgctacatcagcgcccgctcaaacccgtcaaacctgggcgttgcaccttcatgcctgacgaagagcgtgcgccgctggccttgcccagtacacaacgtttccgcatgtatcaagaggtgaacaatctgcgcatcttgcgtgaggggttaaaggaagagccgctgacattgcaacagcgcgacaacctgattgcggcattggaagaaaacagcaagcgcacttttacccaaattaagaaattgctcggcttgggtggtatcgtcaaatttaactttgaagacccgaaacgcgaagaactcaaaggcaacaccaccagtgccatcttgagcaaagacgtccactttggcgcggactggtttagattcgatgaagcaaaacaagatgccatcgtgctgcaattggttaaggaagaaaacgaagccaagctggtgcgctggttgcaagatgaaacggggattgatgaaaaacgtgccgatgccatcgccagcgtaggcttgcccgaaggctacggcagcctgtgtgcagccgcgctagcccgcatccttcccgagctgcgtcgtgatgtagtgacatatgacaaggccgtgcaagcagcaggctttgaccaccacagccaattaaatccctacggcgaaatcactgatgtcactttcaaaatcgaaagcattgaccaagacacaggtgaaattaaagccttccacctgcacaaggctctaccttactacggcgaatacctgcaacgccacgttggattcggcagtggcaatcccgaagatgtacccgagaagcgttacggaaaaatcgctaaccccactgtgcatattgggctaaaccaagtacgccttgtagtgaatgcgctcatcaaccgctacggacatcccagcgaagcgattgttgaattggcacgtgacttgaagcaaaacaaagatcaacgcgatgaagaaaacaaacgccaaaccgcaaaccagaatcgcaacaagcggctacgcactgccattgcagaagtgctgcgaattagcgaggagcgtgtccggcgcgacgacattgagaaaatgattttgtgggaagaattaagttttgacccagcagatcgtcactgcccttactctggcgcacaaatcagcgcggcgatgctattgagcgacgaagtggaaatcgaacacatcctgcccttctcgcaaaccttggacgatagtctaaacaacaaaacggttgcactgcgtcaggccaatcgcgtcaaaggtaaccgcacaccgtgggatgcattcggtgcgcaaagtacggcaggttttgactacgccgccatcctcgcccgtgcagagcaaatgccaaaagctaaacgctatcgctttgctgaagatggtctccaacgctggctaaaagacgatgcgggattcttgccgcgcgccctcaacgatacccgccacatgagcaaagttgcgcgtgaatacatgagcttgatttgcccaaacacccgcgtcatccccggtcgcatgaccgccatgctacgtggcaagtttggtctgaacgatgtgcttggcttgaatggcgagaagaaccgcaacgaccaccgacaccatgccgtcgatgcctgcgtcattgctgtgaccgaccaaggcttgttacagcgcttcgccaaagctagcgccagtgcgcgcgaacaacaactcaaccgcctcgtagaaaatatgccgttgccttgggaaagttatcgggagcatgtggagcgtgcgattgatgctatctgggtgagccacaaaccagatcatagccacgaaggtgctatgcacaacgacactgcttatggcctgctaggtgatggcaaagtcagcgtccacaaaatagtggaaggtaagcgagaacgcatcgaagaaaatctcaaagtcatcgccttcaccaatgcaaaagccaatgatcgacatggtgtcttggaaaacggcgagcccaagccatacaagggatacaaaggcgacagcaattactgtatcgaaatcgtgcgaaatgaaaaaggaaagtgggaaggagaagtaattgctacgtttgatgcttaccagttggttcgtgaacatggtgttgcacgactgcgccatcccacgttgagtgtcagcgggaaaccgttggtgatgcggttgataatcgacgatttcatccgactggaagaagaagcaaatagcaggacgctgcgcgtttgcaaaattcgagaagggcaaattgctttggcagatgtaacgcaagctaacgtagatgctagaacgagaactaaagaaatttcctacattctcaaagcagctagctccttacaaaaatccaaagcacgccgcatcagcatctcccccatcggcgaactgcgcgaccccggcttcaaggagtaagcaaaatgataggccgcatcgtggaagtggcagatgaccgaaggcacttgtttctctcgcgcggttttatggtggtgcaggatacggaaggcgagcgtaaagagttggggcaagtaccgctggatgatattgccgccgtcatcgccaatgcgcatggcttgagttacaccaacaacttgctagttgcgcttgccgaacgttgcgcgccttttgtgctgtgtgccgcaaaccacaacgcagtcggcatggtgatacccatagacggcaactatcagcaagccaaacgattcgatgcgcagattgctgcggctcaacctctcatcaaacgcctatgggcagacatcgttaaatcaaaacttcaacaacaagctgccgcactagaagccacaggtgcaccctctattcctctgtccgcattagtacgcaaagtacgttcgggcgaccctgataattttgaagcacaaggcgctcggcgttattgggggctactatttggcgaagactttcgccgcgatcaacaaggtggcggcctcaatgcaatgctcaattatggctacaccgttttgcgcgccgccactgcgcgtgccgtggttgcggcggggctgcatcccaccattggcttacaccatagcaacgaaggcaacgccatgcgactggtggacgacttgatggaaccctttcgccccatgattgatttgaaagtgtggcaacttcacaaacaaggcgaaggcttaatcacccccgaaagcaaacgcgcactggtgcgaacactttacgacgacatgcaaaccagcgcaggtgctacgcccgtcatggtttgcgcacagaagctagccacttcattagcgcaagtttttatgggagaaaaagataaacttgatttgcccttgccagggttgccactcagtcttgccgcctcaattcaagacgaataacgtgacatgctttccgggtatcgcttgatgtgggtcatcgtgatgttcgatttacccgtggtcgaaaaagttgagcgcaaagccgcatcagactttcgcaataccttgctggatatgggttttgagatgtcgcaattttcggtgtacatgcgtttttgcagcagccaagcccaagtggatacctactgcacacaagtagaaaagagtttgcctaaagggggcaaagtcaatatcctgcaattcaccgataaacaatacgaacgcatcatcacatttcgcggaaaagccaaacaaccgaagaataaatcacccgaccagtacgatcttttttaatgaaacgcacgattttcaccgcccaaaaacacaacaaccccctagtgaatcagggggttgttgcattggtagtttagcagattgggatttgcactctgaccggaacctcaccaatgctctattgacgacattactgagtttagcagattgggatttgcactctgaccggaacgaccttgtagatcccaccttgcctactgttagtttagcagattgggatttgcactctgaccggaacctgagaggccagccgtttgagtccggcaaagtttagcagattgggatttgcactctgaccggaactagctggcgtgcctgctatacacctagcagagtttagcagattgggatttgcactctgaccggaac

SEQ ID NO: 1869 - DNA, 14636 bp, synthetic construct
  source 1..14636: mol_type = other DNA
  misc_feature 1..14636: note = Synthetic
agaatactgcatcttcacgtaatgggttgttttcatcgaaattggcgttcggatcaacaaattgactgatattatccatatattaagtaattactttcaattagtagcgttgcgtcattgacgtgactgaatttttcaaattatagtacagctatggaatctcaactaaactctctcgaaattaagctcacgcagttgctggaattgtgtcagaacttgcgtgcggaaaatcaaaaactacgccagcaaattgcggttgccagtgatcataacaagcaattggatgagcgcgtgatttatgcacgtacacgcatggaaagtttattagcgaatttaccagagggtgacgcatgagccgcgatagtaaaggtttggatattagcatattaggacgcgaatttcgggttgcctgccctgagcctgagcaggaagcactgctaactgccgcacagtatctggatcagaaaatgcgcgaaatccgcgagcagggtaaagtcattggtgtcgaacgcatagcggtcatggcggcattgaatatcgcttttgagctacagaacacgcctaagcaaaatggcattgacacacaggctatggcgcgtaaaatcgacactatgtcagcgatgatagagcaaacattgcatcctcaggatactttgttcgataggttagaaacacccacatcctgacacaactatgttccctgcggtgtacgtccagattgcgaattctttgaaccaataaatttgcaacggtcgtggctattgataagtgctgttgtgcgcgttacttgctaacgtacctgaagtgcttacgctgtgaccccttgagccctaggttcaagatagcggtcagacggcattggcggggagctcctcttaaaattatgcaagcatccaaatcccaacttcgccgtcagctattacaacgccgccgcgcactcaccgccatgcaacgtcaccacgccgcacagcaattgcttattcacgtcatccgttcacggctgctgctacgccaccagcatatcggcttatacctcgcgcacgggacagaaatcaacacgctaccgctaatcaatcgcttgctggcattaggcaaaacagtgtatttgcctgcattgccatttgggcgtagcaagcaactgtggtttcatcgcattgaagcgcatcaaccttggcatgttaatcagtttggcatacccgaaaaccagactagcgttcgcgtgcgggcgcggcaattggatgtgttatttatgccgctagtgggctatgacgatgctggctcacgtataggtatgggcgggggttattatgatgccagcctggcgtatttgcgccgtcgtcgttatcacatcaaaccacgcttaattggtatcgcgtttacctgccaacatcttaccctagcattacctgcagatagctgggatgttcccttacacggcatactgaccgaacaaaatctgcgttattttagataaacagcatttacttatgcacatctctagtgcatttgtaaggcgataatcgaaaagtgccgtatatttcataaaaaacagtaaaccattgaatttaataaattttaattattgcactttttttaagctgaacagcaccagcctatattttattgatgttgagctagttatctggactttacccacaaagttatccacaggatatgtggacaatataaaatactgtttaacattaagctattagttcatttccatagaaaatacgctaagacttaacgctaaactaacactacatttcgcaccagaataacgagcaaaataggcactctcagcaatgtcaaattgccgcaccaaaacaatgcccagccactgagccgtgcataatacctgtattactgatgatactgcgggcttaattcgtgcacggcggctatcaacgccgccgcattttcgggtggcgcaaattgtgaaataccatgcccaagattaaacacatgaccattgccattgccataactggccaataccttcgccgtctcagcacgcacggtatcggggtcagtcaacaagatagacggatcgagattgccctgcaaagcgactttatcgcccacgcgttggcgtgccacaccaatatcgacagtccagtctaagcccagcgcatcacagcctgttgccgccatgctctctagccaattaccgccgcctttagtaaatattaccgctggaatatccacaccattatgcttgcgtatcaaccctgccatgatgtcctgcatgtaacgcaatgaaaattcgtgatacgccgcgtgtgataatgccccgccccaagtatcgaatatcatcaccgcctgcgcccctgctacaatttgcgcattcagataatccaccacggctttagcattcacagccaagatgtgatgtagcaaatctgggcgttgatacagcatttttttgaccgtcgcaaagtcagtaccgccctgcccttctatcatgtaacacgccagcgtgaatggactgcctgaaaaacctatcaacggcacactaccatccagtgcacggcgaatttctttcaccgcatcaatgacatagcctaatttttcgtgtggattgggcgcagttaaggcacgaatttcccattcttcgcgtagcggacgttcaaatttaggtccctcaccctgcgcgaaatacaagcctaagcccatcgcgtcaggaatagtgagaatatctgaaaacaatatcgccgcatccaatggaaaacgcgctaatggttgcaaagtaacttctgtcgccagctcagggtttttacataaagataaaaaatccccagcacgggcacgagtttgattatattcaggcaaatagcgtcccgcttgccgcatcatccacacgggtgtgtagtcagtcggctggcgcattaaagcacgtaaaaaggtgtcgtttttaagttgggacatgctgatatacctgagatgaaattacgagacaaaacacgaaaaacgcgacggcttttcgtgctttatgtggataaaacgaattaccaaacgccaagatagcccaatatgccttcagccgcttcgcgcccttcaaatacagcagtgaccaccaaatccgagccgcgcaccatatcgccgcctgcaaacactttagcattagcagtctgaaatttgtgtttgctacctttagcgataacacgcccgccttgatccgtagtcacgccgatgtcggcaaaccaaggcgcagggctagggcggaaaccgaatgcgataatcacgcggtcggctggtatggtttcttctgaaccttccaccaccacaggcgtgcggcgaccgcgtgcatcaggtgcgccgagctcagtcgtcaccagcttcacgccttcgactttaccgtcgccaacaattgccacaggctggcggttccataagaactgcacgccttcttctttcgcattagtgacttcgcgcttagagcctggcatattggcttcgtcacgacggtaagcgcacgtgacagatgccgcgctttgacggatgctggtacgattgcagtccatcgccgtatcgccgccacccagcactacgacgcgctgaccttccatggagataaatacatcgtctgctttttccaaatccaaacaatgtttgacgttggaaatcaggaacggcaaggcttccagcacgcctggtaaatcttcaccagggaagccgcccttcatgtaagtataagtacccatgcccataaacacagcatcgtattcagtcatcaaggtttgcatctgcgcgtggtcaacttctacgcccaggcggaattccacgcccatttgctccaacacctcgcggcggcgttgcatgacccatttttccatcttgaattcaggaatgccgaaagtgagcaagccgccgatttggtcgtaacggtcgaacaccacaggcttcacaccgttgcgcaccaaaatatcggcacagcccagacccgcaggtcccgcgccgataatagcaacgcgtttatccgtcgcgactaccttgctcatatctggtcgccagcccgctttgaaggcttcttcggaaatgtatttttcgatttgccctatggtgacggcactaaagccgtcattcaaagtacacgagccttcgcacaaacgatcttgcggacagacgcgcccacagacttcgggcaaagagttagtttgatgcgacaaatcagctgcttcaaacagcttgccttcattaaccagcttcagccagctagggatgtaattatgcacagggcacttccactcgcaatacggattgccgcatgacaaacagcgtcctgactgctccgccgcctgcgtcgcatccatctgcgcgtagatttccttgtactgcatacgccgaatttcggcagacgttttcgcgccatcttggcgcgcgatgttcataaattgaaatacatcagacatgatatttatccaaacttaataagtgcatagtggtgtgcctcaatctttgagcaagctatctaaggtagtcgctttagatttaacaagccagaattgtgccactacgtcggtaaagttcgacaacatccaattcgcacgtgcgctattggtgtgcagagcgtgcgcttccagacgctgcttcaagaaatggcgatactcaacggtagattcagtatggatgcggtgtatatctatcagctcgttattataacgatcagggaaatcacctttggcatcgtaaaccagcgcaaaaccgcctgtcatccccgcaccgaagttaatccccgtttcgcccaacacggtaacacagccgcccgtcatgtattcgcagcaatggtcacccgcgccttcgatgaccgcataactacccgaattgcgcactgcgaaacgctcgcccgccatcccagcggcaaacagttgcccgcccgtcgcaccatataagcaagtattgccgataatcaccgcttcgtgggcaacaaaacccgctttaggtgaaggctgtatggcaacaataccgcccgacatacctttacccacgtagtcgttggcatcgccttctaacagtaaattcaaaccgttgtggttccacacaccgaaactttgtccagcagagccgtgtagtttcagcgttaaacagccatcaggcaaaccaacagcaccgtgtgcacgggcgatttcgcctgacaaacgcgcaccgatagagcggttcacattatgtacagcgtaatgcaatgtcgttggcgttttagtgcgtatgcagtccatcgcatccaccaccatttgctcggccaactcgcctttatcgaatgacggattggatttttcgatacagaaacgcggctcagacgctggaataccgccttgcgtcaacaaagtttgtagattcaaacgtccttgacgtggtgtgtcgcccgcattgagcttgagcaaatctatgcgaccaatgagatcctctatggtgcgcacgcctagtttagccatccattcgcgggtttccatggcgacgaaagtgaagaaattcaccaccatttcaggcaagcctatgaagtgctgcttacgtagtctgtcatcttgcgttgcgacacctgttgcgcagttattcaaatggcagatacgcaagtatttgcaacctaaagcgatcataggtgcagtaccaaagccgaaactttccgcgcctaaaatcgccgctttaatcacatcgtagcccgttttcaagccgccgtcggtttgcacacgcacgcgtccacgcaagccgttggcacgcaatacttgttgcgcttcggtcaaacctagctcccacggcgtacctgcgtatttcacactggtaagcggcgatgcgcccgtgccgccgtcataacctgaaatagtaatcaaatcggcatacgccttagccacacctgccgcgaccgtacccacgccaggctcggcaactaatttcaccgacaccaaggctttaggattaacttgcttcaagtcaaaaatcaactgcgccaaatcttcaatagagtaaatatcgtgatgcggcggtggtgaaatcaatgaaataccaggcttggcacagcgtaatttagcgatcgtttccgagactttatgtcctggcaactgtccgccttcacctggctttgcaccttgtgaaattttaatctgcaatacttcagcattgaccagataatgcgcggtaacaccgaaacgcccagaagccacttgcttaattttggacattttcatcgtgccgtaacgcacagggtcttcgccgccttcgcccgaattggagcgaccgccgatacggttcataccgatagccaaagcctcgtgtgcctcaggcgacaacgcccccaaggacataccagccgagtcgaagcgtttcagtattgcttctactgactcaacttcgtctatagaaatcgcctctgcgtcttcactcaagcccatcaaatcgcgcaacatcgccacttggcgaccattgaccaaatcagcgtaagatttatacagtgcgtaatcacctttttgtaccgcttgctgtaactgcgataccacgtcagggttatacgcgtgatattcttcaccgtggataaacttcagcaaaccgccttgcgcgataggacgcataggattgtatgcgaggcgagccaattgtttctgatcgtcttcaaaatcagcgaaattcgcacccgaaatacgtgaaaccgtgccatgcaaactcaacgcgaccacttcttcatgcacgcccaccgcttcgtacaattgcgcaccgcgatagctcgctatggtagaaatacccattttagacaatactttcagcaagcctttgtctatacctttacggtaattcgttagtgctttttcaagtttatgtttgatgtcgcccgacgcaaccatatccataatgacttggtaagcaaggtaaggataaaccgctgtcgcgccgtaacccaacaatgccgcaatctggtgcggatcgcgtgcgctggcagtttcggcgattaaattacaattgcaacgcaagcccgctttaatcagcgcatgatgcaccgcacctaccgcaaacagcgcatggacaggtaaacgcgctttgctaatagcgcggtcagacagcactatcaccacattgccagccgctaccgaagcaacgaccgcttgcgtaatttcttgcacagccgcttgcaaatcgctggtgctagggtcatagctcaactcaaattgtgcgctacgataattagcatcagtcagcgtcgtcaaatacacaaacgcatcatgcgacaacaccggcgatgggatttccaagcgatgtgcgtgttctggcgtttgctcaaataaattgcgctcaggaccaaagcaggtatttagcgacatcaccaccgcttcgcggatagggtcgataggcggattagtcacctgcgcgaattgctgacgcaagtaatcaaatggcgagcgcactttttgcgacaacacagccataggcgtatcgtcgcccatagagccgatagcctcttgaccatcctcacccaacacacgcaacacctgatcgcgctcttcaaaactcacaccaaatagtttttgataaactgacaaggttggcgcgtcaaatttaaccgtatcggcatcttgcgccatgcctaattctaaatgctgcgactgtttcagccattcgcgataaggatgcgcggcttttaattcagcctcaatatcagcaggcaataacaccttacccgtcagcaaatctgccgctatcatctgacctggcttgatgcgacctttttgcaccacatcctcaggcgcgtaattccacacaccgatttcggacgcaatcgtaaaatgcctatctttagtaatcacataacgcgcaggacgcaaaccattgcgatccagcaaacacgcgccatagcgaccatcggtcagcactacacccgcaggaccatcccacggctccatgtgcatggaattgtattcgtagaacgcgcgcaaatctgcgtccatctcaggcacattttgccaagcaggcggtatcatcatacgcaaactgcggaacaagcccgcgccgcccatgaccagaccctcaagcatattgtccatgctgtaagaatctgaaccattgcgaccgacgataggacgcacatcatccatattcgggattagcggtgtggcaaatttacgctcacgcgccaatgaccaattacggttaccttccaccgtattaatttcgccattgtgcgcaagatagcggaaaggttgcgccaaacgccattcaggccaagtattggtagaaaaacgctgatgataaaccgcaagcgctgaagcaaaacgttcatcactcaaatcctgataaaacacaggcaacgccgcaggcatcaccaaacccttatacagaatcacattgcccgacagcgtaggaatataaaaagccttatcgccagccaatgctttttcagtcaaacgccgcgcaatatataacttacgttcaaatgcctcagcatccatcaccgcagggcaattaacaaaaatctgctcaaaatgcggcaacgtcgccaacgcatactcaccgcaaaccgacgtatccacaggcagtaaacgatagccagccaccgtcaacccctgcgccgccaactcacggttaagcgtatcacgcgccaccgttgctaatgccgtatcctgattaaggaaaaccaagccagccgcataatgcgcattaagctgaaaaccgcattcagccgccaccgcacgcaaaaaagcatcaggcttcttgaataacaaaccgcagccatcacccgacttgccatcagccgccaccgcaccacggtgcgtcaagcaagccaacgacgaaatcgcggttttaaccagccagtggctaggctcgttatccaattgcgccatcaacccaaagccgcaactatcctgttcaaaatcggggctatataaagtcccttgcaaccagctctgtctgtccattgggagtcatatcaaagtaaaagcgaaattgcctcaattctactcgtccacacggcatcaggcaatgctaatgttgggtggacaacacctaggcgcggggggtgggcaggtattatgctttaacgcaattaagcaacgacaaccaaccaacaacgcattgacataccccgcgctaaatgtacaatacaactgtacatttagcgcgggagcacgccatgcaaaccattccattttccgaagccagagcacacttcgcagaaacaatacaacagctagaaacagaacaacaaccactcactatttctcgacgagggaaagcggcggcggtattaatttcacctgctaagtatgcgcaactgataggtacagagcaaaattttgccgcgcgtttagcacaatggcgcatcaattacgcaaccgagctgctggaagccgacccatttacgcaattacgcgacaccaccgatggcagggatttttcttggtgaatacactgagctggttactcgatagcaatatactatcagaagcattgcgcccatcccctgacgcactagtcatgagccagcttgctcggtttgatggtgaactggcgattgccgcgccgatatggcacgagctacgctacggctggttgcgtatgcctgatggtcaacgtaaagatgcaataggtcgatatatacaagatgtcgtcgccactttaccgatattaccctacgatgccagtgccgcccgtattcatgccgaattgcgtagcaagcaggaaaaaatggggctatcactcccgtttgtagatggtcaaattgccgccatcgctatgacgcatggattaacactggttacccgcaacaccaaagactttgccaatatcgcaggattgcgactggacaactggtttacgttgtgatgtggaatgcgcctgtgggggtatcgagattcaagaacgattagactaagagccgcatgtagcggctcttacatttggtgcttttgacagcttgttagcgttcagagcgcaaatcccaatcaactgatggaatttataataatatagtggcgcatataggtcaattaaatttcaaacaaccaaggggattaacatgttgggtaaaatgcgttatcggttagcactagatttaggcacaacctcattaggatgggcaatggtgcgtttagatgttgacaaccacccatctgccatcattaaagctggcgtgcggattttttctgacggacgagatgcaaaaacaaaggcttcacttgcagtaacgagacgtgaagctcgtgccatgcgtcgtcgccgtgaccgcttgcttaaacgtaaggcaggtatgatgcgcagtttaattgagcatggttttttcccaaacgacatcacagcacgcaaagcactagccgtattaaatccctataccttacgtgccaaaggcttgaatgaagccctcacgccagctgagtttgcccgcgctttattccacatcaatcagcgtcgcggattcaaaagcaatcgcaaaacagataaaaatgagaacgatagtggcgcactaaaaaccgcaattatccaattgcgtgaaaaaatcaagaatgaaaattgccgtacagtcggcgagtggttgcataaacgagacagtgcaggactacccattcgtgcccgttatcacgtggctaaagtgctgacagccgaaggtaaaacaaaaacagataaatactatgatttatacatagaccgtgccatgatagaagaggaatttgatgttttatggcaaaaacaacgtgcgtttaatccagtcttgtttaatcaaaacgcgcatgacgatttgaaaaatgtattgttatttcagcgcccactcaaacccgttaaaccaggtcgttgtacgctcatgccagaccacgaacgcgcaccgctggcactcccctcagtacaacgtttccgcatgtatcaggaaatcaataatttacggttactggatagcgcactgcaaaccgcgccactcaccttggcgcaacgcaacatcattatcgcggagctggaaaagaaaaataaacttagctttacccaagttaaaaaaatgctgggcgttggtggcgcagttgaatttaatctggaagacgctaaacgcaccgagttaaaaggcaatacaacgagcgcgatattaagtaaagccgagcattttggcgcggtttggtttgattttaatgagtgcaaacaagatacgattgtattgcagttagtgcaggaagaaaacgaagccaagttaatccgttggttacaagatgaaacaggtgtcgatgaaacacacgctgaaagaatcgcaaaaacaggcttacccgaaggttatggcagcttgtgcgtagccgcgttagcacgcattttgccagaattacgaggcgacgtaattacatacgacaaggcagtcattgctgctggttttgagcatcacagcaacctcaacccatccgccacaggcgaggtactcttgagcttgccttattacggcgaaccgttacagcggcatgtcggtttcggcacaggcaatcctgaagacaatgccgaaaaacgctatgggaaaatcgccaaccccaccgttcatataggcttaaaccaagtgcgtttggtcgtcaatgctctgattaaacgctatggacaccccagtgaagtcatcattgagctggcacgtgatttgaagcaaagcaaagatcagcgcgatgaggataacaagcggcaaacacttaatcaaaaccgcaatacacgcctacgtgccgacattgcaaacatattgggcatgagcgaagagcgcgttaagcgagcggacatagaaaaaatgatattgtgggaagaattgagttccgatattgctgaccgccgttgtccttattctggcgagcaaattagtgccaccatgttattgagcgacgaagtcgagattgagcacattctgccattttcacgcacactggatgacagcctcaacaacaaaaccgtcgctctgcgccgtgcgaatcgaatcaaaggcaatctcacgccatttgaagcgtttggcgcacaagctgtagcaggttttgagtatgccgacatattggcgcgtgcggcacgtatgcctaagaacaaacgctatcgttttgctgaagatggttatcagcagtggctaaaagacgatgcaggctttttgcctagagcgttaaacgatacgcggcatttaagcaaagtggcgtttgagtatgtcaaattgatatgcccaaacacacgcgttatccctgggcgaatgacagctatgttgcgtgctaaatttgggctaaatgacatactcggcttgaatggtgaaaaaaaccgcaacgaccataggcaccatgcagtcgatgcctgcgtgatagccgtgaccgaccaaggcatgttacaacgctttgcccaagccagtgcccgcgcacgtgaaaagcaacttaaccgcttagtcgaatccatgcccctaccttgggacacttatcgcgagcatgtgcaacgcgcgatagatgcgatttgggtgagccataagccagatcatagtcatgaaggggcgatgcacaacgataccgcatacggcttacttgccaatggcatggtcgtgacccataaaacaattgatggcgaacgcacccgcatagaagaaaatcttaaagtaattccatttgccagcgcaaaagccaatgataggcatggcatactggaaaatggcgaccccaaaccatacaagggctacaaaggcgatagtaattattgcatggagataattcgcaacgaaaaaggaaaatgggaaggcgaggtaatttccacatttgacgcttatcaaattgcacgcactcaaggtgtggagaaattgagacatgcgacgttgagcgtgagtggcaagtcgctggtgatgcggttgatacggaatgattttgttaggcttgtgcatgagggtaatgtacgtacattgcgagtttgcaaaatgactagtgagggtactattgcgttggccgatgtaaatcaggcgaatgtggatgctaggacaagaacaaaagaaataggatatgtattcaaagctccaagttctttgcaaaaaagtaatgcacgttgcgttaccatctcccccatcggagaactacgcgacgtaagtttcaaagcataaacatcatgataggtcgtatagtagaagtcgcggacgataaacggcatttgtttctgtcgcgaggtttcctggtggtacaagataccgatggtgaacgtaaagagctgggacaaatccccctagacgatattaccgccgtcatcgccaatgcgcacggcttgagctacactaacaacttattggtcgcattggctgaacgcaatacccccctagtaatttgtgcggcaaaccataatgcggtgggtatgttactaccgatagagggcaattttcagcaagccaaacggtttgatgcgcaaatagcggcaagccaaccattgcgtaaacgcttatgggcggatattgtcaaatccaagctgcaacaacaagccgccgccctcgaagccgcaggtgcgccgcacatacccttagccgccttggtacgcaaagtaaaatcgggtgatccagacaacatagaagcgcaaggcgcacggcgatattggagcctgttatttggtagtgaatttcgccgtgatcagcaaggatatggcatcaacgccatgttgaattacggctatactgtattacgtgcggcaactgcccgtgcagtagtcgccgcaggcttacacccaacgttgagcttacatcatagcaatgcaggtaacgcaatgcgcttggtggacgacttgatggagccattccgtcccatgatagatttgaaagtatggcaactcaatcgtcagggtgaacaccaagtcacacccgatagcaaacgcgcactggtacgaacgctatatgacgatatgcaaaccagcatgggcgtgacacctgtcatggtctgcgcacaaaatctagccacatcattggcacaaatttacataggtgaaaaagacaaattagacttgccgctacccagtatgccactggacttagccgccgcattacaaaatgagtaaaccatatgttatcgggatatcgctttatgtggatggtcgtgatgtttgatctacccgtcgttgaaaaaatcgagcgcaaggcggcaacagatttccgtaatgcgttgttagacatgggattccaaatgtcccagttttcagtttatatgcgtttttgtagtagcacggtgcaaatagaaacctattgcacccaagtggaacgtaacttacctaaaggtggcaaagtgaatattttgcaatttaccgacaaacagtatgagcgcattatcacttttaacggaaaacgcaaacaacccagcaaaaaatcgcccgatcaatttgatcttttttagggataaacaatggttttcaatagccaaaaacacaacaaccaccttaataatcaggtggttgttgtgttacgagtatagcagattgggatttgcgcactaaacggaactgaatatgtccgccgcctgttgacggttacagtatagcagattgggatttgcgcactaaacggaacttaatggcctcgtcttgggttccgtctgaaagtatagcagattgggatttgcgcactaaacggaacattcaaacggcgcaacaccaaacgtgatagagtatagcagattgggatttgcgcactaaacggaactcaacggcagctcgtgtcacga

SEQ ID NO: 1870 - DNA, 14615 bp, synthetic construct
  source 1..14615: mol_type = other DNA
  misc_feature 1..14615: note = Synthetic
tacgcacagcccccgaaacagggtacctacgctgactcgtctctgttgctctgatcctcaccttagggtcttgcgacttgtcggtggacagccgttagctgctacgctgccctgtgcagtccggacgttcctccagtgcgccgtttccggccttgcaccagcggtggtctggtgggcttcacggcagcattatcgccgctgtgcatatggatataccaaaacctgtagaacatctgcttcacaatctgcctcacccatttccaccactgctcacaacccaacggagatttccatgaaggctgacaacgtcctgcaaaccattggcaacacaccgcacatccgcatcaacaagctgtttggcgcaacccaccaggtctacgtgaagtccgagcgcagcaacccgggcggctcgatcaaggaccgcattgcgctgtccatggtcgaagacgccgagcgcagcggcgcactgcagcccggcgccaccatcatcgagccgacctcgggcaacaccggcgtcggtctggccatggtggccgcggtcaagggctacaaactgatcctggtgatgcccgacagcatgtcgatcgagcgccggcgcctgatgctggcctacggtgccagttttgacctcacgccgcgcgaaaagggcatgaagggcgcgattgcacgtgcgcaggaactcgtcgccgccacccccggtgcgtggattccgcagcagtttgaaaaccccgccaacatcgacgtccatgtacgcaccacggcgcaggaaatcctggctgactttcccaagggtgtggacgtactcatcaccggcgttggcaccggcgggcatttgagcggcgtggcccaggtgctcaaggcgcgctggccgcagctcaaggtgtttgcggtggagccggtggcctcgcccgtgatcagcggcggcgcgccctcgccgcacccgatccagggcattggcgcgggcttcatccccaagaacctcaagaccgaattgctcgacggcgtgatccaggtggacgccgaaccggcgcgcgaatacgcacgccgcagcgcccgcgaagagggcctgctggtgggcatctccagcggcgccaccctggccgccatcgcccagaagctgcccgagatccccgcgggtgcgacggtgctgggcttcaactacgacaccggcgagcgctacctgtcggtcgacggctttttgccaagctgaaaccgcccggccagcgccgggacacgtatcattggcggctgcttgatcaccacgagcccgccatgattcgactgaccgaactcaaactccccctcagtgccgtgccgcagcctgcgcgccgggcggccgacgcaccggctgaaacggacgcggaccgcgcgccggtggcgcatccactcgctgcattgcgccagttgtgtagcgccgcgctgggcattgcgccggatgcgattgccgatgtggcggtgttcaagcgcagtttcgatgcgcgcaagaccgagctgctgtgcgtctacatcgttgacatcaacctgaccgacccggcgcaggaagccgccctgctcgcgcgctttggcggccacccgcacattggcgccacgcctcccatgcaataccacctggtagcccaggcacccgcagattgccgcgcgcgcccggtggtggtgggctttggcccctgcggcatgtttgccgccttgctgctggcgcaaatggggttcaagccgctggtgctggagcgtggcacccgcgtgcgccagcgcaccaaggacacctggggactgtggcgcaagaagcaactcaaccccgagagcaacgtgcagtttggcgaaggcggcgcgggcactttctctgatggcaagctctacagccagatcaaggacccgcgctttctggggcgcaaggtgatgcaggagtttgtggcctgcggcgcgcccgaggacatcctgtttgaggcccacccgcacgtcggcacattcaagctggtgaaagtagtggagcacatgcgcgagcagatcattgccctcggtggcgaggtgcgctgccagcagcgcgtggtcgatctgctgctgaatgatggccatgacggcaagacggtgcgcggcgtgcgcgtgcaagacctgcgcgacggcagcacgaccgagattgccgccacgcaggtcgtactggcgctgggccacagcgcgcgcgacacctttgccatgctgcacgcgcgcggcgtggcgctgcaggtcaagccgttttccatcggctttcgcattgagcatccgcaaagcgtgatcgaccgcgcgcgctggggccgccacgccggccacccgctgctgggcgcagcggactacaagctggtgcaccacgccgccaatggacgcacggtgtacagcttttgcatgtgcccgggcggcaccgtggtggccgccaccagtgagagcgggcgcgtagtgaccaacggcatgagccagtattcgcgcaacgagcgcaacgccaacgcggccatcgtcgtggggatcgagccgcaggatttttgcgtgagcgacgatgcctttgtgcaggcattcggtgccgaggcgggcgcgcgttacgccgctgaaaccgccgccctgcacgcgcacggcagcacgtgcgtacacccgctcgcaggcatcgccctgcagcgcgcgctcgaagccgctgcctttacccaaggcggcagcaattacgaggcacccgggcaactggtgggcgacttcctggccgagcgtgcgtcccacacctggggcagcgtgcagccgtcgtaccggcccggcgtgcacctgggggacctggctccgcttctgcccgactacgccattgccgccctgcgtgaggcgctgccggcctttgccaagaagatcaagggctttgacatggccgacgcggtgctcacgggggtggagacgcgcacctcgtcgccactgcgcatcacgcgcaatgacgactttgaaagcatcaatgttgccggcctgtacccggcgggcgaaggtgcgggctacgctggtggcattctttcggcagcggtcgatggcatcaaggtagccgaggcgctggcgtgcaaggtgctggccaactctccatgaaccgcaccgccactttcgtcatcgcgagcgaagcgcggcgatccatgacttctggctgcatggactgccgcgtcgcttcgctcctcgcaatgacgaaaccacggttcatggccactgggcagtttcggcaacccgaaaccggggggctccaaatagccccaagcagcggctataaattgtttcgcgcagaatgagaccctctgcaaccttgaacgaacccatgcccctgaccctgcgccaagcgctgcatctcacactgacactggtcctgggccttgccgcgctggcggcgcgcgccgagctgggtggcacgcaagcgtcgctggccctagaccaggccaatctgggtgccagcctgcgactgtcgaaagagccgtcctaccaactggcggtgctgaccctgcccaacggcgtgcgcgtacgcgaatacctttcggcctcgggccagatctttgccattggctgggatggtccgcagttgcccgacctggaactgctgctgggcaaccaccaccccagctacctggatgcgatgggccagagaagccgaggcgtgcgcgtgcaacggcccgacctggtgattgagtccggcggcatgatgcgcgcctatgtcgggcgcgcctatctgcccacgctgctgcctgccggggtgcgcccccaggacattcagtgatgcgctacgccgcgttgctgctggtactggtgttggccgcgtgcggcgggggcggcgcgggcgtcacgcctacgcctaaccctacgcccgatccttccccgacaccgacacctacgccactggcggcgaatgcggtagcagtgatcatcgaacccggcccgggcagcaatgtcaacgtgccttacgtctcggtcaaggtctgcgcgcctggcacctcgacatgccagacgattgaccacgtgctggtggacaccggctcgttcggcctgcgcctgctggcgtccaatgtcacggcgctggcgctgcccgcgcaaaccgatagcagcggcagcgccgtgctgagctgtggtcagttcgtcaactttgtcacctggggtccagtgaaacttgctgatgtgacgattggcagcaagcgcgtgggcgcactgccgattcaagccgttgccgaccccaaataccccaccatccccgtcagttgcggcagcgccaggtcggccgccaccaccgccagtgccctgggtgccaatggcatcctgggcgtgggcgtacgcaccaacgacgatcagcagtactacaactgcgtctcgggcgcgcgtttccattccattgatccctgcatgatcaacctggctgcggccaagcaggtgcaaaacccggtggcgctgtttgccagtgacaacaatggcgtggtgttgcaattccccgcagtgccgagtacgggcgcagatcggctagacggcgtgatgctgtttggcattgacacgcaggacaacaaccggctcggtgccgccaaggtggtgccgaccgacgcttcgggctatttcaccaccacctacaagggcacggcactgcgccagagctttatggacagcggctccaatggcctgttctttgcggacgcgagcctgagcccgtgcagcagcgtggactcggggttttactgtccgtcaccgacgcagaacctgacggcatccatcgccctgcaaggcggtgccagtggtagcgtcaactttgccattgccgatgcggcagcgctgcttttttccaccggctacgtgttcaacaacctgggcggcagcatgaccggcgcgtcgtttgactggggcttgccgttcttcctgggccgcagcgtctacaccgtgatcgaagggcgcagcaccagcgccggcgttggcccgatgtacgcctataccaactaggcgccgcgctcgggctcgggtgctgctaccgggcgcgtggcaccccacaggccaaacaggcacagcgcaatgccgcagcccgagacccagtccggccgccacgcctccagcgccgccgacaccagcagggcaatggccggaatcaccagtcccaccagcgaggcacgcgcgggcccctggcgctgggccagcttgaagtacaggatgaacgccgccaccgaacccatgctgctgaggtacagcagcgagagccagtaactcgcacgtccatcgacacgaaactcgaccgaagtggccgccgcaatcagcagcagcgtgagcgcgccgtagcccatgctccaggccagcagcggcaccagtggcatgccttggcccgtgaggcgcagcgtcagcatattgcccaacgacgccatgaccaccgccgtcatggccaggcccacgcccagcagcacctgcggactgcgcccggcggcggcaatatcgggccagaagatcagcgccacacccagcacccccagcagacccgagagcatgaagcgcttggtgatgcgttgcccgaaaaacagcacgccgccaatggcattggtaaacatcatgagcgagaacagcaccgccaccagccccgaggccaggtacttttccgactcgtaggtgcaccagtagttcacaccgtactgcaccgcgccggtcaggaacaaggtgccgtggaatgcgcgtggtgccagcagggtttcgccgcgccagcgcgcaatgccaaacagcagcacgctggccaggccaaagcgcatggccaccgaatgcagggctgcggtttcgcccagttggtacaggattacgtgccaggtggtggcccaaatcagagtgggcgcccaaaacagaaagcggtcagacatgcgggtggttgtaacacagcggcccggacgcaaaacgccgtgccggtgtaccatgacgcaccatgccggttgatcccgctgttgccaagatttatgccgagaattttcgcgcagacgtgatcgtgcgccccagcgggctgaacctggatccggccatcgtccagaagattgccaaccgcgtcaaagtgttcaagggcatgacgcacgactgcctgatgagcacgctggccatggccgagcaccaggcctaccgcgcaggcgatgtggtgtttaacgaaggcgacatcggcagctcgtttcacgtcctgattgccggtgaggtgatcgtggaaaagcgcaagagcggcgtgctggtgccgctagcgcgcctgggcgcaggcgagtgttttggcgagatggccatggtaggcaaccacttgcgcagtgccagcgtgcgcgccgtgggcaccgccgccacgatgcgctttgaccgcgagcgaattgacgcctaccccgacagcgcccacatcatctaccgcaacatcgccagcgtcctggccacacgactggacgaatccagcgaactgctggccgacctggtggcgcgcaccagcgacaccgagcctgcaccgctggcatgaagtcatggatcgccacggcctgacggcctcgcgatgacgaggtagtgacctcgcgatgacgaggtagtgacctcgcgatgacgaggtagtggcctcgcgatgacgcgatgacgaagtgagggagtggcctcgcgagtttgaaaggctgtcattgcgagcgaagcgcggcaatccatgcaggcacgaagtcatggatcgccacggcctgacggcctggcgatgacgaggtggtggcctcgcgaagacgaggtggtggcctcgcgatgacgaagggcctcgcgctttcaggctcctgtctgggcctgcagcgcggcgatgcgttcttccagcggggggtgggttgagaacaactggccgatgccgccggcaatgcccatggcggacaggctcttgggcaactcgcccggggccatgccgcccaggcgagccagggcgttgatcatgggctgcttgcgcccgagcaggtgggccgagccagaatcggcgcgaaactcgcgctgccgcgagaaccaggccaccaccatggccgcggcaaacccgagcacgatgtcaagcacgatggtggtcagcatatagcccaggcccgggccgctgctgcgctcgtcgcccttgcgcaaaaagctgtcgacggcgtagccaatcacgcggctgaggaacaccacaaaggtattcatcacgccctggatcagcgtcatggtgaccatgtcgccattggcaacgtgggcgatctcgtggccgatgacggcttccacttcgtcgcgcgtcatgccttgcaacaggcctgtggaaacggccaccagcgccgaattcttgaaggcaccggtggcaaaggcgttggggtcgccttcaaaaatgccgacctcgggcatgccaatgccggcgcgctcggagagttggcgcacggtttcgacaatccaggcctcgtccacgttttgcggttgttcgatcacccgcacgcccgacgaccacttggccatgggcttgctgatcaagagagaaatgatggccccgccaaaccccatgaccagcgcgtagcccagcagggcacccaggttgagcccgctgccgctgaggtagcggttgacccccagcaggctggcaacgatgcccagcaccgtgacgaccaacacgttggtcagaacaaacaaaagaatgcgtttcatggtttccttctagtccgactccccccggggaagtccgtggtgccaatgttaggggtgttcggacaattttcaagactgcagcgtcaaagtggcgcagtttacggccctgggttcagcatttgccaatgcaacgtctcttcggcgcacaaaggtttgagcgtggcctggccgaaggcaaactcggacggcacgcgccagggcgtgcgcgtgagcgtcacgcgggtggtgttgcgcggcaagccgtaaaagtcggctccgtgcaaactggcgaagccttccaaccgatccaaagcgttcgctgcgtcaaacgcctgcgcgtacagttccagcgccgtgaaggcggtgtaacagcccgcacagccactggcgtgctccttgagttgggccgggtgcggcgcgctgtcggtgcccaaaaagaaacgcgtgttgccgctgatggcggcttcgaccaatgcctggcgatgcatttcgcgcttgagcaccggcaggcagtagtagtgcgggcggatgccgccggtaaaaatggcgttgcggttgtagagcaggtggtgcgccgtgatggtggcggcggtaaagcggtcggcttgctgcacgtactgcgcggcctcgcgcgtggtgatgtgctcaaacacaatcttcagttcggggaaatcacggcgtagcggaatcaactgggtgtcgatgaacaccgcctcgcggtcaaacaggtccacctcgggggaagttacctcgccgtgcaccagcagcaacatgccagcgcgctgcatggcttcgagcgtggcgtaggtcttgcgcacatcggtcacgcccgcgtcgctgttggtggtggcgccggccgggtagagcttgacggcggctacgcctgcgtctttggcgcgcgcaatctcgtcgggcggcagattgtcggtaaggtagagcgacatcaccggctcaaacgtcacacccgcaggcaccgccgcctggatgcgcgcacggtactccagcgcctgcgcggtagtggtgactggcggacgcaggttgggcatgatcagcgcgcggccaaattgcgccgccgtgtgcggcaccacggtctgcaacgcgtcgccatcgcgcacatgcacgtgccagtcgtccgggcgggtgatggtgagcgtatccacgcgcgcgagggtgcttgctgcggcgctcatgacgatgccaccagatgcgcccacagcgcctgcgccacactcttcgggggtgaacctgcaccgcgctgcgtatccttgccctggggtttttcgcggtaggcgcgcacgtccatggtgaactgcatttcgggcaggcccggtggcacggcactcaccagtttcttgtgcacaaattccttgcgtaccgcgctgtgcggcaggaaggcaatgccgtggccttcgagcgccatcaccttgaggccctcggccatatcggtttcgtacacccgctccaggtgcatcgggatggctgactgcttgagcagcatgtccaccacctgccccagataggcaccgggcgcatagcccaggtagggcaagggtttgtcgattttgccgggcagctcaaacaggggcgcgccgtgcgcgtcggcacgcacatagggcgcaatcacctcttcgcccaggctcaccatctcgtagcgctcggggtccagctggaacggctgcgaggggtggtggtaggcaatcaccaagtcgcaactgccctccaccagccgcatcacggcgtcgtgcacgttgagcgcaatcagtcggctcttgaacgggccaaagtgctcgcgcaggctggtcacccaggtgggaaagaacgtgaaggccagcgtgtggggcacggcaaactcgataaagtcgtcgccaacggcggtgtgcgcgcgcagcatggcgcgcgtgctttgcagcgactgcagcatgtcctgcgcctggtcgcgcagcgtctcgcccgcagcggtcaggcgcggcgggtagctgctgcggtccaccagatcggtgccggcccaggtctcgagcgactggatgcgccgcgaaaacgccggctgcgtcacatggcgcaattgcgccgagcgactgaaactatgggtctcggccaacgaaacaaaatcttcaagccatttggtttccatgggcgcgattatcaaccggcttgcttggtgcccggaaaagacgaaggccgcatatagcggccttccatttggtgcatctggcgattactcgcttcagcttgttagcgtccagagcgcatatcccaatcgttttggtgcgtgaatcatagctcaaattgccaaagcaaaacactcacatttccgcacataccagccgcctgatagcaaacatttgctatattgaaacgcatcaactcgcggtaaattcgcacctgggtgccattgaaactcgaccactcgtgttttctttgcgcaacgccaacaacaagtacgggagaagacatggcaagcatgcgttacagactggccctggacctgggcagcacctcattgggttgggccatggttcgcctcaatgcagagcacaacccttgcgccgtcatcaaggcgggggtgcgcattttttctgacggacgcaaccccaaggacggaagctcattggcagtaacccgtcgcgaagcgcgtgcgatgcgccgcagacgcgaccgcttgctcaagcgcaaagcgcgcatgatgacccttctggttaaacacgggtttttccccggcgacgaatccacgcgcaaggccctacaaacgctcaatccctatgccctgcgcgccaaaggtcttgaccatgcgttgttgcccggggagtttgcccgcgcgctgttccacatcaaccagcgccgtggcttcaaaagcaaccgcagaaccgacaagaaggaaaacgacgcaggcgcactcaaagccgccatcagcaagctgcgccaggacatggctgcaaccggctgccgcacggtaggtgaatggctgcacaagcgggatcaggtcggccttggcgttcgtgcgcgttatcgccaaaccaaggtgacgcgcgacaacggcaaaacaggcattgacaaaagctacgacctgtacattgaccgcgccatgatcgaggtcgagtttgatgccttatggagtaaacaagctgcgctcaatccacaactttttaccgaggcagcacgacaagacttgcgctactgcctgctgtttcaacgcaacctcaaaccggtgatgcccgggcgctgcaccctgctgccagaggaagtgcgcgcgccacttgcattgcccagcgtgcagcgctttcgcatctaccaggaagtaaataacctgcgcgtcgtgcgccagggtttgcgggaagaagcactcacgctgcaccagcgggatcaggtgattgccctactggagcgtagtcgcaaggtcacctttgcaaagatcaaaaaagctctggggctgggttcgatcacattcaacctggaagacgccaagcgcaccgaactcaatggcaactcaaccaacgccgaactttcaaaagacgcctatttcggcgacaactggctggcgtttgacgacgccaagcaagatgccatcgtcatgcaactggtgtccgaagaaaacctggcagcactggtgcggtggatttgttcagaaaccggcgtcgatgccgatagagcagaagcaattgccaacgccggtttgcccgaaggctatggcagcctgagtgctgcagcgctggcgcgcattctgcctgcgttgcgcgctgacgtggttacctacgacaaagctgttatcgcggcgggcttcgaccaccatagcaatatcagcgcagcagccaccggcgaaatactgcccgagttgccctattacggcataccgttgcaacgccacgttgcctttggctccggcaagccggaggacaccgaagaaaaacgcttcggcaaaatcgccaaccccaccgtacacatcggcttgaaccaggtgcgccgggtggtcaatgccttgatcaagcgctacggtcatccgagcgaggtcatcatagaactggcgcgagacctcaaacaaagcagagagcagcgcgagcaagacaacaaacagcaagccgataaccagcgccgcaacaaacaactgcgctctgatattgctggtgtgctgggtattagcgaagagcgcgtgcgcaccgccgacatccagaagatgatcctctggcaagagttgagctttgacgctgcggaccgccgttgcccctactccggcgtgcccatcagcgtcaacatgctgctgagtgaccaagtggagatcgaacacattctgccgttttcagaaacgctggacgacagcctcaacaacaagacggttgcaacccggcaggccaatcgcatcaagggcaaccgcacgccttcggcagcacgcggcgactttgaagcgcaaggctgggcctatgccgatatgttggcgcgtgcagagctgatgccaaaggccaaacgcgcccgctttgccgaggacgccatcgcgcgctggctcaaggacgacgcaggctttctggcgcgtgcgcttaacgacacgcgctacctcagtcgcgttgccaaggaatacctgagtttgatctgcccgcaaaatacccgcgctataccgggccgcatgaccgccatgttgcgcgccaagtttggccttaacgacgtgttgggcttgaatggcgagaaaaaccgcgacgaccaccgccaccatgcggttgatgcgtgcgttattgccgttacggaccagggtttgctgcaacgctttgcccgcgccagcgcaagtgccagagagcggcagctcaaccgcctggtggacgacatgccactgccctggggtacggatcaggacaaaaaatattacctgtcggtcaagcgcgccatcgacaacatctgggttagccataagcctgatcatgggcatgagggtgcgatgcacaacgacaccgcctatggccttttgggcaacggacgcgtaagcgtgcacaaggtcgtagaaggcaagcgtgagcgcatagaagacaacctcaaggtcatcgagttcaccaatgccaaagcgcatgaccgtcacggcgtcttgccaaacggcgacccgcgcccgtacaagggctacaagggcgacagcaactactgcattgagattgttcgcaacgagaacgggcgctgggagggcgaagttatatcaacctttgaagcctaccagcttgtgcgtgagcatgggcttgcgcggctacggcatccgaccatgagcgtcagcggaaaggcgctggtcatgcggctgatgattgacgacgttgtgaaactcgatcatgccgaggcaatccgtgtgttgcgcgtcgcttatgcaagttcggcgggaactattgcgttcgcagatcaccatgaagcgaacgtcgacaagagaacgcggggcaaagacttggcatacgtctttaagaccgcaggatcactccaaaagtcgaaagcccgccgcgtcaccatctcccccatcggcgaattacacgatcccggcttcaaggagtaggcagcgtgatcggtcgcattgtcgaagtggctgacgacaagcgccacctgtttatgcaccgtggctttatggtggtgcaagacagtgccggggagcgcaaggaactcgggcaggtgccgctggacgacattgccgccgtgatcgccaatgcacatggcattacctacaccaacaacctgctggtggcgctggccgaacgtggcgcgccttttgtactgtgcgccgccaaccacaatgctgttggcatgttgctgccgatcgaaggcaactttgaacaagcccgacgcatcgaagcccagatcgcagccaccctacccacgcacaagcgcctgtgggcagcggtggtcaaggccaagctggagcagcaggcggcagcactggaggccgctggcgcacccaccgcgcctttagccgcgctggcagccaaagtgcgcagtggcgaccctgagaacctggaagcacaaggcgcgcggcgctactggggcctgctgtttggcgacagcttccggcgcgaccaggacggcggcggcctcaatggcctgctgaactacggctacaccatcctgcgctctgccacggcgcgcgcggtcgtcgcagcgggcctacaccccagcatcggcctgcaccacagcaacgacaccaacgccatgcgcttggtggacgatctgatggaacccttcaggcccgtagtggacttgaaggtctggcaactcaagcgcgcgcaggaagacagtgttacgccggacaccaagcgcgccctggtacgcaccttgtatgacgacatgcaaaccgacgtcggtgccacgccggtggtggtgtgcatgcaaaggttggcgacatcgctggcacaggtgtacctgggtgagcgcgaccggcttgatttgccgctgcccggcttaccgctggcgcttgcggcatcactgcaagatgaatagcacggccgcaagatgctgtccgggtatcggctgatgtggatggtggtaatgtttgacctgccagtggtcgagaaggccgagcgcaaggccgcaaccgagtttcgcaacgcgctgttggacatgggttttgagatgagccagttcagcgtctatatgcgcttttgcaccagcccggcccaggtggacacctattgcaaacgggtcgaatgtgccttgccaacgggtggcaaagtgaatatcctgcagttcaccgacaagcagtacgaacgcatcatgagttttcatggcaaggccaaacaacccgccaacaaaacgcccgaccagttcgaccttttctgatcgatgcacctattttttgagccccaaaaagcggaaaaccccttgacgaatcaaggggttaccgcagcgctagtctagacgattgggatatgcgctctggccggaacgcgcctgatatgatgcaaaaatcacgcagtagtctagacgattgggatatgcgctctggccggaacgcgtattcgttgacgctgtactgactaccgagtctagacgattgggatatg

SEQ ID NO: 1871 - DNA, 14511 bp, synthetic construct
  source 1..14511: mol_type = other DNA
  misc_feature 1..14511: note = Synthetic
aacgcgccctgaccctgatcgagccgctgatgattttggtgctgggggtgctggtggcactgattatcatctccctgatgatgggagtgctgtccgtcaatgacctggtggcatgatgggcggctggcgcaaacgcattcctgattgagaagttgaaagacacccatgacacagaaacatcttgcacgtctgccccaccatgcggggcatctggatcgcctgacgggcgcacggcgcacacgcggcttcaccctggcggaaatgctggtggtggtggccatcatcgcgctgctggccggtctggtggggccacgcgtgatcggtattttctcgggcacgcagaccaaggcggccaaggcacagatcagccagttcgagaatgccattgaagcgttctacttcgacatgaaacgctaccccacggcgcaggagggcttgcaggccctgttcagccgcccggtcagtggcgcgtcggccaactggaacggcccctacctcaagggcagcagcctgcccgatgacccctggggcaacccgtaccgctacatcaatcccggccccaatggcggggtgatgatcgtgtcgtatggctccgatggcacggaaggtggccagggcgatgcggctgatatttccaatcagtaatgcgcgcgggcatcgacccgtttcgcgcggtttcacgctgatggaattgctggtggtggtggccatcggcagcctgctgatggccatgaccccgctggcctaccagcgcatcaacgcttctgccgaataccgcagcaccgtgcgcaccatgcgcaccgaaatgcgtgccgcgcgtgaagcggccttgcagacccatatgccccagcgtttccaggtggatgtgccggggcggcgttttggtgcgcagaattggcatcccttgcccgacagcgtgcaggtgcacaccacggtggccgatgtggaaatgcgcgagggcgtggcctcgatcctgttcctgccgcagggtggtgccaccggcggcagcgtggagattgtgcgtgccgctggagccagccagggcatgggcacccgtctgcgcgtggactggctcaccgggcagatcacccaggaaagcctgttgccgtgactgctctgactgcgacacacctgccatctcgcacggccttgccgcaccgccgcgcgagtatgccgcctgcatcgcctgcacggcaggcgggcatgggcatgctggagatgctggtggcatttgccatcatggccctgtctctgggcctgatctaccagatcatgggcagcaacctcaagacggccgccatcatggacggccaccagcgcgctgctgtgctggtgcagtcgctgttgcaggcccacgattcggtgccatctgcgggctggaacgaaagcggccagtccgcgggcatggactggcaggtgcgcagccagccccatgaaacccaggtgcaacgccagtacccgcaggccgtgccgctgcacgcgctggaggtgcaggtggcgtggccagaggatgggcgcgtgcgccagatggtggtgcgcaccctgcgcccggaacgccgcacgctggagcaagggcggtgatggcgcgcaatctcccctgccgcccggcttcgcgcggtttcacgctgctggagatgctggtggccgtcatgctgtttgccatcatcatgacggggctgacttcttctttctataccctggcacagaccgagatgcgcatcgaccagcgcgtggagcaggccgcgcgtctgcgcaccacgatggcactgctcgatcaggtgctggggcgggtgtcgcagcgtccgcgtccgggtgtgacgaatgtggatgagagccgcttctggttcgatgggcagccgcaaagcctgcgctgggtgggcaccatgcccgcccgccacggtgcgggtggacgctatttcttccagttgcgcctggagccgcaaggccagatacagaacctggtgttgcgttttgcgccgtggcaggacataccgcagttccccgatccggcacagatggagggccgggtgctgtttgccggtgtcacgcacctgctgctgcgctatcgggggggcaagcccgaagagcagaactggagcaatgcgtggggccacacgcagaccatgcccagccacctctggctggaactggcgacgctggagcagggtgcgctgccgctgaaaatcgtgcccatgcgcgacagcacggcggccatgaatgcggtcgatccgaacatcggcggcattggaggactgtgaccatgcgatatacagacacccgttccaccagagccggcccacccgcacggcatgcgggcgtggccctgctggcggtgctgtgggtggtggccatcatgaccgtggtggccaccgcactggtcagtaccgtacgcaccgaaaggcgcaccacacaaatggaacgcgacagcgtcgaggctctggcactggggcaggcggcgattgcactggtcgtgcagcagcaccgggtgcagaggcaggaaaatccgctggacgaggccaatgcctacgaaatgcagttcgatggcgtgaccatgccggtgcggctggagccggtgggaggatttctggatgtcaatcacacgcctgccgacattctggcgcaggtgattgccgccgtggcccccgaagccgatgccgctgcactggcgcagaattgggtgcagtggcgtgacgaagtgcagccgggcggccagaaacgcaccatcgaagtgttggaagatttgttgcagattccgggtttcggctacgatctgtttgtgcggctcgcgcctgtgctgaccaccatgaatggcgcggccacccagttggatgccaatctgctcaaccccgaactgctcaccttgctggggctggcagcacaaaatagcggcaccgagccgccatcggcgcgccgcaacagttatttttaccgcatcacggccagtgtgccgctggaagggcaggtgtaccgggtgacgcaggatgtgatgctggatgcttccatgtctggcgatggcgcaccctggcaaatcgtggccgcctcacccgcctacgccgtgccctgatgcgatgcaagagagaatttgaaccgtgagttatccgcaaacaccctctgccagccctgcaccgtccccctggatgctgtttggctacgatctgcgaaccctgtggcgcgactggctggctgccatggaaagcctgcatggctacccgccactgtcgtggtttgaggtcgcgccggtggtgcggctgcgtttgcccgatggccgcgacgtgcgctggcaccaggggcaggtgcagcccgctgcgctgtcgttggccaaggatgccagcggtgaaagcttcgcgctgctgttgcccgacgaactggtgctgaccaagcagttgcacctgccgctgctcccggccgagcaagtggccgaagccgtctggctgaacattcacagcagcagcccgtttgccagcgacgacattgcctggggctaccagtccagaccccatgccgatggcgggctggaggtggcactggcattcgcctcgcgcgcccagattgccgtgcggctggaagcgcagtcgccctcgggctggccggtgcagcacaccgaagtgtgggcatcgggggcattcggtctggagcaacccgtggtgctgcaaggctatgccgaggcgcgccgcagccagcgggtgcgccagatgcggcgcagaacctggctgtcgctgctggtactcggggtgctgctggcctgcctgctggtgacaccggtcttgcagttgcagtggaaggcccatcaggccgaagccgcctaccagtcgctctggcgtgagacccagacgctgtcggcccagcgagatgcctttgccaagacccttgaagagctggaagtggtcaagaccggcatggcgggcagcgtgaacgtgctcgaggccctcaagaccctgaccgagcaactgcccgccgatgcccatctgcgcctttttcagtgggaaaataacaccatccagatcagtgcctatgccgataatgctgccgcagtgttgcagaccctggggcagaccggcctgttcgaggaggtgcgcttctcgcgtgccgtcacccgccagccctacatgaacaaggacgacttcagtgcgcaactggtgctcaaacccggcagctttgccattccgatgaacatcccgaatccaccgcctgtgccagaagccccccctcccatcccggatgctgttccggccaccggggagccacagccatgaaactgccgtttttcgggggccgccatcgggcggctgtgccccgcgagaaaatcctgcttctcgtcaccctgtcggtgctggtgctggcggtattggccgctgtgggctacggggcgcagaagtacctgcaagcccaggcccgcatcgccgagctgaccccgcgctaccaacgcctggaaggcagttggctggcgcgcgaggacatgcagaccgcccagcaggcggcctcgcaactgctggatgcctacgcctacccggccagcatggataccggcacgctgggcaccgacatccagcagaaaatccgcaatctgtttgccggtgccggggtcgatctggccagcagccaggtcatgcccgaacgcgaggatggcaatctgctgctggttccggtgacggtacgcgccagcggctctatcgatggcattcgcaatgtgctggcgcaactggcggcacagaccccctacatccggctggaatcgctgaaccttcagcaggggcgcaagctgaacctgcacaccccggtcaccatcaacatgcaggccacgctggtggtctggcggagggcggtatgaagaaccgcaatgccacccgactgatggtgctgaatctgttgttgctggccgcactgctggcggtgctggcctgggcggcactggggcaggtgcagtggcacaagcccgtgccacaacggcctgactaccgcacggtgctggacggcgtggggcagcccatcgcgctcaacgcacagggctatgacgtgctggtgcagcagccgctgttcgagccggatcgtcgccctcccgtgccagagccaccccctgcgccaccaccaccacccgagcaggccgctgcgccaccgccgcccgatgtgctggatcatgcgcggattctgggaacctacggttcgtcccgctacggcggggtgattctgcatttcaacaacgaagaccatcgcctgcgcctgaaccagtcgctgcaaggctggacgctccagcgcatccgggggcgtgtcgtcacgttccgtgcggccgacggggcacagcgcgagcttgtgatggagcaccagattccagagccgggcgcggtgccacccggccaggccgcgcccgcttccaatccgtgaacccctttctctctccaggctttctatgagcaatcgaaaacttcttcttggctgcatggtattggcagccgcacaaacggcctgtacccagttgccgcagcgcatccagttgggcggtgaccccgccacacccaccagcgatgcggaacatgcacagtggggcgtgaatgccgacaaccaggtggcgacgagcggcattgcccaaacgggttcgcaggtgcgcatctatgaaggcacgggcgtggtggtgcagcccccgcgcccaggccgtgccctggtgggcagtgccggggaattcaacttcgaggccgccccgattgccgaagtcatccatgtgatgatgggcgatattctccaggccgactatgtgctgcaccagcccattgccggaaccctgacgctggccaccaagaagcccgtcagcaaggatcgcgccatgtcgttgctggaaaccgcgctgatggccaatggcctgcacattgcccaggacaccggcggcttctaccacatcggcaagcccgaggcattgcgcggcatcgtgccggtaccgcgccaggtgggcaatggcccgctggctccgggctatggggccattctcattccgctggaatacatctccgccagcgaaatggcagaaatcctgcgacccgtgatgcaggaggactcgctcattcgagtggacagcgtgcgcaacattctggtgctggcgggcacacgtccccaggccgaaggctggatggaactggtgcgcaccttcgacgtggacttgctcaagggcatgtcggtgggcatcttcccgctcaagtacgccacggtggccgacattcaggccgggttcgagttgctcagtgccgccaccgggggcgagggggccaatatcggccagcagcgcggtgccacgggcggcggcaatgcgccacccgaccgccagcagcaggccaatgcccgcttgcaggcacaggcagcggcctttgccgccgccatgaatgtgggggccagcaccagcaccggcccgcaggccattccgtttcttggctccatgcgcctgctgccgctggagcggctcaacagcatcatggtcgtgacaccgtatgccgagcacctccagcaaatccgcgaatggattgagcgactggatcagcccaacgacagcaccgaagcgcaattgttcgtctatggagtgcagaacggctcggccacccatctggcccaggtattgggagggattttcggcggcaattccggcaccggagcgacggccaacagcggcgtggctcccggactgggcgtggcgcagtcgtccaccggccgcactggcggcacgcaaagcggcatgaacctgagcagcgggcagagtagctcgcaaagccacaccacagaaaacaccgctccggtggccatggacctcaatggcgtgcgcgtgattgccgacccgctcaacaacgccattctggtgtggggctcccgcatggattacgagaagatcgaaaccacgctgcgcaagctcgaccgtccgcccgtgcaggtggtgctggaagccagcatcgtggaagtttcgctcaccaacgacctgcaatatggcctgcgctgggcattctcgggtgcgttgggcggcagccagtaccaaggctcgggcggttcgtcgggcctcgttgggctgacccctgccacggcactgggagccgctgccggcctgaccacgggcggagccggggcattttcctatgccgtgacgcgcggcgattcggtcaatgccctgctgagcatgctggcctcgcgctcgctggtcaagatgctctccagcccttcgctgctggtgctggacaaccacactgcatccatcaccgtgggcgaccaggttcccatcaccacgggcgtgatcgactacaccaacagcggtggcaccaactcgcgcagcattcagtacaaggacaccggggtgatcctgaaggtcacgccatccgtcaatgcgggcgatcgcatcacactggccatcgatcagtccgtcaccaacgtgggggaagttgcggataccgatggcaaccgcagtttcatgcagcggcaactctccagcaaggtgagcatgcgttcgggtgagccggtggtgctgggtggcttgatccgcgagaacagcactgccagcaaggacggcattcctgggctggtggatgtgccggtgctgggcaatgccttcggagccaccaagaacaatgtcaatcgcacggagctgctggtcatcctcacgcccacggtattgcgcaccgatgacgaactgcgtgatgcaggcagggaactgcgcgagcggatgcaaaccttactgcgcacccgtgtgcaggaaatccgcaagggcggcccggtactgccgggcgaggaagtgctgttgcaagaggcactccagcccgcactgaagcccgacaccgctgcgcccgcccagccgctgtccccgaactgaacccaattcatcctggaaggagcctgaaaatgatgcaaaaaaaattccatgtgctggcactgtgcagcctcgcgctgctggccggttgcgccaagaatggcgcagtgtccacctcgcagacccccgagcagatcgtccagcaacgtgccaccgaacgctggaacctgatgatcgcgcgcgatttcgacaaggtgtacgagtacaccgacactgcctaccgtctggtgaacacccccatcgatctggaccgcaaatacggcggcaaacgctaccgtgtgggcgtgaactggaccaaggccgaattcatctcggtggagtgcggcacgcctgatcgttgcgtgaccaagttcagcgtctccagcctggtgaacgtgccacccagcttcaccaacatggaaatcaacaacgtgcccaccgaggaagtctggctgttgcaagacggcaactggttctattacatgaactgatacgggcattcgtgcccctgaaaggaagtttttcatgcgtttgttgctggccctgctgctgccctggcttcagttcttcaccattggccgcccgttcgcgggcatcatctgcctgattctccagatcaccctgattggctggattcccgctgccatctggtcggtgtatgccctgagccagtacaagaccgaccgcaagatcgcccaggcactcggccctcgcaaggaaccctgagagccaattgcaggacaggggctgtcgcaaggacagcccatttttttgttcttctccccgcagtcgcgtacagcggggatcgtctgatttgccatgtccaaaccctccattcccctcaaggtgctgattcccgtgctggccatgctgtcggctttcgcgcccgttgccaccgacatgtacctgcccggcctgagcctgatgaccgaggtgttccagaccaccaccgggcgggtgcaggccaccatctcggtgttctttctgggactggcaatcggccagtccatctacggcccgctgatcgaccgctttggccgcaagccgccgctgctggtgggcgtggggctgtatgtgctggcctcgctggcctgcatgtgggtgacggacatcggctggttcattgcaatgcggttcctgcaagccgtgggaggggcggccgggatgctgattggccgcgccatcatcaacgacctgttcgaccgcaccgaaaccgcccgcgtgctgtcgctgatgatgatggtcatcatcctcgcgcccattctggccccgattgcgggcggctggctggtggtgaacgtgagctggcagagcatcttcgccgtcatgctggtgttcggggtggtgtgcctgctgctggtggtgttcctgattcccgaaaccctgccccctggccatcggcaggagctgggctttggcagggtggtgcacacctatgcgcagttgctgacgcgccctgcatttgccattccggccctgtgcggcgcactcgcacaaagctgcatgtttgcctacatcacgggttcggaatttgttttcacccagttgtacggcctcagtgcccagcagtacggctggctgttcgcgctgaatgcggcgggcatcatcgtggcgaccaatggcaaccgcttcagcctgaagcgttggcccatcgagcgaatcttcacggccgcgctggtggccaatgcggtgtttgcggccgcgctggtgctgctggtcggcagcccctcgctgtggtggttcgtgttgccgctgtggctgctgatcggcacactgggattcatcggcgcgaatgccgctgccattgccatgagtgccagcggcaggacggcgggcagtggctccggcctgattggtgtgatgcagttcggcatcgctttcgccgtcagcagcacggtggccgccacccagaacggcacggcctacccgatggccctgaccatgctggtgtgcagcacggcagcctgcgtgctgtggttcggcactagaaggcggatggcaaccgtatcggggtgagccgtgctggcccgatgaaatctgaaagacgaaggccgcgcattgcgcggccttccatttggtgctcatggatagagcttgttagcgtatccagagcgcatttcccaatcgttggtaaacggttgctaatgtagcatatggattcttcttgtcaatcaatcaaaaaaaggaggtgacatgtctaaactgcattaccgtttggctctggacctggggccaacctctttggggtgggctgtcgtgaggcttaccggcgaaataccgcccgtacccgttgagctgataaaaaccggagtacgaatttttggcgatggccgccgtcccaaggacaaggcatccttggcggttacgcgacgcgaagcccgctccatgcgccgcagacgcgaccgttttctcaaacgcaaggcacgcatgatgcataccttggtgcagcatggctttttcccgcaagacccaaagcagctcagggaactggaaacactgaacccttatgaattgagagccaggggattggagcaggcactgcaaccgggagagtttgccagagccttgttccatatcaatcagcgtcggggtttcaagagcaaccgcaagaccgactccagggacagcgacagtggtctgttgaaaacagccattcagacactgcgtgagaccttggcccaggagcaggtgcgcactgtcggagagtggctctacaaacgctattgtgcgcaccagacggtgcgggcgcgttatcgtgaaaacagcatcattggcagtgagggcagcaaaaaaactgaaaaaagctatgacctctacattgaccgagccatggttgaggaggagttcgacacactctggagcaaacaggctcagctcaaccccgcgctgtttacagagcaggcacgcagcgatctcaaatactgcctgttgtaccaaaggcccttgaaaccggtcagaccagggcgttgtgtctttttgcctgacgaagaacgtgctccgctggccttgcccagtcagcaaagattccgtatttaccaggaggtgaaccatctgcgtgtactggaggaggggttgcgcgaaggagaaccgttggccagagcaaggcgtgatgcgttggtgcaagcactggaacgcggtaatcaatcatttgcttcgggtattcccaagttgctggggctgcccggaggaacccagttcaatctggccgatgtcaagcgcaaggaactcaagggcaatgccaccagcatggtgctgggcaagccgaggtattttggtgaagcctggtttcatttcgatgcacaacagcaagaccagatcgtcatgcagttgtgcaccgaagagaatgaatctgtgctgatacgctggctcatggaaaacacggccatcacgcaagagcgtgccctggcgattgccgatgtgcgcctgccagacgggtatggcagcctcagtgccaaggcactggcacgcattctgccggagctggagcgagaagtgcagacttatgacaaggccgccagggccgctggttttcaccacagtcgcctgggaggcaacgaagccatacccggtcgtaccttcgcctgggagcgagtggagccgagcactggtgaaatcaacaccttccatatcttccacgcactgccttattacggagaatttctgcaacgccatgttggatttgccgaccccaaagcctctgccgatgatttgccggaaaaacgttttgggcgcattgccaatcctaccgttcacatcggactcaaccagattcgtgtggtggtcaatgccttgctgaaacgctatggccatccagcggaagttgtggtcgaggtggcgcgcgatctgaaacagaacaaacagcagagggatgaacagcaaaaacagcaggcgcacaaccagaagcgcaatgagcgtttgcgccaacagattgccacagtcttgcagactgcaccggagcaggtgcggtttggcgatattcaaaaaatgattctgtgggaagaactcagcaaaaatccggcgcagcggtgctgtccatacagcggtattcccatctcgcccacgatgctgttgagcgatcaggtggagaccgagcatatcctgccattctcgaaaacgctggacgacagcttgaacaacaaaaccgtggccatgcgtcatgccaaccgcatcaaaggcaatcgaaccccctgggaagcacggcatgactttgccgcacagggctggagccgggaggggctggaggaacggagcagtctgatagagggcagaaacaaacgctaccgttttggggaagccgccatgcagctctgggacaaggagggcaaaggttttctggcgcgggcactcaacgatacgcgccacctcagccgcgtggccagagaatacatggagctggtctgtcctcaggccacgcgcgtcatccctgggcagatgacggccttgctgcgtgccaaattcggcctgaatgacatattgggcctgcatggcgagaaaaaccgcaatgaccaccgccaccatgcagtggatgcctgtgtgattgccgttaccgatcaggcactgctgcaacgctttgccaacgccagccagcgcaccgaagaaaaaggattgaatcgcttggtggaaaaaatgccagacccctggcccctctaccgcaatcaggtgaaattcgccattgaacacacatgggtcagccacaagccagaccacgcctaccagggggccatgcacgacgatactgcttatggcttgcaacccaatggccgtgttcgcacgcacaagcacgtggacggtcgccgggtgctggaagaaaaaccgctcaaagtcatcgaaatcagcgatgcacgggcacacgaacgccacggaacacagcccgatggttcgccccgcccgtacaaagggtacaagggcaacagcaattactgtatcgaaatcgtgcacaacgaaaaaggcaaatggcaaggtgaagttatttccacttttgaggcataccagatcgtgcgccaatggggggagaaacgactgcggcatcccagactgagcatcagcgaaaaaccgctcatcatgcgtctgatgatcggtgacatggtgcgtatccaggaaagcgaatggcttcgcaccctgcgggtggtatccattaattcagcgggtaatctcacgctggcagaacaccacgaagccaataccgatgccagaaatcgagattcttcaaatgcctggcgttacaccaataaagtggcaggctctctgcaaaaaagccgtgggcggaaaatcaccatttccccggatggtcaggtgcgagaccccggcttcacaggctgaccggcatgattggccgcattgtggaaattgccgatgacagacggcacctgtttgttcatcgcggtttcctggtggtcaagcagaccgatggcgagcggcaacaactggggcgtgttccacttgatgacattgccgccgtgattgccaatgcccacgcaatcacctataccaacaatttgctggtggcgttggcagagcgtggagtgccgtttgtgctgtgtgcggccaaccacaacgctgtcggaatgctgtgggcggtcgatggcaactacgaacagtcgcgtcgcatggaggcccagattgctgctagccagccgacccgcaaacagatatgggcggctattgtgcgtagcaaattgcaacagcaggccaacgccctgcaagccatcggtgcgccagacgcgccgttgctggccttagtgaaaaaagtgcgcagcggtgacccggacaacatggaggcacagggtgcacgccgatattggggattgttgtttggtggaggtttccgacgagaccagagtgcggatggcatcaatgccatgctcaactatggctacacgattgtgcgttcggccacagccagagccatcattgcggccgggctgcatcccagcatcggtttgcaccattgcaatgcaggcaacgccatgcgtctggtggacgatctgatggagcctttccgtccattggtggatttgcgggtctggcaattacagcggcaggggcaatgcagcgttactcccaacagcaaacgcattctggtgcatttgttgtatgaagacatgcagaccgctgccggagccacaccggtgacggtgtgcattcagaaactggcagtctctttggcccaaatgtaccttggggagcgtgacaaactggagctgcctttgagcagcctgccacttgaattgcatacacagggccagcgtgtaccgggtgaaggggcagatgatgtctgaggcccacttattcatgaacggttgcccaaccttgacggacagacgaggagtcgccccatgctttcaggatacaggttgatgtggatactggttatgtttgatttgcctgtggttcggaaggaagaacgcaaggccgccatggagtttcgcaactgcctgttggacatgggttttgagatgagccagttcagcgtgtacctgcgcttttgcaccagttcggcacaggtgcaaacatactgcaagcaagtggagcaggcattgcctagcgggggcaatgtgaacatcttgcagttcaccgacaagcagtatgaacgcatcatcagctactatggaaagaagaagcagccccagaaaaaaacgccagaccagtacgatctgttctgaattcacgcattttctgagaatgaaaaaacaataaacctctga

SEQ ID NO: 1872 - DNA, 14113 bp, synthetic construct
  source 1..14113: mol_type = other DNA
  misc_feature 1..14113: note = Synthetic
aacgaaagggaaggcaaacgaatttaccctttctaccgtaagtcccgtgcgcctcgtgatagcctactcgggcggacgcgattcggccgcgctccttacaattgccgccgcctcactaaagcaagcccgtcaaagtgagatttcttcgattacggctgtctatatcaaccacgggctttcggaaaatgcagacgagtggggtaagctttgcgccgagcaatgtaagaaacttgcgattccttttgaagaagtctgcgtctttgtctctcgggcttcccgacaagggttagaggctgcggcacgcgaggcgcggtaccgggcactttacaaaaaggccgtggaactaaaggctgatgccgtcatgacggctcaccacttagacgatcagctcgaaacgtttttgatttcctggatgcggggatcgggtcttgagggtctttcgtccttgccgcccatgcgcgacctggcgttcggaaaaggcgagcccgtaacgcttgtgcggccttttttacaaatcgagcgggaagcgattaatgcctacgtcaaatcgcagcacctcagttttgtcgaagacgagagcaacaccgatacgaggtacttaagaaacctcattcggaacaaggtgtttcccgttctcgccgaggcgcgcgaaggctggaaggaagcggccgaccgatcgattcaaaatatctccgctgcatcggacattctcaaggacttagcccttgaagatacacgactttgtttaaatgcaagtgatgactcactttcaattaaagccttgcggaaccttaccaaagagcgtcaggcactggtcgtacgcacgtggctcaaacacaacaagattcgctatccgagcaaggccaaactcaccgaaacactgcgtcagattttcgagtcggatacggacaccaaactcgctatccgctttgaaggaaaagagctgcggcgctggggcatgaaactaattttgacggacgccgtcggtaagcgtccgattgcggccctcgatcaagactttgtctggaaaggggaggcgtcggtaagtttccctgcctggggcgggtcgctttgttttatcccgtgtcaagagggggaagaaggctttgatgtcgatgcccttaaagcggggccccttcacctgcgcgcgcgtcgcgggggagaaaagctcaagctttacgccttgcgcccgagtcggaacctcaagcacctctatcaggctgcgaagattccgccctttgaacgcgtgaaattaccgcttctttggcttaatgacatgctcatttttgccgccggtctcgggagcgatataagacattttgctgagaccgatttggtacacaatcgcgttcgcttagtttgggtaccccataaaaacttgctcgattaagtaactttctgaaacaatttgccccgtggccctgattcgtgaaaggtttccgggttcgtccttaattctttttttgatgaaaggaggaaacctatgcacgatttaactgcatttgtttctaacttaaacagtgttctttgggggccgttctgcctgattcccttgcttgtcggcaccggcatttatttttcctttaagttgcgcttcgtgcaggttcgccgtttcggtcgagccgcatcctacgttctgcgtcacgtcaagtttttcggcaataaggccgacggcacgggtatgagttcgtttcagtccctcgcgacggctattgctgcgcaggtcgggaccggaaaccttgccggtgtcgcaacggccctcgcgatgggcggtcccggagcaatcttctggatgtggcttgccgcctttttcggcatggccaccatcttcgtcgaagccgtcttagcgcagcactttaagaccaaggatgcgaacgggcatgtcaccgggggccctgcgtactacatcacaaacggcttacattgcaagcccttggcgatgttcttttcggtggcgatcatcattgccttaggctttatcggcaacatggtgcaggccaattccattgcgcttgcctttgactttgccttcggcattccgccttgggttgtcggcgttgtcattgccctgattgccgcctttattttcatcggcggaattcgccgcattgcctcgaccacggaaaaaatcgttccgatcatggcgcttttttacctcgcgggcggcttgattgtgttaatcgagtatttcgaccaaatcattccggccttcgagatgattttcgtcggtgcctttaatccgactgcggcaacgggcggtgtaatcggtgcaagcgtcaaggaagcgattcggtacggcgtggcccgcggcctatttagtaacgaagcgggtatgggctcgaccccgcatgcgcacgccgtcgcgaaggtcgaccacccggccaagcaaggtcttgtggccatcatgggtgtctttttcgatacgttcgtggtccttaatatgacggcgctcgtgattttaagtaccggagttttggacggaaaaaccacgggcattgccttaacgcagcacgccttccaactaggtttaggctcgttcggttacggatttgtggcgatttgtcttcttttctttgccttctcgacgataatcggctggtacttttttgccgagcaaaacgtcaagttcctcttcggtccgcgctacgtgcgtccgtaccagtacatcgtcgttctctttatctttttaggctcgctcttgcaagtgaacctggtgtgggaactggcagacttatttaacggcctgatggtcattccgaacctcatcgccttaatcggactcgggaagattgcttccgaggccttaaacgattacgaatttcgatacatcccggaaaaattgaaagacgaaaagaccgcctcctaaacaggcagtctcgggcaaaaaggcaaccttcgggttgcttttttgtgcccggcgcgttcaaaataaggaacatgtttttctactctgataccgatgaaagaccgcgccacgctcgatttatttgaaaccgactctcaagacgacatgcgtcttcctgccggtatcgacgaagccgggcgggggccgcttgccggtcccgtctatgcggcggccgtgatattaaatcccttaaatccgatcgaaggccttaaagatagtaagaaactgacgcctgccgaacgagaggccttagccccgatcattcaagaacgagcccttgcctggtccgtggcctttgccaccgtcgaagaaatcgattcgatgaacatccttgaagctacgctccttgcgatgaagcgagccgttttaggactttcgattcgaccgaccattcttttaatcgacggcaaccgcatgccccatatgccgtatcggattcggacgattatcaagggcgatgaccgggttcctgaaatatccgctgcctcgattttggccaaaacggcgcacgatgcgctttttaagcgttatgccaaggagtatccgagatacggatttgagcaccacatggggtacgggacggccgagcacatggccgccatcgagcgtctgggcgttctcccgattcatcgaaagacgttcgagccgattgcctcccgcctcgccaaggtaaaaaagcgcagcgtatccggttaagtcctttcagggcgactcgtctatcgactataatcgacgaaatgcttctttttaatcaaatcatcgactatattcgatgatagattggattaagtccaaggaagaccggatgttaatcagtcgcccgcacctactcaaacaaattatcccgttttacgatgacggcctcgtgaaagtcatcaccggaatgcgccgtacgggaaagtcttcgttgctgcgcctcatagccgaggacaaaaaaaggcgagggggactgccggaaaacgccttcctctttttgaacttcgaactcctgacgctctcggaccttacggactatcagacgctctacgcctacatcagaaaagccatcgaccgttctccggcacgtttgactgtctttttagacgaaatccaaaacgtaccgaactgggagttatgcgtcaattcccttcgctcggaaaaccgctgcgatatctacgtcacagggtccaattccaagctcctctcaggagaacttgcaacgcacctggcgggtcgttttgtgcgttttcgcgtttttccgtttacgtttgccgagttttgtcaggctcgccaggcacaccgggccagacaaaccgatcaggcaatcgaccgcacgaccttgtggaacgagtaccttcttgtcggcggcatgccgggtattacagcctacgaggacacggcatcggcccacctgtatttgcgcgacattttcgagagcattgttcttaaagacattgcccaacgtcgaaatattcgacaaacccaccgtctggaaatgctctttcggtacctaacggagcaaatcggacatcgaatttccccgaaagccatcgaacagtttttgaaatcggaaaaaacctctttatcgcgggacacaattttggagtacatcgacgcgggatgtgaagccttcgcgtttgataaattaacctgtgccgacattaaaggcaaagaactccttcgctttcaatcgaaagttttcgcggccgatcacggctttcgcgaggctctcttcccgcagtcgaatctgcgtgacatcgatcaggtactcgaaaacattctgtgtacccacctgatgagccacggatggacgctttcaatcggtcaggccgacgggcgcgaagtggactttgtcgccgaacgcaacggagagaaacgatactttcaagtctgctaccttttagcaagcccggaaacggagaagcgcgagttttctcccctttatcaaattcaagacaattggcccaagtatgttctgtcgctcgatcccatcttgcgcccgcgagacggaatcgcacacgaaaatctcgtgtcgtttttgctccaagacacgtagaccgaaaaggcggcattaaaattaaggctttgctcctgctcgtttcgcaaaaatcgtgacgtaccctgttttaagtgagaaaaccgtggctcttggcaacaatcccacacttgtgattatcccggccgcaggcaccggaacccgcatggcttcggccgttccgaagcaatacctatcgctcggagaaaaggcgggttctgtccttgaagtctcggtcaaagccatgcagcaagcccttcccgaggcgaccgttgtcgttgccgttcaggcaggcgatgcggtgattgcgtctcaggatctttcgaatgctcaagtcctgacaaccggcggggcaacacgcgaagaaacggtctaccggacgcttttagccttaaaagacgattttcccgagaacacgctcgtttttgtgcacgatgcagctcgcgctctcgtatcccccgatgacgtgcggcacttaaaagacgttgcccttaagaccgtaaaagagggcaaagccggtgccgtccttgccatgcgacttcccgatacggtaaaacgcatcgaagaaaacggccttatcactcaggacattgaaagaaacggccttgtgcggattgcaacgccccaggtcttccccctgaaaacgctactaaccgcgttaacaaagaaccttaatgccacagatgaatcgagcgccgtacgtgcttgcggcggcacggttcgtgtcgtcttcggctcaccgattaactttaaaattacggaaccggcagatttacgcctggcgcgactcattttaggaaaccgtatgcccaagacccgaatcggactcggatatgactcacaccgctttgcagacggtcgaaaactcattctcgggggcgttgaaattgcctatgaaaaagggcttgccggtcacagcgatgcggatgttcttacgcatgccgtcatcgatgcgctgttaggggccgctcacttgggcaacatcgggctcttgtttcccgatacggacgcatcttacctcggcgctaactcccttcagttactcaaagacgttgtcaggcgcgtccgcgcggccggctggcgcgtcggaaatctcgatgccgttctgatcaccgaagctccgaaaatcaatccccatgtcgcaaaaatcgaagcaactttggctgcgaccttaggagtcaatcctgcagacgtcagtgtcaaacccaaaaccaatgaaaaactcggattcgaagggcgaggcgagggaatgtcggctcaggcaaccgttttgctcgaaaggatagaagcatgattgataataaaaaacattttcgcaaacgtctgaccgagttaaaagctctgtccgaccaagcacttcttgacctgtacggcaaagaacacaccgacaccgatgataaggcaatcaagcacatccttgccgagcgcggcgtagcgctcccggaaagtcagggcaccgtcacggaggatgagagcgccacgcgcatcatcgagatttcagaactcgcgggagccaagaccgaagagccgaagaaaacggggctgacgtggatggaaggggttcctatggtcgccggcatcctcgtgatttaccttctttactcgtactcgttctggctttcggttatcgggggactcctgacagccggggctcttttctggctctttcgtttcgtgcggcggcactggagacgcttaggcgtaaaagataccttcgcgaaagatctttaatcggatttcttgattacgtgtttttcctgcgtgacataccgtgacacccttcgcgccgtttaggggcgcgactgttgctgaagagattatttaaaagccgtagtaaattttgcacaaaaggatagtaaaacctatccttttgcgctatattgtctacaaacgaaacgaggaacaagccatgaagcactacgaaaaacttctacgattggggtgcttcacccaaaacgacatcgtccgctgtaccggaagcatgccctcggcgaagtggttgattcgagagtaccaaagggaaggctacatcgaacgcgtcaaacataatttgtatgttgcacgcagtttggaaacgcaacagcccgttttcaaccgttatcagattgcttctcaaatctctccgaatgccacggtctcataccacagcgcttttgaatgctacggatgcgccaaccaggtctactacgaagtgcaggtcacgagtgaaagccgatttcgggatttttcctttgacagcataacgtatcgccgtgttttgccccgtatttccggctttgtgacagaaatgcacggcgttcgcgtgacaacgccggaacggactgtgaccgattcaatcaacatgctcgggaaaatcatcggtcttgaagaactcctgcgttgtcttgcactgatgccggctctaaacgaagaggcgctcgtaaggtgtcttgccgagtacaggagtgcttttctctatcaaaagaccggctttatcctctcggtctttgccaaagaactcgacctctcaaacgacttcttttctctgtgtaaaacgcacctaccgaagggaaaatcctatttgtccgacgtaaatcggggctttgtgtggaataaagaatggaagttgtatgcgccggaaaacctaaaacacctgatggataaaggagtgtcggactatgatgctattggataatatttccataaatcgtaaagctcgtgaattaggtttcgtacgagacactttcgaaaaggtctgtcgtcttgccgagatattggactttattcaaaaagatgcccttctgtccgatattctggccctgaaaggcggaaccgccattaatctcaccatcttcaataacttgccacgactgtctgtcgacattgattttgactttgctgaaaatatctctcgtgaagaaatgctcgcagtacgagcacaaatcacggaccgtatcgggaaaaaaatgactaccgctgggtatcgccttagtcagaaatccaaaacgtatcatgcgcttgactcatttgtttatgagtacctaaattccggaggaatgaaagacaatcttaaaattgaaatcaactatatgcttcgttgccatgtattaatgccggtccgcaaacggattaatcttccgtggctagaagaagaattaacggttttaactgtcgacccactggaaatctatggcgcaaaaatcgtcgcgttgcttaaccgtgcagctcctcgtgatgtctatgacacgcacacaatgattgaacaggagacatttgatgagtcgcaaaggtcactattaaaaaagtgcgtcatattttatagcgccatagccacagatggcgtgcccactcgattcaatttcaatcagattactacgatgaagtaagtggacgttaaaagagatctcctaccagtgcttcgtcgtaacacttggtttggtgcacaacaagaatgtaaacagattatcgactacctgtccgagttactacgacccaacaaacaagaacttgcttttttgtcttcgttcgaccagcagaaatatcgaccagaacttctttttcaggacaaagatatcctctcgcgtattaggcaacatccgatggccctttggaaatgtagggacaggctgcaaactttgcaaaccccgaaaaaatgaccgaaatagggggtttcactgcaccaacagcacggcaggctttcgtctctcaatggactcaagagttagttttactcaataggaaaacaaaacctatcttttcgtgctgttttgcctatcggtgttaggacgcgagcatctgcgcgagaatcccacgcgtcacaagaatcggattgtcgggtcggaaatccgctgcaagcgcctgcgtaaaaatcgtctttttcccaatcggcgcgtgaacaatccggacacctcggttattcgacattcggatgagcacatcgctaccgtcgacgacgaactttccgttcagtttcacggcgcattcatgcacaccccaggctttgtaaaaggccgtcaccttttcttccggcgggaaataggataaaaaaaccggaccgaaacagcgctcggcaatcgcctcaagcgggcgatcggcacgcaaaacttctaaatcaatcgccacgggagcggtcgcaagagccgctccgacaaacgttgccgtgtgagaaatcgtggaataaagggggctgtcggataaaacaatcggcgagaagggtgggttttctcgaaattgcaccgcaagacctcgcaccttggccagggctaccagcaaaaggcgcgtccagagaaagtccgattgtcgcttcggacttaaaaaactctcggcgcggtcaatcacgtccggcaaaagatacgtgagcaacccggcatcgggtttggcattgattcgttcgagataaatgcaatcgcaaaaggggcgaagcgtcataacgcagatatgttctttaaaggcaacgcggcatgatatccgcatttgtcattttccgacaggggaaggagaccgattcctaagtcaaaactaagatttcgtgacaaacaaccctttcaaacatggctatttcgtgacaaaagacctttcataaactcaatattacgtgacagccacctggttttcccatttaaaaccaagcaaattcggctcgctaaagacaacttatcaaaaaggtctatgagtacacaaggactcctattcccaaaaattacccaaattttgagatttaattcccaaaaattagccgaattttgggattacaagaagtcatcgacttacgtcgcctaaaagcgcagagccgctttgacgtaagcattgtcctagtttcgaaacacacaatgatttgaaactgagaattatcctgtattgaaaaaaaaccgagacaactgcatcttcttccgatatagtgcattgtcaggaaaaggaccgttatctcgattttttcaattcagtatttagcgtatgggaatcgtggtttgctctccgaaaaccaagatgctttggatacgaaaaagggtcgcatatagcgaccccgcatcttgtgctctctcagcttgttagtggagaaagcccatttcctaactgactgcgacgattttatctagaggacgatgaaaatgcaagactctgtctcaaaaatgaaatacagactcggaatcgaccttggaaccacttccttgggctgggctatgttgcggcttgacgaacaaaacgaaccttacgccgtaattcgagccggggttcgtatctttaataacggtcgagacccgaaaacggaagcctctttggccgtagcgcgccgtcttgcacgtcaacaaagaaggactcgtgacagaaaaatcaggcgtaaagaacgccttatcggggagctggtggacatggggttcttcccgaaagatcccgttaaacggcgtcaactcgcctcgttagatccttttaaacttcgaactgaagccttagatagggctctttctccagaagaatttgccagagcgattttccatttagccagacgacgcggcttcaaaagcaatcggaaaacagattccggcgataccgaatcgagcaagatggaagaggctatcaaacgcactttaaatgaactacaaaacaagggctttcggaccgtcggtgagtggctcaatatgcgccatcaacaacgcctcggcacgcgttcgcgcattaaaaatgtccccaccggttccggtaagcaaaccaccgcatacgacttctacttaaatcgattcatgattgagtatgaatttgatcgtatttgggaaaagcagtcccaaatgaatcccggccttttcaccaatgaacgcaaggccatcttaaaagacattatcttttaccaaagaccccttcgtcctgtggaacccggacgttgcacctttatgccggacaatccacgagcaccgctagctcttcctcaacaacaagactttcgtatttatcaagaagttaacaacttgaggaaaattgacccaacctccctgcttgaagttaacctcacgctgcccgaaagagatcgaatcgtcgaattgcttcaacgaaaacctgctctgacctttgatgccgttagaaaggcgctttgctttaacggaacatttaatttagaaggagaaaatcgttccgagttaaaaggcaatctcacaaactgtgcgctcgctaagaaaaaactatttggagaaagttggtattccttcgatgcccataaacgatttgaaatcgttgaacatcttttgcaagaggaatccgaagaaaacctcgtttcctggttgcaaaaagaatgcaatctttctgaagagtatgcaaagaatgtcgcttccgtgcgactccctgcaggatacggagccttgtgtcaagaggccttagatttaatccttccatatctgaaagctgaagtcatcacatacgacaaagcggtccaaaaagccgggatgaaccacagcgaactgacattagcacaagaaaccggtgaaatccttccagagcttccttactacgggcagtatctcaaacgtcacgtgggtttcgggaccgggaaacccgaggattccgcagagaagcgttacggaaaaattcccaacccgacggtacacatcgccctcaatcaattgaggaccgttgtcaatgctttaatccgcagatatggaaaaccgacccagattgttatcgagcttgctcgagaactcaaacaaaacaaaaaggcaaaagatcaatatcgaatcgagatgaatcacaaccagaatcggaatgaacggattcgcgcggatatttcgatgattctcggaatcaatccagaaaatgtgaaacggaaagatattgaaaaacagattttatgggaagaacttaatctgaaggacgcaacggctcgttgttgtccatatagcggaaagcaaatcagcgcagaaatgctttttaccgatgaagttgaaatcgatcatattctcccgttttccaggactttggacgattcaaagaataataaagtcgtttgtatccgagaagccaaccgcattaaagggaatcgaaccccttgggaagcacgaaaggattttgagaagcgaggatggtcggtagaagcgaggatggtcggtagaagcgatgacggcacgcgcccaagcaatgccgaaagccaagcgatttcgcttcgccgaggacggatataaagtttggttaaaagatttcgatggcttcgaggcacgcgcgttgacagacacacaatacatgagtcgagtcgctcgcgaatatcttcagttaatttgccccggtcaaacctggtcggttcccggacaactcaccggaatgttaagaagatttttagggctaaatgacattttgggggttaatggtgagaaaaaccgcgatgaccaccgccaccatgccgttgatgcctgcgtgattgccctcacggatcgttccatgttacaaaggatttcgacggcaagtgcgagggctgaagataaacatcttactcgtctgttggaatctttcccggctccatgggctacgttctatgagcatgttacccgcgccgtgaaatcgatttgtgtcagtcacaaaccggagcacgcctatcaaggggccatgaacgaacaaacagcctacggcttaagaccggacggatatgtcaaatacagacaaaacggaaaagttgaacataagaagttaaatgttatccctcaggtatcggtcaagggaacctggagacatggtcttaactctgacggatcattaaaagcgtacaaaggactaaagggaggaagcaatttttgtattgaaattgtaatgggagagggcggtcgctgggaaggcgacgttattacaacatacgaggcctaccaaatcgtactggcgaaaggagaagctgcgctttatgggagtgtgagtcgttccggaaaaccgcttgtaatgcgcttgatgcaaaaggatatcgttgaaatgactcttgcggatggccgatgcaaaatgcttctttacataatcacccaaaacaaacaaatgttcttttaccgcatcgaaaatgccggcggtggaagagaagatgtttccaagagaccaggatccttacaaaaggcacttgcgaaaaaaatcatagtctctccgataggggatttccgtaaggaaaaattatgattgggcggatagtcgaaatatcaaacaacaacagatatctatccgtgtatcgagggtttcttctcgtgaaatcactcggggaagaagcgtccgaactcggaagaatcccgctggacgatattctggccgtggttacgaatgcccacggcttgtcgtactcaaacaatcttctggtctctttacttgaaagggatatcccccttgttattacctcggacaaatacgttccgatgggcattctttggcctgttgaaagtcatcaccttcaagctaaacgtatggatgcgcaaataggagccagtcttcccctaaaaaaatcgctatgggctcaagttgttcgagaaaagattcgtcaacaatctctattgcttcatcatctgggattgccttcgtctcgattagacaggcttgccaaagaagtaaaaagtggcgacccggacaacaaagaagcaatggcggcacggatttattggacttcgattttcggcagcaatttcctgcgaaacagagaggctccgggcattaatgcattactcaactacggatacacgattattcgatccgcgactgcacgcgccgtcatggctgccggcttacatccgagtataggaatccatcataagaatgcctctgacgctatgcgcctagtggatgatttgatggaacctttcagaccgttagtcgacttgatggtctttagcctgacaaaagagaatccgagtgccgaatggtctatatccaccgaaataaaaagaaaactcgtcagtattttattttggaatgttctttttgaggaagatcagtgccctgtgatggttgcgatgcaaagattggcactgtcactttcacaagtgtatttgaaagaaagagtccgtcttgcattcccgaaatcatttgaatataggaaagacatggctgaagatgatttcgggatatagacttatgtggacccttgttatgtttgaccttcctgtcattacaaaacatgaacgtcagtgtcaagcgtcctctgaattgacccccgaaaacgtcgtttaaattgagcccctgttgttaatcagtcaaagctgtaccaacagccctgg

SEQ ID NO: 1873 - DNA, 13945 bp, synthetic construct
  source 1..13945: mol_type = other DNA
  misc_feature 1..13945: note = Synthetic
cgtggtttgtactccgtgatccgccaagtcatgatgcaagcgctcggcattgtaggtctctcgtgtacgttggtgtgcggccagtatttctattttcagtcttgtattctcctgcttacgtttacagaccgggcgagtcctttgggcatgaaagccgctctcggaaacatcaaatgcccggcacatgagcgaaatcggatatttttgtctcatcgattcaatcagaccctctttcaccaccaaatgtaacaactaagcttcgcgaaatacgtcacacattttttataaaatcacgctccatcttgacttctgctaattcacgtttaactctggatagctctaactcaagttcagacagcggcttctgatgcttgcctaccaatgcaagttctcctcgtttgtcagcataaacccaattctttaatgtgctttccggtaaagaaagccgttttgctgcctcaaccaaagttaatccactttctttaaaaaacttaactgattgctccctaaattcctggctatattgtgcgcggggtaattccatctccatcctccatttcatgttcttattttatgaaacttcggactccttgaaaatcagcatacctcaaccaaccggtatgaacagcgctgatcaaaaaataaaggccgcatgtagcggccttttcatttggtgcatctttctgcttgttagcgttcagagcacaaatcccaataaactatttcgttgcatattctactcgaggtaactagaataatcaataaaatcatatagaaaccttactttcaaccggagaatacaccatgctgcataagatgcgttatcgcctggcacttgatttaggatcaacttcactgggttgggcaatggttagattgaatgccaaccagcaaccttgtgcagttatcaaagcaggggtgcgtattttctcaaatggacgtaatcccaaggacggttcttctttggctgtaacacgacgtgaagcccggagcatgcgccgccgccgtgaccgcttgctcaaacgcaaggcacgcatgatgcgcacactcatcgaatatggttttttccccgttgatgaaacacagcgcaaagcactggaaaacctgaatccctatgcactacgtaccaaagggttggatgaagcgctaaccccttctgaatttgcccgcgcattgtttcatattaatcagcggcgcggcttcaaaagcaatcgcaaaaccgataaaaaagatagtgatggtggcgcattgaaaactgcaatcaaacaattacattcagtcctcgatccgcagggaaataacggcaaacctcgaacagtaggcgaattactttacaagcgttttaccgacatcagtaaactgccgaaggaccgcacagtacgtgcccgctatcgtcaagacaaaaccgtcaaagatgacggtaagaccaagatcgataaatattatgatctctatatcgatcgtgccatgatcgagcaggaattcgatgcgttatggaagaaacaatctgaactgaatccaatcttgtttacagaaaatgctcgagccgatctgaaagatgttttgctataccaacgttcgctcaaaccggtcaaaccgggacgctgcactttcatgcccgaagaggaacgcgcaccactggctttgcccagcacgcaacgcttccgaatgtatcaggaagtgaataatctgcgcatcttgcgtgaagggttgaaagaagaatcattgacattgcaacagcgcgacgatctgatcaatgtgctggaaaaaaacaataggcgtacttttacgcaaatcaagaaattgcttggcgtgggtggttcagtccagtttaattttgaagaccccaaacgtgaagaacttaaaggcaataccaccagcgccattctcggcaaatcggaacattttggcgaagcctggttcgcattcaatgaagccaagcaagatgccatcgtactgcaattgatcaaggaagaaaatgaagccaaacttgttcgatggctgcaagatgagacaggtatcgatgaaaaacgcgctgaagttattgccaataccggactgccggaagggtacggcagcttatgtatcgaagcgttggcacgtattttgccggagctgcgtcgtgatgtgatgacatacgataaagcggtgcaagttgccggcttcgagcatcatagcaagctcaatcggaatgaagaaattcccgatattactttcaaaattgaaagtatcgatcggaactccggtgaaatcaaggaattccaccttcataaggaactgccttattacggcgaatatctgcaacgtcatgtcggctttggcagcggcaaaccggaagattccattgaaaagcgttacggcaaaatcgccaaccccacggtgcatatcggactcaatcaagttcgcgttgtagtaaatgcgttgatcaaacgctacggacaccccagtgaaataattgttgaagtggcacgcgacctgaagcaaagcaaagatcgacgggatgaagaaaacaagcggcaagccgagaatcagaaacgtaacgaacggctgcgtaaagatattgcggacattctgggaatcagtgaagaacgtgtacgtcgggatgacattgagaaaatgattctgtgggaggaacttagtttcgatcccgcggatcgccgctgcccttattccggcgttcaagtgagtaccgtcatgttgttaagtgatgaagtggaagtcgaacacatcctgcctttctcgcaaacactggatgacagtctcaataataaaaccgtggcacttcgccaagccaatcgcatcaagggcaatcgtacaccttgggaagctttcggtatatcagatatcttggggtttgactatgcagggattctaaccagagctgaattaatgcccaaagcaaagcgttaccgcttcgccgaagacggttatcaacgctggctaaaagacgatgcgggctttctggcgcgcgcactgaacgatacgcgccacttaagcaagattgcacgtgaatatatgagcttgatttgtcccaatacgcgcgtcattcccgggcaaatgaccgctatgttacgccgcaattttggcctgaatgatgtactcggattaaatggtgagaaaaaccgcaacgatcaccgtcaccatgcagtggatgcctgcgtaatcgcggtaacggatcagggcttgttacagcgttttgcagcagccagcgccagtgcgcgtgagcggcagcttaatcgccttgtggaaaatatgccattaccgtgggagagttacagggaacatgtccagcgcgccattgatgggatttgggttagccatagaccggatcacagccatgaaggggccatgcataacgatacagcctatggtttacgaggtaatggcagagtcagtttctataaagtagtggatggtgtgcgcgaatatgttgaagagaatctgaaagttattgaaattgccgatgcaaaagccgcaaaacggcatggtctgcttcccaccggcaaaccaaaaccctacaaaggctacaaaggtgatagcaattattgtattgaaattgtccgtaatgaaaaaggccgctgggaaggtgtagtgatttcaacctttgaggcttatcagttggtgcgtaagcacggtgcggcacagcttcagcgctccggtttgagcattagcggaaaaccattagtaatgcggttgataatcgacgatacagttcgattaaatgttgatggacaatctcgcacaatgcgaatagcgaaattaagtggtaacggacagatcttcatgtctaacataaacgaagcaaacgttgatgcaaggaatcgaaataaggaagatccttttgtctacatttccaaaatggcaggttctttacaaacagccaaagcgcgtcgaataaccatttcacccatcggcgagctccgtgatccgggcttcaaggaataacccaaatgatcggccgtatcgttgaagtagcggatgaccggcggcatctgtttctctctcgcggtttcatggtggtcaaagataccgagggggaacgcaaggaattagggcaaatacccctggatgacattgcggcggttatcgccaatgcgcatggcctgagttataccaacaacctgctggtggcgctggccgagcgttgcgcgccgtttgtgctgtgtgctgcgaatcataatgcagtgggtatggtgctgacgatcgacggtaattatcagcaagcaaaacggtttgatgcgcagcttgctgccagtcaaccgctcaaaaagcggctttgggcagacattgtcaaatccaaacttcagcagcagtctgacgcgcttgaggctgcgggagcaccatttattccgctgcaagctttggtgcgcaaagtacgttccggcgatccggataacttcgaggcgcaaggggcgcggcgctactggggacttctatttggcgatgatttccgccgcgatcagcagagtgatggccttaacgctatgctcaactatggttacaccgttttgcgcgctactaccgcacgtgccgtggtagcagcaggattgcatccgacaatcggattgcatcacagtaatgaaagcaatgcgatgcggctagtggacgatttaatggagccttttcgtcctgttattgatttgaaagtctggcagttgcatcaacatggcgaatcccaggtgacacccgacagtaaacgtgagttggtcagaacgttatatgacgatatgcaaactagtttgggagccacgccgttgatggtctgtacgcaaaaacttgccatctcgctggcgcaagtttttatgggggaaagaaataaaatggacttgcctttgccagggctgccgctcgaccttgctgcatcatttctggaggattaacgtgctatgctttcgggatatcgcttaatgtgggttattgtcatgttcgatttacctgtcgttgaaaaagctgagcgcaaagccgcgacagattttcgcaatactctgttggatatgggttttgaaatgtcgcaattttctgtctacatgcgtttctgcagcagtcaaagtcagatcgatacatattgcacgcaagtagaaaaaagcttgcctacaggcggcaaagtcaatatcttgcaatttaccgacaagcaatacgaacgcatcattacttttcgcggaaaaagcaaacaagcaagcaaaaaatcacccgaacaatatgaacttttctgacaaatatcatgatttcttcactggcatgcacattaactcctctaataatcatggagttaatgtgcagctagtttagcatattgggatttgtgctctgaccggaacgtggaagccgattgatgacaacaccccgaaagtttagcatattgggatttgtgctctgaccggaacttgtattgcgtgcaatagcagccaagcttgagtttagcatattgggatttgtgctctgaccggaacttgccactgcatcgcctgccggatttaattagtttagcatattgggatttgtgctctgaccggaacaagtttagccataaacacaaaagcagcacgagtttagcatattgggatttgtgctctgaccggaactaatttgacaccgactcaagttgccaatgcagtttagcatattgggatttgtgctctgaccggaacggcacctccaagttgggagctggttttggaagtttagcatattgggatttgtgctctgaccggaactgataaagtgaagccggtacatgcaataccgagtttagcatattgggatttgtgctctgaccggaactcacacaccaaaattactttaactgactttagtttagcatattgggatttgtgctctgaccggaacaatgagtgtgtatggtaaatatgaatttgcagtttagcatattgggatttgtgctctgaccggaacatatgcgacactggaaacgttttatcattaagtttagcatattgggatttgtgctctgaccggaactcagcagagtagtttagattctcttccgttagtttagcatattgggatttgtgctctgaccggaactacattgttggccatatataagggtagcgcagtttagcatattgggatttgtgctctgaccggaacctctcatggcttccggttttcttgcccctgaagtttagcatattgggatttgtgctctgaccggaacttagaagccggatgattgcttcatgtaattagtttagcatattgggatttgtgctctgaccggaacaaagatgaggaagcgcttaatcaattaccgagtttagcatattgggatttgtgctctgaccggaacagccgctttgtttttgtgagagtacaggcaagtttagcatattgggatttgtgctctgaccggaaccgctacctgatccaccaatgccgcgctttcagtttagcatattgggatttgtgctctgaccggaacctggaaataagtgggttctatcagtgacagtacgagcattcaaaatatgactgaatcaagcgagcagagtgaggttaatatgagttattcagatttatttgagaatgataataagaatcgtttgcaattataaaaattattgtgtaatatgcgaactgtccatcagttagtgattggcataccgcagcaaccagcgcattccctcgcgtagtcggatggtagcaaattacatttcttgttcttccttgctgcgtgaacataagccctcacgcatcacttgcccggcacattttcctctcttccttttaatgtgccgggttcctttttggtatccgtgtggtgttttcagtaactcgatcatgatcttccctgctctccggttggtttcgtttcccgcagatggcccaccagtccgcgtaagatagttccgggctgttgcttaaagaggagtggttgtcgagtggttcgtggaagtggtgattgagtacaagctatgcagtcctacgcgcgccgattggcgtcctgggtcattcgtcatctatgtaagtagttggtcagaggatcgataatatatggcccggatctattcgaagccaatccggatttacccatgttgctagctgagggcaaaggatgcgccgacatcggcaacgagtatctgctgaaacacactaaaaaagtatatgtgtgtttgcttggccaagtgctacccaagcagtcatcagcgttctgaccggaaccaccgtcgattttaatcgacggtggttggttgattccattatttaggtacctctggagctgcttccggcgctggttgcgtttctgtcacgaaaatttccacgcggcgattttccgctctattttcaggtgtgtcattctcagccataggttcacgggagccgcggccatcaatttgaatgcggttaatcgatacccctcggcttgccagataatcgcgcgtgctggcagctcgattaacggataatggattgttgattgcatcgctgccggtattgtctgtgtgaccgatgattttgacgactgtgccttcattactaatcagggtagttgcgaaattatcaagaatgggtctgaagccgggtttgatgtccgcccggccggtgtcgaaggagatgtcgctgggaatatttagcttgaggcgattgtcttcagtttgcgtgacttgtacgcctgtacctgcagtggctgtttccatttcccttttttgttcttccatgcgctgtgaccacatataaccggcgccggcgccaagcagagcgcctgagcctgcgccaatggcagcgcctttcttgcctccaatcagtgcaccgatcgcagctcctgtacccgcgccaatcgcggttccctgcgctgtgccgcgttgcgtgtccgtcatcgttgcgcagctgctcaacgtcaggattagggctggaacaattagaattgaaagaattttcattggtatctccttgctgcgttatttcgttgtgcaatagctgaaaaagctttcagattactattgcgataggatttagagagcataaccacccatcaggatatttcataggcaatgatgaatatcggatcagtaatacaattagattttacattgaaataccaataagttctcaaattgtatcattgctgatgcatatctgatttagcggtatctgcattttttgctagatatgctgtgccggagaaattctgatttcttctatgcggggattcggttccactgaagttgcagcgaatgtgatattgattttgtcaggctccgatatacgcgcaagctgttcgataaaagcaagatattccgcatgggtttggaaatttttgctggcatcggtagttgcaaattgaatacgccagcatagatgatattgatccgacgcgattaatgcccaaccagcgaaaacctggcgtacacctggaatcgcgcataatgtttcgcggcttcgttcaataaaggtgtctatgtgttgcaaatagcgttcttcaacattgtaagcaatgatttgttctacaggctgccaaacacgacactgaatcaatacttctgcagcacgaccggccgagccccaatggtgcatgcataagctgacttgttccagaaggttattcttaacatcgtgcatcgtttctatgtagccttttttagcacgtgtttgaacgttggaacgaatggtggcagcagcaatatccgaaagctctgtgtagcagttgattttagcaacgccatttagaatcagcttatggtattgatcctcgatcagtccgctacctccatgcagtactaacggaatcccaagctcgtcattaattcgtttcaagcgcttgaagtccagtttggctctattactttggcgaccatggacagtgccaatggaaaccgctaaggaatcaactttggtgcggttaacataaactttggcttcttctgctgaggtataaatgatctcgcctaaatgattgatagcattttccccttccgtaccaccgacaaaaccaagcattccttcaatcgcggcaccacttgcgtgagcgatctctgtcgcgcggctggtttgagcgatattgacggtaaatgcttctgaagatacatccagcatgacactattacagcccagattaattgcctgaacgatggattcgtgctgttttgcgtgatcaaagtggattgctaccggtactttagccagttgtgccgcacgttcaactgccggtaagattaatctgaaatcatgctcgccgaagagcggctgggaaagattgataatgacaggtgaacgacagcattcggctgccatgataatagcttccaggaaatccagacttaccaatccgaaaccaccgattgcgtagttattctgataagcatgctgcaacatatcgcgcatatctacgagtggcatttatttcctctctgttttaaggggcttgtattactatcttaaatcaatcgtaagtgtttccagtgcagtgctcaaatcatccagcgcagatcccataataagaccggcgcaactatgatataaccataattcacagcccacaggacgatgtagattgctacgcgcatgtatcttaaattcacgccaggccagaatagggcgatcctcatcgttactgtccacacataaccactcggcattatccaggatgacttccaatccacgatgctgccgcaatgtgatgcgcagtggatgtcctaagcgcagaagcgcaagcctcccgcggttataacacaccgcatctatcttttttgggaaaatgcgccagggtcgaatcagcgtttccatcgctatcaagattttgtttcaaatttttatcttatcaatctgcttttttggctttgggtttactatcaggcgttgcttcaagaaaaacgcgactggcgagaatatcttccgcttcgagcgtaatgagatcatttttggacaatgatttcttggttccggaaaataaacggtttgcctgacgtagcctcgcccgatcaagagcgttgcgaaccgagcgggcgtttgcaaaatgctccgatttcatacgcaagcggatatattttccaaaagcctcttccccggctgtgctaaaacagtaattctgggtttccaacatcaattttgcgatcgaaactagctcgtctgcaccgtaatcaggaaagtcgatgtggtgcgcgatacgcgaacgcataccaggattgctatgaaaaaatttatccatgcgatctttataaccagccagaatgacaaccaaatcttcgcggttattttccatcgtttgcaacagaatttctatggattccgcaccataatcacgttcattctctggcttatacaggtaataagcttcatcgatgaaaagaacaccgcccatcgctttctttatcacttcttttgttttgggtgcagtatgtccgatatattgaccaactaaatcgtcccgggttactgaaaccaggtgaccctcacgcacatagcccaagcggtgcaggatttccgccatgcgtagcgctactgtcgttttcccggtgccggggtttccggtaaagcacatatgtaaactgggggcgcccgcggataatcccagttgcttacgaacacgatcgaccagcaacaatgctgcagtctcacgaatacgagtcttcacaggaattaagccaatcaactcacggtccagtttatccagtacttcttggatatttgtgttgcggaactctgcatccagatcaattgatggatctttggatgaaattaagtttttagattgcttgggcatgtttgatcacttattgaggtctcatgggataatgcttaaataactacatcatattaataaatcttttaatgacttccatttaatactagcatgtttgatttgttaactcatttctctctccctctcaggagagagaagatttactttttactgctagtaacgttctgcttccggtttgtcggttgcataggaatgaatggtgtaactaacgcttcgtccggcaccttcctggcgtactaaactaaaccctggttctttcttgggtcggttaacaatatacgacatggttggactttccacgccgcgtgtcgagttaaatgcagtcacgcgaatatagtggtttggaaaagttttgcggcaactattgatttccagcaaaattcctgccggatccttcaaatcaaacatgggattgccgaacatttcccaataggtattgcgtggatgaggatcatcggtatattcaattcctattgcccagccatttttcagcgcgtacttaagctgtgccgagatttgcttgtcggtcagcgggggcaggaaagaaaattgtccctgtgtaactatattaccttgattagtcatcataattgcttctcctgaaaagattaagcgtttgcagttgtggaaggcacaaagtcagcggtatctgtggagtcgtaattaaaggtgatatctttccacgtatccaatgcttgtttgagcggcgtgcaccatttcgctgcatctgcaagaatttgcgggccttcttttacgtaatcccgaccttcattgcgcgccataaccatagcttcgagtgctacacggtttgctactgcaccagcctgaatgccttgagggtgtccaatggtgccgccaccgaactgcagtatcacatcttcgccgagataatcgatcaactgatgcatttggcctgcatggataccgcctgaagcaaccggcatacatttattcaatgatgcccagtcttgatcaaagaataatccatgttccagacttttttccgtatttgtttcacgtaaggtatcgtagaaacccttgatcataagcgggtcgccctcaagcttaccaacaactgtgcctgcgtgaatatgatcgacgcccgccatacgcatccacttacaaattacgcggaaattcatgccgtgatttttttggcgtgaataagtcgaattacctgcgcgatgcaagtgcaatatcatgtcgttcctgcgtgcccattttgccatcgattgaatcgcggtataaccgatcaccaaatcgatcatgacaataactgaacccagagactttgcaaactctgctctttcatacatgtcttccatggtgccggccgtaacattcaaataatgtcctttgacttctccggtagcggcagatgctttattcactgcttccatgcaatacagaaaacgatcgcgccaatgcataaaaggttgtgaattaatattctcatcatctttcatgaaatccaggccgcctttgagtccttcgtaaaccacgcgaccataattcctgcctgagagacctaatttaggtttagtggtagcgccaagcaagggacgaccgaatttatccaagcgttcacgttcaaccacgatacccgttgcaggaccttggaaagtttttaggtaagccacaggaatgcgcatatcttcaagacgtagtgctttgaccgctttgaaaccaaacacgttaccgatgatggaggcggttaagtttgcgatcgagccttcttcgaataaatcgatgtcataagcgatataggcaaagtattgcgcctcattattggtacccgggcctgtgttaggtaccagctctgacttatatgctttggcacgataaagctcacaagcggttagtcggtctgtccatactacggtccaggtcgcggtggaagattcaccagcaactgcagctgcagcttcttcatgatccacgccgggttgtggtgtaatacggaacatggcgataacatccgtgtctttgggtacataagcaggttcccaataacccatttttttgtacggaataacccctgattggtaacgttctttaccttctttcatcgtttgtgaagccatcatattctccaggtaattgataaaaaaccacgctatatacttctagttaggaggtgcgctaacagcgggtcagacatagtgtagaattgctgaatgataaataacaatcaattgtttcgatagttataatagacttctctctatatattacatggaaataccgggggctttatgcgtcatagcacgttacggcagcttgaggtttttgaggcgattgctcgattgaagagttttacccgagcagctgaggaattatttctgacacaaccgacagtatcgatgcaagtcaagaagttgaccgaagagattggtctgccattatttgagcaagtcggcaaaaaaatctatctgaccgatgcgggagaagagctttatcgaacctgtctgggcatttttgaccatttctcacgtttcgagatgattgcttccgacatgaaggggttgaaatcagggaagcttcggctcgcggtagtgaccactgcaaaatacttcgtgccgcgattattggggatgttttgccagaaataccctggcattgacgttgcgctgaaagtgacgaatcgcgagcatatcctggagcgattaaccggtaatcaagatgatctctatatcttaggccaaattccggacgcagttgatgcggtggcggaaatttttttggataatcaattggttgttttggcatctgctgatcatcccttggcaactgaaaaaaagatccccatcaagcgcatttgtgatgaaccttttattatgcgagagccaggttccggaacaagaatagcgactgagctttttttctcaaaacataataaaaaactgaaggttcgcatggagttaggtagcaacgaagcgattaagcaaaccgtcgcaggcagattgggtattgctgtattatcgcgacatacactggcactggatgcgcagataggtcagctggcaatactggatgttgaggggtttccgattgaacgccattggtattttgcttattcatccggaaagcagttgtcgattgtcgcgcagacattcttaagctatttacggcaggctaataatttgctcgataacatgacatgccgccatatgacttccgggcattgcccactattggaaaatgagacaagcataagatccggtg

SEQ ID NO: 1874 - DNA, 13117 bp, synthetic construct
  source 1..13117: mol_type = other DNA
  misc_feature 1..13117: note = Synthetic
tccacaaccgcgagcgcgtcttcctgctgtccaccacgcacggcgccgaaggtccgagcctggccgccggcatcgagaccatgcgcatctaccgcgacgagccggtcatcgagcacctgtaccgcgtgggcgaccgcctgcgcgccggcttccggcaggtcaccgccgatctgggcgtgagcgaatacctgggcattgccggccgcggctgcaacctgctctattccacgcacgaccacgagcacaaaccctcgcagccgttccgcaccctgttcatgcaggagctgatccgctggggcgtgctggcccccagcttcatcgtcagctacgcacacagcgatgccgacatcgaccacactatcgaagccgtggcccgcgcggcgaaggtctacaaaaaggccctcgaagccggcagcaccgatggtctgctggtgggtgcgcccaccaaggtggtctaccgccggtacaactgatccccgctgcgtccctccctgccgtgcctgtcgtgcaccggcggggcagggcaccccggttcaaccggtaacgcccgcctgcatcacagcatggcgggcgttgctgtctggtcgggcgttggtgccgggtgaagctgctgccggggcggggcatggcgaggggcgctgctgctgaccggtgatggcgtcatgatgcctggcgtagtgatgcccaaatatctgccatgcatgcaaaaaggccggttcctgcgggataccggcctttttgcatgatgggctccgcccatcagggcggaacgtcacggatttaccagcttaccagcttaccagcgcttccacggcgccttgcccgaggcccacagctcttccagcacgtgcttgtcgcgcagcgtgtccatcggttgccagaagccggtgtgacgccaggcttccagctggccatcggccgacagcgaacgcatcggctcctgctcgaacaccgtgtcgtcgccctcgatacggtccagcaccttgcggtccagcacgaagtagccgccgttgatccaggcgccgtcgccctgcggcttttccatgaacgactcgatgcgcgtctggtcggccggcaggctgaaggcaccgaagcggcccgggggctgcacggccgtcaccgtggcctcgcggccgtgctgtttgtggaaggcaatggccgccgtgatgtccacgtcgctcacgccatctccgtaggtgcacaggaaggtgtcacccttgatgtacttggacgcacgcttgatgcggccgcccgtcatcgaatcctgccctgtttcgaccagcgtgacattccagggctccgactcgttgcggtggatctgcatctcgttggtgcccaggttgaaggtcacatcggcgtgcgagatggcgtactcgtggaagtactgcttgatcacgtggctcttgtagccacagcagatcacgaagtcgttgatgccgtgcgaggcatagatcttcatgatgtgccacagaatgggctgcccgccgatctcgaccatcggcttgggacgcaccgcgctttcttcgctgatgcgggtgccgaagccgcccgcaagaatgaccgcttgcatggtgagaatggtcctcagtgtcaaaatgcagcgggcatattcgcgtgacgaacagaaaccgtcaaccaaaaatgacacacggacgatacggcctgccgtcaggtccggagcaatatgcatttgctcacaacgcgatacgatattttggtgttgtatttttgccgcatgcctgcctggcgcgggtaatcgttcggggccggcacgccgctcgacggatggtgaagcccgtctggcgcccaggtctgttcggtgcagacgctctctgggtggcggtgtccgtctggtcccggtgttcgtctggttcctgcgtccgtggtgtccggtctggtcccggcgtctgttcagtttcagtgccggtttcggtgcaggcgccgccggccggcttcgatgcttcagaccagcagcgccgtggcaaactcgcgggcgctgaagccctgcaggtcttccaccccttcgcccacgccaatgaagtacaccggcagcggattgtcgcgacgtgtatgggccagtgcggcaatcgcgccgcccttcgccgtgccgtccagcttggtcacgatcagcccggtcagctgcacggcctcgtcgaacgcctgcacctgtgccagcatgttctggccggtattgccgtccagcaccagcagcacttcgtgcggcgcgtcgtccatggccttgcccatcacgcggcggatcttcttcagctcgtccatcagatggcgctgcgtgggcagccggccggccgtatccaccatcaccacatcgatgccacgtgactgaccggccttgatcgcgtcgaaggccaccgccgccggatcgccgccctcgttggcaatcacgtgcacctggttgcgctcgccccagcgggccagctgctcgcgcgcggccgcccggaacgtatcgcccgccgccagcagcaccgactgctcgatctggtgcaggtgccgggccagcttgccgatggaggtggtcttgccggcgccattgacgccggcaatcatcatgaccagcggactggcccggtccacgtcgatgggtttttccagcggggccagcaggtcggtgagaatgtcgatcagtgccgtcttcagcgtggcggcgtcctggatgcggtcacgtttgacccgctcgcgcagctggccgagcagccattccgtcgtgccatagcccgtgtcgctggccagcagcgccgtctccagatcttcatacagcgactcgtcgattttgctgcgactgaaaatgctgcccagctgtgaacgggtacgcgccagcccgccgcgcagccgctcgaaccagccggcccgtgccgggcggatggcctccggcagggcctgggtgggggggacgatctcgctgtcgccataggtggtgggagcggcggctggtgcctgggctgccggcgtctggctaacggttgtctggctggctggcgcctgggaaactggtgccgcctgcgaggaggatgccggagctgccgggggggctgcctgtacggttggggcacgttcttcggttgtgcgctccgctgcttcctgtgctgccttccgggttgcctctgccccggcatgtgcctgctgtgcggcggcttcgcgggcctgctgttcggctgcggcctgctgggctgccacttctgccgcccggcgttccgccccggcagcctcgcgtgcccggagtgcttcagcctcggcctgccgtgcttcggcttcccgggccgcggcggcggccgcttcatcggcactggcggcatgttcagcgcgggcagcggcttctgcgtgccggtttgcttcggtctgtgccgcgaggtcacgctcgacctgcagcgcggcctgctcgaccatcgcacgccgggcggcctcgtcggcggcaggtgctgcaggcgctggagatgcagctgccgttgtggatgtggccaccgcggcttcggttggggcaaggccaaccggggcgggtgcctcgggcgtgggggctgctgccgcttcggtgacaggctctgcagccgtaccggcagcaactgtaccagcagcaggtggcgccgcagtggcctgctgcgctgcctcgtcggcctgcatgaccagggcctgctgcaccagcgtggccgtaccattggctacggcctgccgggcgtcggccagtgcctgctgctcggcttcggtgcgttcggctgcagcggcaaactccgcggcggcttcggcggctttctgatcctgattcttgcggcggaaaaaaccaaacatgtcgtgggttccggaaaggcatcggttcccccgattctagagcgtgtcatgggttcattcgttcccacgccgattccggccgtgtgctgacaaggcgtactgcgcaggcacggcttgtcccgccgcgtgttgacaggtgccgtgtgcggcttccgggagcagacaccggcagcgggttctggcagcggaccccggaagcagacctcgggagcagactccggaagcggacctcagaagcgagccccggaagtgaagccctggaagcagaaccggggagcaggttccgggggggcagcgaacccatgacacgctctagaatcaacccatgacctcccgcatccgcatcatcggtggccagtggaagcgccgcctgctgcccgtacccgacgcccctggcctgcggcccacacccgaccgggtccgcgagaccctgttcaactggctggggcaggacctcaccggctggcgctgcatcgacctctttgccggcagcggcgccctgggcttcgaggccgcctcccggggggccgcccgcgtggacatggtcgaacagaaccccgccatcgcccgcggcctgcagggcagcatccagcagctgggcgcgcagggcgtcatccggctgcaccgggccgatgccagccgctggctggcccagcagcaatccccgggcagcactcctgccgtgggtgccgatctcatcctgctggatcccccgttccgtgccggctggctggaacgcatcctgcccgccgcactggcccgtctggctccccagggcttcatctacgccgaggccgactttccgctcacgcccgaatggctggcccggcagcagtgcggccgtctggccatcctgcgcagccgcaaggccgggcaggtccactaccacctgctgcaggacacgggcgacggcggtgcatccgtacgggcggtggacgatcaggtcgcggacgcagatcgggtcgagggttcggatcaggtcgagggtccgggccaagccgagggttcggaccgggccaagggttcggatcaggtcgcggacgcaggcacggggcaaggtgcagtgagggtttagaggaaggtatggaggcaggcacgggggaagatatggaggcaggcgcaggggagggtatacactcgggctttcccgggcgaggacggactgctccttgacacgctctggccgcaagaccctggaaggcggataatggcggccagccattttttctctcatcggcaccccacatgacccttgtcgtctatcccggcaccttcgacccgctgacccttggccaccaggacgtggtccagcgcgttgctgcccatcacgaggccgtcatcgttgccgtgtccgacagccgcaagagcaccctgttcaccctggccgaacggctcgacatggccaaggccatcctgaccggcctggccaacgtgcgcgtcatgcatttcaccgggctggtcaccgaatttgcccgccagcagggggccggactcatcgtgcgcggcctgcgcgacgccagcgacttcgactacgaacggcgcatggccagcctcaaccgcacactgctgccggccatcgatacccacttcgtcattccggacgaccgctaccagtccatcaccggcacgctggtgcgcgaaattgccctgctgggcggcgatgtcagccccttcgtcagccccgtcgtgctggctgccctgcagcagaaataccgcgagcgccgctcacccgcagcgcctgccccctgacacccgaccggagacaccgagtccataacacgatttgaatcccgggccgaatccggaaaacagcgtcgcaccgaaaccagcgccatgctgaaccccgcgacgcatgcagtacccagtacgacaccggaccccgtgccccatccggcacccaacgcaagccagaatccagcaccgaatcatccagcatcccaaggagcgccactccatggccctgatcatcaccgacgaatgcatcaactgcgactgctgtgaacccgagtgccccaacgaggccatctcgcagggacccgagtactacatcatcgaccccaaccgctgcaccgaatgcgtggggcacttcgatgaaccccagtgcgcgcagatctgccccgtggaatgcattcccatcaacttcgagctgaacgaatcccgcgaacagctcatggaaaaattcctgcgcctgcaggccgagaaaaccccttcggctgcctgagtcagcggttgatcagcgtgctcttgccgaacaggctttccaccaggtccaccaccagctcggccgtctggttgcggatgtccagcgccggattcacctccaccacatccagcgaggtcatccggcccgtgtcggcaatcatctccatgcacagctgcgcctcgcggtaggtggcgccgccgcgcacgcgtgtgcctgtacccggggcgatttccgggtccagaaagtcggcatcgaaactcacgtgcaggtgcgtgtcgtcatccagaccgtccagcacccggtgcatggcctcgcgcatgcccagctcgtcgatggcccgcatgtcgaaggcctggatgcccatctggcggatcatccgcttttcatgctcatctaccgagcggatgcccacgtaacgcatgctttcgggtttgatggccggtgtctcgcccgacatggaaatcagctcgtgcggcccgaagcccagcaggttggccaccggaatgccgtggatattgccactgggcgaggtgtccggcgtattgatgtcggagtgggcgtccagccacagcacccgcagcttcttgccctgcgcacgcgcatggcgcgccaccgcgctgatcgaaccggctgccagatggtggtcgccccccagcatgatgggcatgcggcctgcctgaaactgtgcccacacggcgtcgtgcacggcctgcgtccagaaaatggcctccggcagattgcgcagacccgccgcctgcggatcacgcgggccacgcggattgaccgggccagagaggttgcccgtgtccagcacgtccagccccagggcggccagcgccggccccagctgggcaacccgcagtgcatccggccccatggccgagcccaggaggcttgcgcctgcgtcggagggggcgccgatgagggagactttgaggggtggggtggtggtcatggtgtcgcgtctgccggtaaagggggaagaaaaccatgcagcacccgacgtggccggggcgcgacaggaaacatatcacggatggcaggcgtgcgcagaaacgctgcccgaaagcatgggtggcagccgatgcggaggccggcctgtgccggtggctgcagcagggcaggtcgcagcatgctgcagcgtagctgctctgcggacacatgcagaagccggtgtggcgacaatgtgtcaggcagaatcgatggcctgcagaacaggcataggtgatggcctgcagaaaactgtcgcaaaaaagacgaaagccccatataggggctttccattttgtgcatctttcagcttgttagcggaccgagcacatctcccagtgttctgagtgaagccattgtgccacgaccgcgaggaaaaagtccaccatccggcgcatcaaatgtcgctttgccgacgaacggtcgatttttccggaccgaatggcatgccggaaggcacgtgtgcacagataattgcagcagcgaatcagtcacatgtgtccggcacaccggatggcggcatctcccagctgtccatcggcccggaccgaaccggagaacagcatggattaccgcctggcaatcgaccttgggactacctcactgggctgggcggtctatcgcctgaacaatgagcacgcaccggtggccctcatccgggccggcgtacggattttcagtgatggtcgcgaagcggccaagaatggaggcgttggcgccccgctggcggtgcagcgacggatggcgcgcggcctgcgccgccgccgtgaccgcatgctgcgccgcaaggcccgcatgatgcggcaactggtggacttcggcttctttccgaaggatctgaaggcacgcaaggcgctggaaaagcagtaccccaatccctacgagctgcgggcagccggcatggaacgcgaactcaaacccgaggagttcggtcgcgccctgttccacctcaaccagcgtcgcggcttcaagagcaaccgcaagctggacaaggtcgagctggatgaaaacggcaacgaagtgaccaaggcctctgatgagacctccaaaatgaaaggtgccatcagcgaaatgcgcaaaaccctgcgcgaccagggccttactgcgggacagtggctgtacagacggatgcttaccggcgctgccgtgcgtaaccgggaaatccttacccaggacaagaagggcaacgacgtcatcgaaaaaaactacagtctgtcgattgaccggcagatcgttaccgatgagttcgatgccctctgggccagacaggccagtttcaaccctgtcctcttcaacgacgctgcacgggatgccctgcgcgatacgctgctcttccagcgtccgctcaagcccgtggacccgggccggtgcaccctgctgcccgatgagcagcgtgcgccgctggcactgcccagcagccagcgctttcgtatctatcaggaggtcaataacctgcgtattgtggacgaccgcatgcagcagaccccgctgacgaaggaacagcgcgacctgatcgtaaacgtgctggagcgaggcaaaccgcccaccaaagccacggcgaaaaagacagtcgacaaggcgggcaaggggggtgagggcaagaccagaacacgccgaagcagcaacaacgcgactttcgaatatatccgcaaactgctggaagtgagcggtaccacgcgcttcaacctcgaggatgaccggcgggaggagctgaagggcaatgccgcctctgcagccctgtcccggccggaatgcttcggcgaggcctggttcgatttcgacgacaatctgcaggacgacatcgtctgccagctggtcaacgaagacagcgaggctgatctcatcgagtggctgaagcagcgcactggcgtggatgacgcccgggcgaaagtcatttccaacgcacgtctgcccgaagggtacggcaacctgagccgcaaggcgcttaacctcatcgtgccggaactgcgcagggacgtgatcacctacgacaaggcggtggaggcggccggtctgggcagtcatagcgctctgggcttttcggtggagggcgaagagcagctgcctgtcatcgatcctgccaccggcaaaccgaaagtcaacgaagagaccggtgaaatccgcatggtgctccggcatctgccgtactacggcaaggcgctgcagcggcacgtgagttttggcaccaacaaacgcgaagaccccgaagagaaacgctacggcaagattgccaaccccaccgtgcacattggcctgaaccaggtgcgcaaggtggtgaacgcgctgatcgaccgttacggcaacccggccgaggtggtggtggagctggcccgcgacctgaagcagagcaagaagcagcgcgaggagatccagcgtgagcagacggccaacgagaagcggaacaaacggattgcggaagacattgccggcattctgggcatcaccccggaaggcgttcgtcgcgatgacatcaagcgctggattctgtgggaagagctgagccgcgacgcagccgaccgccgctgcccctacagtggcgaacagatctctgcagaaatgctgctgtctgaccaggtcgaagtcgagcacatcctgccgttttcccgcacgctggatgacggcatgaacaacaagacggtgtgtatccgtctggccaaccgcgtcaagggcaaccgtacgccttacgaggcccgtgccgacttcgagcggcagggctggaagtatgaggacatcctgcgtcgcgccgcatccatgcccaacaagcgcaaggccgcccgctttgccgaggacggctataaacgctggctgcacgaagacaaggacttcatcgcccgcgcactgaacgacacacgttatctgtcgcgtctggccaaatcgtatctgggactggtgaccaagggtcacgtgcgcgtgattaccggctcactcaccgccatgctgcgccgccatctgggtctgaacctcctgctgggcgacacgggcgagaagaaccgcaacgatcatcgtcatcacgcggtcgatgcctgcgtgatcggcgtgaccgaccaagggcttctgcagcgctttgcctcggccaatgcccgtgccgatgaagccggtaccgaacagctggtgaagaatttccagccgccgtggccaaccttccgggaccaggtggagcgtgccattggcaacatctgggtcagccacaaaccggatcacgggtttgaaggcgcgatgctggaagacacggcgcatgggattgggaaggatgggaagacgatcattccgagccggacgtcctccaaagccaacatctcaagcgtaaacatgatatcggagcctgggcaggaagctcgtcatggcgtcgacgcagaaggccatccactgccctacaaggggtatgttggtggcagcaactattgcatcgagatcttcagaaacggacaaggtaaatgggaaggggaagtgatttccacgttcagagcctaccagattgtccgggaggcgatgcggagaggggcctcgcgcgaagaggcagttaggaaattgcgagatccaaagttcgctcaaaacggtgcgtctctggttactagattgatgatcgatgatgctgtaaggatgagtcaaagtaatggcgaaggaggagggagagaagtgacaatgaggattgttaaaattgcttcgtcaagcggtcagatatttatggcaccaattaacgaggccaatgtggatgccagaaatcgtgacaaggatgatccgtttaagtacacatcaaagtacgcgagttccttccagaagtcacatggcagaaaggtcacggtatctactttgggcattgttagggaccctgggtattcaggataattttgtattatggttggtcgcatcgtagaaatcgcggacgacaggcgccatttgtccgtttttcgcggttttctgatggtgcacacaaccggcggaacccgtcagcttgctggcaaggttccgctggatgacattacagcgctgatcgccaatgcacatggtataagctataccaacaaccttctggttgatctggccgaacgtggctgcccatttgttctttgtggggccaaccataacgtcgctggcatgctttggcccattgatgggcaccatgtccaggccaaacgcatggaggcgcagattgcggcctctttgcccgtgcagaagcgtatgtgggcgtccgtagtcagagcgaagctgcagcagcaggcggcggtgcttgaggcttgcggcgcaccggatgctccgttgaatgcgctggtgcgcaaggttcgtagcggtgatccggacaacatcgaggcgcagggtgctcgtcgatactggggccttctgttcggagatggcttcaaacgggaccagaaggctgatggggtcaacgcgctgctgaattacggttacaccattctgcgggcgaccacagcgcgtgcggtgatcgcggcgggtctgcatccgagtatcggactgcaccatagcaatgatgccaatgccatgcgtctggtggatgacctgatggagcccttcaggccaatggtggacctgaaggtgcgaggtctgatccgacagggtctttttgaggtaacacccgagacgaagaaggcgctggcactggtgatgtgtgccgacatgcagaccagtgccggcgccacgcccatcatggtctgtacgcagcgccttgcggtctccctggcgcaggtgtttttgggggagcggcaggagctggacctgcctttgcctggctcttcgctggacatgggagcaatggcctcagaggtagtctgacatgctttcggggtatcggctgatgtggctgttggtgatgttcgatttaccggtggtgctgaaggccgaacggaaggccgctaccgagtttcgcaaccgcctgttggacatgggcttcgagatgagccagttcagcgtgtaccttcgcttctgtagtagtccaacgcaggtggaaacctactgcaagcgggtggaagccgttctgcctccaggaggcaaggtcagcatcctgcaactgaccgacaaacagtatgagcgcatcctgacgttccatcgcggggctatccaggaatccggaaaggcaccggaccagttcacattgttttaagaatttgttggctagaatcgtatgttttcggcaacaaatcggtcgttgcgtgggagttcgggagcatgggcaaccatcaatttgatcgtatattttgcagtgttttacgttgtggtcgccttgtgcggacaacaaaaacgggccttgcggcccgttcctgtgtactgattttgatgaaaaatttactgccaaactccgtaaaacaccttgagaatcaatgggttgctggagatcgattctagaacactgggagatgtgttcggtccggaaccgggcctcacggcgcagcgcgcgcacaatcattctagaacactgggagatgtgttcggtccggaacaaaatgcttaccgtggtcgaaatcaaccgcattctagaacactgggagatgtgttcggtccggaacaacaatgcgcgcagctgtcaccgacaccgtattctagaacactgggagatgtgttcggtccggaacacgggccgcgaaaccccgacaatgccattgattctagaacactgggagatgtgttcggtccggaaccatacgcgttgcagtgacagtgccatttgaattctagaacactgggagatgtgttcggtccggaacgggaaatcgaccatggcaccatcaagccggattctagaacactgggagatgtgttcggtccggaacatcaccgcgaggccgacggccgggactatgattctagaacactgggagatgtgttcggtccggaacgcgcctcgcgtcgcaacgcccgcgtaattcattctagaacactgggagatgtgttcggtccggaaccagtcaagcgcaaccacaagtaaggagtagattctagaacactgggagatgtgttcggtccggaacccgcgcaacactgcggcgaggggcacggcgattctagaacactgggagatgtgttcggtccggaacccgcgtgatggtagtagctgggtaatgggtattctagaacactgggagatgtgttcggtccggaacgaacgctgcgccg

SEQ ID NO: 1875 - DNA, 12823 bp, synthetic construct
  source 1..12823: mol_type = other DNA
  misc_feature 1..12823: note = Synthetic
accattgacgcttgagaatttcgcgaatgcttggaaggctgcgccgtttgctcgctactttctgaacacgaccttgctcgtgactctaatcctcgtcgcacaactcgtgctctgcacgctcgctgcatacgccttcgcgtgctatgagtttcgcggcaaaaacatcctgttctcgctcgtgctaattcagctcatgatcatgccggacattttgctagtcgagaactacaaaacgatgagcaaactcggtttgatcgatacgttgttcggcatcggtttgccgtatttcgcgtcagcctttgcgattttcttgttgcgacaaaccttcaaacaaattccgaaagaactcgttgaagcagcggtgatggaaggtgcgagcactttgcaaatcctctggcgtgttttcgtgccgctcgcgaagccggtgtacatcgcgttcgcgctcgtgtcggtgagttatcactggaacaattttctgtggccgctggtcgtcacgaactctgtgaattcgcgaccgctcaccgtgggcttgcaggtgttcgcttcgaccgatcaaggcatcgattggtcgatcatcactgcggccacactgctgaccgccgcaccgctcttgatcgcgttcctgttgtttcaacggcaattcgtgcaatccttcatgcgcgcaggtatcaaatgaagctcatcacctggaacgtgcagtggttttgcgggctcgatggcaagatcgacatcgcgcgcatcgttgatcgcgcgaaagcgattgcggatttcgacgtgctttgtttgcaggaagttgcggtgaactacccgcgactcgatggtgacgcgtcgcacgatcaacccgcgattctgaaatccttgttgccgggttacgaagtgttcttcggcgcagcggtcgacgagcttgcgcccgacggcaaatcccgacagcagtttggtaatttgattgcaacgcggctgcctgcactgcaagtgcatcgttacgccttgccctatcccgccgacgcgggcacacagggcgtgcgcagcatgccacgcatctgcgtgtcggcgacgctgcaaacgccgcttggtgcggtgcgtgtgatgacgacgcatttggagttttactcaccgctcatgcgcaaaacgcaagccgaagaattgctcttcctgcatgcggaggcgtgcgcgcacgcgaagcatccaccggagctcgacacgaccggcccgccgtttcaagcgaagacgcacacgccacattgcgtcctcactggcgacttcaatttcgagccacatcaagaagagtacgcgctgatgcaatcggagaatggcgaggcgacgcgcttcatcgatgcgtggacgatcgcgcatccgaatgaaaaacacgcgcccacgtttcgactgttcgatcgtcgctacgggcccgagccgatcacttgcgattaccagtttgtgagcgagagtctgcgtgcgaatgtgagcacggtcacggtcgatctcgaaacaacggcgagcgatcatcagccggtattgatcgaactgacgccgcgctgattcggaatggcttgcgaagcgtttgcacggttgcgcgaactttggtgatgtcgcgaaaagcaaatgcgcataaagctttctcgcttattgccctaataaacttagatttttcgttgtttttgtttattgtttataagacttagaaactattagctttctatgttttatgcggcgtaacgatatgaagctgtttttcgtcaaaccgctttaacgctttcgatagaacccacgcagcgcaaacgccgcaagtgcgcacaccatcgccatcaacgaccacccaggcagtggcacttgcgggaaattcaactgcacaaccggcgtgacgtcgagcctcgcccagttatcgctcaattgaaattggcgacggaagttcgagcccgcgcaggagttgtcacccggcgtggcgacgattgatttgtcaccggagagccagacacggttggcgtcgttgtctgtgctgctaagtgattggttcttgacgaccgtgttcacgcgcagattagcgagcgtcgttccgagcgttgacaggcgaacccgcgcaccggcgatgtattttgtggcgtcgccgccgggtgcattgatcgtccagcggttccagtcgatgccttcggtcaggcgccagcggtcgcccacctcggggtaaccggcaggcaggccaatcgtgtttgctgcatttcgatacacgccgaccagaaacaagtcgccggtgtttggcggcggataaacctgacagactgccgcaacgtagttttgagccggtgtaccgatgcgaaactcaacgttgtcgcgacgcgaagcagacggggcttcgtttgcgccaaccacgccgggtgtaccggtgaaatcggtcgcgtcgttcaccaccacaccgaaccacacccaggtgccgtcgtacgcggtgtagaccgtgtacgcgccgctcgcaaagccgcattgcgtgcccgaggtgtccggcaaccaattaaaggtgtaggtattgttcgcgcagcccattgcgccgggcgtgttttgctgtccgccttcgatgaatgcggttgcggttgtcaccggtgtggtgaatcccggcgtaccccaggttcgcggatcggagccgacggcgagcagtcccggcgcggcgctaccccacggcagaacggttggtgccgcgtgcgccgcagctgcaagaagtgtcaataagagtgtcgccagcagtttcatatgaccctcgaacttagtccattcgcgccgagtattccgcgccgtgtcgccagagtcaagcgcgcgccgccgaagttcggagccttctgacggcttagcgccataattccgccttctaaatctcattgacgaacgccatgaagcgcctcgtgcctcgtttttcttatctctgcgcaactgcactgctcgcgctggcgccgttggtcgcagtggtggcgaccgatatgtcgaaaaccgtacgcgtggcctttccggtcgacgtcaccggttttgacccgcaagccagcaacgatttgtactccggtcacgtcaataatgcggtattcgacgtaatgttcgagtacgactactacgttcgcccggtgcggctgcgtggctcaatcgccgatggcttgccacagatttccgccgacggcctcacctggacgattcgcatcaagaagggtcagcacttcgctgacgatccggtattcaaaggcaagaagcgcgagctcacggccgacgatctggtgtattcgtggaaacgcatgcttgacccgaaactcatttcacccacgctctggcatatcgagggcaagttggtgggtgccgacgcgctggtggcggaggcgaaaaaatcgggtaagttcgactatgacaaaccgcttgaaggtttgaaggcgctggatcgctacacggtgcagatgaagctcgtgcggccggactatgtgctcgccgaattgatgtcccaatacaactggtcgccggtcgcgcgcgaggtgatcgacgcatacaaagatccgggcaatcgggtgatgagcaacccggtgggggtgggtccatatcggatcaaggagtggaaaaagggcagcaaaatagttctcacgaaaaacgagaattttcgcgacgagctcttcttgaccgagggcgaagcggaggacgcagagatactcgcccgcaacaaaggcaagaaaatcccgctcgttggcaacgtggaaatttctgtcatcgaagaggccaacccgcgactgctcgcgttcaagtcgggcgtgctcgactatgagtcggtcggccccgacatgatcagcaacgtggtgcagggcggaaagcttctgcccgaatatgccgagcgcggcattcgccatcagcgcgcctacgatcccgcacttggctatgacttcttcaatctggaggatccggtcgtcggcggcagaacgctggacaaaatcgcgctccgtcgcgcgatcatcatggccttcccaatggaagactatgttcgcgtgagctggcgcggccaggcagagcctgcaacgcaaatcattccaccgacccagactggctaccgcgcgaacaagcggatagacattcgccaagatgtcgccctcgccaacgcgctcttggatcactttggctataaagacgccgacggtgacggctttcgcgatctccccgacggtaaaccgcttgaaatcacccgctccaccacgcccaatccgcgtgatcgcgagaccgatgagctgtggaaaaagaccttcgatgcgctcaagatcaagatcaaattcaacgcacagaagtggcccgatctgctcaagcaagctcgcgccggccaagtgcaattctggcagctgggctggaactcatcggctaccgacggcaacagtttcgtacaacttttgtattcgaagaacattggtcagtcgaacttcgcgcgcctgcgcgacgagcagtacgacaaactctatgaacaagcgcagctgctgccactcggacctaagcgatgggcactctacgcgacgatgaacgacatcgcaattgtgaattcagcattcgccaacggcgtatttcgctatcagaatctgctcacccagccgtggctgctaaatttcaaacgcattccgtttcgcaaccatttctggcacttcctggacaccgacgagagcaaacgtccgaagtagaaaaaaggcgacccgagggtcgcctttttttgcagagcgtttgcgtttacgcagccgccgggcttgcgccgatcatcgtgccgatctttgcctggtcgcgcgcgagcgcctcacgctccgagcggccgcggtagaagtacgtcaccaagctgctggtgatgacgataaagagcgaatacagcactggaatcagtaacacctcttgctgcattgtgccggtgaacgtgagcgtcacgatcaacacggcgagcgggccgttctgaatgccggtttcaagcgagatcgttcgcgagcgattattgtcttggcgaagcagtcgcgcaagccagtaacccagcagcatgccaatcacgccgagcccgatggccgcgaagtaaaccggccatggtgtgctgagcagcaactgatagttgcgcggcacccacgaaccaatcaggaacaggatcacaacgacacccaggaagccgcccatgagttcaaccaccgcgccgatgttggcgttccacttgcgaagcagcatgccaagaactgtgggcaccagaagcacgacgagcacctgcgcgacgttctccgccggaatcttgaacgcacccgacacgcctgccaggttggaataaagctccagcaaagcaggcacagcgaccacagcgaccagcgtcgaaacgctcgtcatcatgatcgacaacgcgagcacgcctttgctgaaataggtgaagatgttcgaggtcgtcccgccgggcatacagcccatgaggatgagtccaacggcaagcgcaggcggcagcccgagtatcaccgcgagcgcgtagcccaaaaacggcatgatgccgtactggcagagcaggccgattagcacgccctttggttttttgaacgcgatcagaaaatcgcggaaggtcagcgatgcgcccattccaaacatgatgagcatcatcatcacgccgagcagtttggtttcgagttcggtcaacatagtcttctctcccctttatgcggcaggcgcttgcgtcgctgcgagcgcttctttgcgcaagtccttgcgcagaatttttccaatcggcgtcttcggcaattcatcgcggaagatgatctttgccggcaacttgtagccagtcaacagcgtgcggcagtgcgcagcaagctcggcctcggtcaggctatcgtcgcgcttgaccacataggcgcgcaccgcttcgccggtttttgcgtccggaaccccaatcaccgccgcctccatcaccttgtcgtgcttggcgattgcgtcctcgacttcgttcggatacacattgaagccggaaacaatgatgaggtctttcttgcgatcgacgatcttgaacatgaaatccgaatccatcaccgcgatgtcgccggtgtagagccagccatcgcgaatggttttggccgattcttccgcctgattccagtagccgagcatcacttgcgggccgcgcacgatgatctcgccgggttcgccttgcgccaccggctcgccattgtcgtccaccaaacgaacggcagtctcatgcgcaggaataccaatgctgtcggtttttctgagccccgagagcggctggaagcacacagcgggcgacgactcggtcaggccgtagccctcggcaagcggcgcacccgtcaccgcctcccagcgcttgaccaccgcgctgtgcattgccgcgccaccgccgatggcggccttcagatgcttcggcggaaacgccacgaaccattcttcattcaacagcgcattgaacagcgtgttcacgccggaaatccaggtcaccttgtaattctcaaaggcacgttgcagattttgaatcgggcgcggcgacgggatgagcagattgcgagcgccgcagcgatagaacgtaagcaggttcgccgtgaacgcaaagatgtgataaatcggcagtgcggtcagcaccgtctcgcgccccatatcgatcttgtcacgaccgatcgcgagaatctgctcgatgttccacagcagattgccgtgcgtgagcatcgcgcctttcgacacgccagtcgtgccgccggtgtactgcagcagcgcgagatcgttctgcgccagtcgcttccagtactgcgaaacgtcgatgcgcaaatcgttgcgtgcaagcgcgcccttggcgagcgcatcgttgatcgttaaatgcgcgaggttcgtggtcgggatgactttattccagtatttctggatgcccttgatgatttggcgcacgaccggcggaaaaaagctggacaccgagcagagcaccacatgcttcacgttcgtttcgcgagcgatcgtcgccatcttgtcggcgaacatatcgatcaacaccagcgcctcgacccccgcgtcgttgaattggtgcttcatctcgcgctcggtatagagcgggttggtgttgaccaacacgcaccccgctttcagaatcccgaatatcgcaaccggcgtgctcaaacagttcggtgtttgcaccgcaacccgcgccccggctttgagcccaatgacctcgcgcagatacaccgcaaaatcgtcgctcatctgatcgacctgtgcgtaggtgagcgtaccgtacatgccgtttggggtcacgcaggtaaacgccgattgagccgcgaacgccttgctcgcggcgacaagcatctgcggcaggttttgcgattcgggcggcgcaagcttgccagtgccgccgctcgtgtagtggcgactccacggcgctaaatcgtaaagagagtcctgtttcattgcgatcctcccgtgttgacaccgcggtgagggtgtcgaatattgatgatgggagcaatgtagagaagccacgagccgccgacgctaggggttctacgtgtggcaagggaaagcctgggtagtggtttccctgcgtgcgtggtcgtggagccgcagcatctcatcgaccaggtgggtcagcattacggagtaaaagctatttaaccttttgcctcatacaatatgaatttttctttatttaattaatttctcgtaataaacataaattagagaatatgcattgttctatagggcaatatagaacattgctatctcgtgaagcgagccgacaacgcaaattcgccgcgcacgcccgatgcggcgttaccacggcccacgcatgcagacgcgcgacagtcgcagcgagaggatcgaccgcaagccgcatccacaacaaacacgccagccatcgccgtcgcatccgggtcaaaccgcatgtcgcattcgcgacacagcccaaacggacaggtgcaaaaaacacgcgaagcaaaagcccagtacctcccaacaaaggtagggacacagcgcaaaggaacggcttagactggagcgttggttcgctacggcgaacgccctgaaagaaagctcgcgctatgcatcacacggatcggctgtttcgcatgatgaacatgctcgaacggagtcgcgacgccgcgcgcgagcggcttcttcagcgatcagacctttcattcgggacgttcgtgcgcaacgcggtgttgcatccgcacgttggtatagtgagctgaaaagcaaagagccgcatgtagcggctctttcatttggtgcatctttcagcttgttagcggtcagaacacacatcccgattagcgtaagtaggcggagtattgccaactaacgatctttcgtcaagtacctagaaaagaaatgcgattgcttcaaggatttctatgtcacacaaaatgcgataccggcttgctctcgacttgggttcgacatcacttggttgggcgatgatccgtttaaacgagaagaacgagcccaacgccatcatcaaggcaggcgtacgaatcttttcagacgggcgaaatccgaaggatggcgcttctctcgccgtcaatcgccgcaacgcgcgcgcgatgcggcgcaggcgcgaccgattgctaaagcgcaaagctcgcatgatgcgcgcgttgattgagtttgggtttttccccgaagacgaagcttcgcgtaaggctttggaacgtgttgatccgtacgcattgcgtgcgaagggacttgatcacgcgcttacaccagcggaatttgcgcgcgctctgttccacattaatcaacgtcgcggctttaacagcaatcgaaaaacggatacgaaagaaagcgattccagcgtgatgaaaggtgcgatcaacgatcttgattcaaggctcaaagcgggcgaagcgcgaacggttggcgagtggctgtactttcgtacacagcgcggcgagcccacacgtgcacggcgacgcgaagcggtaatcgtgaaggacgacggcaagaacaagaagctagtgagctatgacctttacatcaatcgcgagatgatcaaggcggaattcgatgcgctttggtcaaagcagaacgctctcaatcccgcgacatttacagaaaaaattggcgaaacgctcaaagacattcttctgcatcagcgaccgctaaaaccagtacgcccgggtcgttgtacgttgctccccgaagaggagcgcgcgccgcttgcgctgccgagcgtgcagcggtttcgcatgtatcaggaggcgaacaatctgcgcgttttgcagaagggtttgacggagcaaccgcttacgctagctcaacgcaatcaggtgatcgatgcgcttgagcaaagtggcaagcaaacgtttacgcaactgaagaaactcttggggctcggtggtgccgcgaaatttagccacgaagacgtcaaacgaaccgagctgaaaggtaacggcacgagcgcagcgctttctaagcgcacgctgtttggaaaaaagtggttcgaatttgatttggcgacgcaagatgagatcgtgcgcaagatcttcagcgaagaaagtgaagtcgcacttgtcgaatggctaaaagcgaatacgggcgtcgaagaagcgcgcgccgaacaaatcgcgaatgtcgggcttgcagagggctacgggagcctcagtagcgcagcgctcgcgcggatactgcccgagctagagcgggatgtcgtgacatacgacaaagcggtcatcgcggctggtttcgagcaccacagtaatctgaatccttctgcaacaggcgaaattcttcctgaacttccctattacggcgagccgctacaacgattcgtcggttttgctgatccacgtgcaaccgaaaatgatccacccgaaaagcggtttgggcgcatcgccaacccgacagtgcacatcggtttgaaccaggttcgcaaagtggtcaacgcactgatcaagcgctacggtcatccgagcgaaatgattgttgaagttgcgcgcgatttgaagcaaagcaaggagcagcgcgaagaggagagcaagagacaaaaggcgaacgaagaccgcaatcgtcgatatcgacgggatatcgcacaagcgcttaggatgagcgaagagcgtgttcgtcgtgacgatttgcagaaggtactactctgggaagaactcaatctgggcgacgcgatggatcgcaagtgcccgtatagcggaacaacgataagtttgacgatgctcttgtctgatcaagtcgagatcgaacacatcctgccgttctcaatgacgttggacgacagtttgaacaataaaacggtcgcgttacgcactgcaaatcgagataagggcaatcagacgccgtggcaggcgttcggcgagcgcagcggtgccggatacgactacggggcaatcctcgcgcgcgcagaattgatgccaaagaacaagcgctatcgcttcggtagagacggatatcagcaatggctgcgcgacgacaaagatttcctcgcaagagcgcttaacgatacgcgctacctttctcgcgttgcgcgcgagtacgtgcggcttgtttgtcctgccgcacgagtcattccaggacagatgaccgcgatgctgcgcggcaaatttggccttaacgatgtgctcggtttgaatggagagaaaaaccgcaacgatcatcgacatcatgcggtcgatgcgtgcgtcatcggcgtaaccgatcaaggcatgcttggagcgttcgctaaagcgagtgcagacgcacgaacgcagcggctcaatcgattggtagaaaacatgcccctgccgtgggacacgtatcgagcacacgttcaacgcgccgtcgcggcgatttgggtaagtcaccgccccgatcacagctacgaaggcgcaatgcacaacgataccgcttacggattgttgccggaagggcgcgtgcgccatcacaagccgattgaaggaaaacgaacactcgtcgaagaagcacttaaagtcattccgttttcctcgcaacgagcgggagcaaggcacggcttcacgggcgatggcgaccctcgtgcttacaagggatacaaaggcgacagcaactattgcattgagattgtgcgcgctgaaagcggtaagtgggaaggtgaagtgatctcaacgtatgaggcatatcaagcggtgagagaacttccgccaacggcacggttccctgcgcttcggaagccaaggcagagtttgagcggaaaaccactcgtaatgcggttggtagcgggtgacgctgttcgtcttgttcacaaagaagaaacgcggacgatgcgacttattgcggttaactcgcagggaacgttaacgttcgcaaccgtacatgaagcgaacgtagactcgcgtaaccgcgacaaacaggactcttttgcttacacctacaagacagcgggatcactaagtgcctcccagggacggctagtcacgatctcagctatcggcgaacttcatgacccaggattcagaggctagtgacaaatgatcggtcgcatcatcgaaatagcagatgatcgacgacatttattcgtgtcgcgcggctttatggtcgtgcaagatacggaaggcgaaagaaaagaactcgggcaagtcccgctcgacgatatcgcggcagtcattgcgaacgcgcacgggctttcgtacaccaacaatcttctcgtagcgctcgcggaacgttgcgcgccgtttgtgttgtgtggggcgaaccacaatgcggttggaatgattttccccgttgaaggaaactaccagcaagccaagcgctttgacgcgcagattgatgcgccaaaaccaacgcacaagcgtatctgggcggaagtagttcgggcaaaactcgaacaacaagcggcggcactggaagcggctggtgcgcccacagcgccgctcaccgcactcgtacgcaaagttcgtgcaggcgaccccgacaacattgaggcacagggcgcgcaacgctactggcgattgctctttggcgatgactttcgtcgcgatcagcagggcggcggcatcaacgggatgctcaactacggctacaccgtgttgcgatctgcgacggcgcgcgctgtggttgcatcgggcttacatccaacgatcggcattcatcattccaacgaaaacaacgcgatgcgtttggtggacgatttgatggagccgtttcgtcccacgatcgatttgcgtatttggcgattgctgcgcgacggcgcgagtgacgtttcgcccgacaccaagcgcgcgctcgtgaaagtgctctacgacgacatgcaaacaaatatcggtgcgacgccagtgatggtgtgcatgcaaaaactcgcggtgtcgctcgcgcaggtatacatgggcgagcgcgagaaactggatttgccctttccgggcttgccgctcgatttggcggcgagcttgaccgagtaagccgttcgatcaacatgctttcggggtatcgactcatgtggatggtggtgatgttcgatttgccggtgatcgaaaaagcggagcgcaaagaagcaacgcgatttcgcaacaacctgctcgactggggattcgagatgtgtcagttttccgtgtacgcgcggttttgcacgagccaagcgcaaatcgatacactcacgaaacaggtggaagtcgccctgcccgaaggcggcaacgtgaacattctttttttcaccgacaagcaatatgaacgcatcatcagttttcgcggaaagcaaaaagaccccgcgaaaaaagcacccgaccagtatcttttgttttaagttagacgtgattttccaaaaccaaaaagtgaaaaaccccttgattgctcaaggggttatcacagctgtagtctagctaattgggatgtgtgcgctgaccggaactaatagttgccgtgccttgatgcc

SEQ ID NO: 1876 - DNA, 11623 bp, synthetic construct
  source 1..11623: mol_type = other DNA
  misc_feature 1..11623: note = Synthetic
accccgacagtacctacttcagcgtcggcaagatcgaccagacccaggcagccgacatggccgagcgcagcggcgtgccactggccgacgtggagcgggcgctggcgccgaatttggggttgtgagcgtgcgaccgcatgcctagtctggatccatacctgtgaacgacatcatgaagggtaatgcgccgaccgtattgaccaaggccaccatccgggccgccgatatgctgggcctgcagagcaccgacctggccaggatccttggtgtcaacactgcaacggtgtcgcgatacaagtcggcgtccgcctgcatcatgccggcctccaagactggcgaactggcactgttgctgatacgcgtgttcgaatcacttgatcgcctaccaagcttctccagcggcctgacggcctagtcagaacactggattatctggacggtatgcgtgtagaggcatgaacagggttgccttggcggaggctgctgcttgaaaaaggtggcctgaacgctgttcttccgcatcttgttcccggtcggtgttgtgggcagcggcgaaccgagccgccttgctggccacatggaaggagctaaatccatgcacaagcagttcacgttaaaggctgtcaaggctctggcgggctccgtgctgcaactcagcttcgcggacggcgcatccatgcaggttgaccttgcacccatcgtcaagcgctcacctgcgctggctctgcttctggatccgacggtgttcaagcgcgcgaaactgggcgaatcgggcggcgccgtgacacggggctccgatgcgttggagctggcggctgacaacctgcgtgctcgtgccatcgagcaggctggtggatttccgcacgagatcatcatggagtggatgcaccgcgatggcatgacgcagcaggccgcagccgatgcgctgggtatctcgcgccgcatgctggcctactacctgagcggagaaaagccggtgccgcgcacggtggcgttggcctgcgtagggtgggatacggcggtcgagcgcagcgatccgcggttcattcttgcggcgtgagcgtataaagatgggatcgccggggcggagtattcctcttctcgcccataccagatggcctttcgtctgatgcccttacgcgcttgcgcggctatttgagttgggcaacgggcacatgcgttggcaggcggttggcgcagaaaatacgaaagccgggcatgcccggctttccattttttgcatctagctaaaagcatcagcttgttagcggctagagcacaaatcccagtgatctgagtgcacccagtttacccatgaacaagaaggcgtgcaactgcgtcacgcccattcagcacaaaaccgctcatgcctacggaaattgggcggtagcatgagtacgatacatgttgtcacatcaagccgagagggatcaacgtgtcgcaagcaaagcatttgcgctatcgattggcgctggatttgggctctacttccttgggatgggcgatctttcggctcagtgctgacaaccagcccaccgccctcatcaaggccggcgtgcgcattttcagcgacggtcgcaaccccaaggacggctcatcgctggccgtcacgcgccgagccgcgcgcgccatgcggcgccggcgcgaccggctgctcaagcgcaaggcgcgcatgatgggcaagctggtggagtacggcttctttccggccgatgcggcggcacgaaaggagttggagcagaaaaatccgtacgagctgcgtgccaaggggctgcacgaagccctgacgccaggcgagtttgcccgcgcgctgtttcacctgaaccagcggcgcggcttcaaaagcaaccgcaagaccgacaaaaacgaaagcgacagcggcgcgctgaagacggccatcaagcagttgcgcgagacgctggccgccagcgactgccagaccgttggcgaactgctgtggaagcgattgcaggccgggcaaggcacacgggcgcgctaccgcgagacgcgctacaccgaggacggcaagaacaagatcgacaagagctacgacttctacgtcgaccgtcagatggtggcggacgagttcgacgccctgtgggccaggcaggcggcactgaacccggcgctgttcaccgaggcagcgcgcgccgatttgcgcgacacgctgctgcaccaacgcccgctgcggcccgtgaaacccggccgttgcaccttgctgccggatgaggagcgcgcgccgctggcgctgcccagccaacagcgctttcgtatcctgcaggaggtgaatcacttgcgcctgctggacgcgggcttgcaggaaacgccgctcacgctggcgcagcgcgatgccatcgtggacttgttggaggccagcggcaaggtcagcttcaaggcgatccgaaaaaaactcaagctgggtgacgtggtgcaattcaacctggaagacgagaagcgcaccgagttgaagggcaacgcaacgacggcctctcttgccaagaagaatctttttggcccggcatggctggacttcgacgacgcgatgcaggatgagatcgtctggcgtttggtgacggaggaaagcgaggaggcgctggtgcgctggctgtgtgagaccacgggcgtggacgaggcgcgggccagcgccatcgccaacgcgggcttgcccgagggctacggtagcctgagccgcaaggcactggcgcgcatcgtgcccgcgttgcgggagccggaaatggtcgaagggcaagcgctgccgcgcacctattcacaggcggtgcaagcggcggggttcgcgcaccacagcgacctgagctttgacttcgagcacggcagtgacgaggtagaacaggtgggcgaacgcaccatcgcttcaacgggcgagatccagcctgtctacgccttcaagcaactgccttattacggcaaacccttgcagcgccatgtggctttcggcactggcaagcccgaagacccggatgaaaagcgctacggcaagatcgccaaccccacggtgcacatcggcctgaatcaggtgcgcgtggtggtgaacgcgctgatccggcgctatggtcggccgaccgaggtggtggtggagctggcgcgcgacttgaagcaaagccgcgaacaaaagctggagacgcaaaagcggcaagccgacaaccagaagcgcaacgcgcgcatccgccaatccatcgccgagattctgggttgcagcgaagagcgggtgaagcacgccgacgtccagaaatggatcttgtgggaagagctgagcttcgacgtggctgaccggaggtgcccgtacagcggcgtgcagatcagtgcgcgcatgctgttgagcgacgaggtggaaatcgagcacatcctgccattctccagaacgctggacgactcgctgaacaaccgcacggtggccatgcgccatgccaaccgcatcaaacgcaaccgcgcaccgtgggacgcgcgcgaggagttcgaggcgcaaggctggtcatacgatgggattttgttgcgagcagaacgcatgccgctgcgcaagcgctaccgctttgcggccgatggttacgagcgctggctgggcgaggacaaaggctttctggcgcgcgcacttaacgacacgaagtacctgtcacggatcgccaagcaatacctgcaactgatttgccccggcagcggtgtgcgagtgattcctggccaactgaccggtatgctgcgctggcacctcggcttgaacgatgtgctgggtttggatggcgaaaagaaccgcaacgaccatcgccaccacgccgtggacgcctgcgtcatcggtgtgaccgatcaggcgctgttgcagcgcttcgcgagcgccagcgaactgagccacgacgaaggtcggggcaagttggccaaggattttcagccgccgtggccgacctaccgtgaacatgtccaacgggcagtcgagaacatctgggtgagccaccggcccgatcatggctacgagggcggcatgatggaagaaacgtcctacggcatccgcaaggatggttcgatcaagcagcgcctgaaggcggatggaacgaaagggcgggagatcagcaacctgatccgcatcgcagaagcatcgcagccgacacgccatggcgtcgatgacgagggcaacccgttgccctacaaaggctacgtaggcggcagcaactactgcatcgagatcacgcgcaacgagaaggggaagtgggagggaacagttatttcaacctttgacgcgtaccagattgcccgccaacagggagtccaagctctacgctctgcaaccgttggccagaacaagcaggcgctggttatgcggttgacaatcgatgattgcgtgcgtctggagcatgaaggaagggttcgaacgatgcgagttgcgtccattaattccgcgggacggctgagcttggcagaacatcaggaggccaatgtagatgctcgtaatcgggaccctgcgggcgattggcgctacacctacaagcaggcgggctcgctccaaaaagctaaaggtcgcctagtcacgatctcacccattggcgagcttcgtgatccaggctatcgagactaaacggctaggtcaccatgatcggccgcatcgtcgagatcgcagacgaccggcgacacttgttcgtcaatcgcggcttcatggtggtgcgcgacacggagggcgagcgcaaggaactgggccaagtgccgctggacgatattgcggccgtcatcgccaacgcacacggcattacctacaccaacaatttgctggtggcgctggctgagcggggcgcgcccttcgtgctgtgcgcggcgaaccacaatgcggtgggcatgctgctgacacttgacggccatcatgtccaatccaagcgcatcgaggcgcaaatcaaggccagcctccccatgcacaagcgtctgtgggcagccgtcgtcaaatccaagctcgaacagcaagctgccgccctggaggccgcgggcgcgccaacggctccgttgagcgccttggtgcgcaaggtcagaagtggtgaccccgacaatgtcgaaggccaaggggcaaggcgttactggaatctgctgtttggcaacagcttcaggcgcgatcaggatggcgatggcgtcaacgcgctactgaactacggttacaccatcatccgttcggcgacagctcgcgccgtggttgccgcagggctgcaccccagtattggcctgcaccacagcaacgacggtaaccccatgcgcctggtggacgatctgatggagccatttcgcccgatcgtcgacctcaaggtctggcagttgcagcacgcgggtgaagagcaagtaaacccggaaaccaagcgagccttggtgcgcaccttatacgacgacatgcaaagcagtgcgggggcgacaccggtcatggtgtgcatgcaacgcttggccacctcgttggcgcaggtgtacctgggtgagcgtgaacggcttgagttgccgttgccgggtttaccattggcattggcaagcagccttgacagtgagtagcgcactcccgccatgctctcggggtacaggctcatgtggatgctggtgatgttcgatctgccagttcttgagaaggccgagcgcaaagccgctaccgatttccgcaaagcgctccttgacatgggcttcgagatgagccagttgagcgtgtacatgcgcttttgcaccagccagacacagcttgacacctatgccaagcgggtagagggcgcgctgcctccaggtggtaaagtgaacgtcatgcagttcactgacaagcagtacgaacgcatcatcacattccacggcagagccaagcagccgcccctaaaaacgcctgaccagttcgatcttttctgatgctacacgatgctttcctggacagccaaacgcaacaaaccccttgtgggacaaggggttgccgctgacgcattttagatcactgggatttgtggtctagccggaactacgccggctgcaatgcgctggccatcggcattttagatcactgggatttgtggtctagccggaacctggacaaagttctcgacatcgatgctggaattttagatcactgggatttgtggtctagccggaacaagcgttgcctgatcgtgcccgagctgttcattttagatcactgggatttgtggtctagccggaacctgcgcgccgagccaggcgcagacgccggcattttagatcactgggatttgtggtctagccggaaccgccgccagcgccgtccaaccggcggacagattttagatcactgggatttgtggtctagccggaacccgcgctgcgtgcccacgcgcgctatcttgattttagatcactgggatttgtggtctagccggaacctaactttaccctggacccatcttcatggtagattttagatcactgggatttgtggtctagccggaacctcaggctggttcagggtgacggtgcccatattttagatcactgggatttgtggtctagccggaaccggcgtcgacgcggatcaggtcgccctgcaattttagatcactgggatttgtggtctagccggaactgcgctcgtactcggcggcgcgggcgcgctattttagatcactgggatttgtggtctagccggaacagcagggccgcgcatgaccggcaccggaacattttagatcactgggatttgtggtctagccggaacgggcaattcatgggccatcaacgccgcccgattttagatcactgggatttgtggtctagccggaaccaacgacgccggcgtgtgttcgttgtcggaattttagatcactgggatttgtggtctagccggaacgcccgccacggcctcacgccacgcatcgcgattttagatcactgggatttgtggtctagccggaactagcgcaatgcccgtctggccgtagccgtcaattttagatcactgggatttgtggtctagccggaacccggaagaagtcgcgatcgatcgtcaggccattttagatcactgggatttgtggtctagccggaacaatgtggctgcgccagacatgggcgcgcacattttagatcactgggatttgtggtctagccggaacctgcaaccgcttgcttcccgatttggggtattttagatcactgggatttgtggtctagccggaaccacgacaatctgcattcgcgcgtggcgcaattttagatcactgggatttgtggtctagccggaactcattgccagcgcgcggcgctcttcttcggattttagatcactgggatttgtggtctagccggaacgcgcaagcccgacagcacacgcgcgcccagattttagatcactgggatttgtggtctagccggaacaaccggggcccatcgcagctccgttcgcccattttagatcactgggatttgtggtctagccggaactcgccgctggcgggatcacacgatcagcccattttagatcactgggatttgtggtctagccggaaccagcagcgtgcgcaccttcgcgcgcaaaccattttagatcactgggatttgtggtctagccggaacgctgacgttcttgatgttcaggaagtcgtcattttagatcactgggatttgtggtctagccggaacggggcgcgattacgagggcttcgacccgagcattttagatcactgggatttgtggtctagccggaactgctcgtgcgcgtcttgcagttcggcgaaattttagatcactgggatttgtggtctagccggaacccagctggcgcggcgacgcgtcgggcgcgattttagatcactgggatttgtggtctagccggaacggtgcgctcgcgcggcgggcagctggtgaaattttagatcactgggatttgtggtctagccggaactgacgggcctgtctaccgcccacggcaagattttagatcactgggatttgtggtctagccggaacctggcgcaccgcggtgacgagcgtgccttcattttagatcactgggatttgtggtctagccggaacgttcccgctggcgtgtccgtccagcggttcattttagatcactgggatttgtggtctagccggaaccctgcagcgggcatgctcagagcgcccggaattttagatcactgggatttgtggtctagccggaaccgccggccaggtcggcagcgggcggcggcgattttagatcactgggatttgtggtctagccggaacatggtcgcgcactacgaaaaatggagcggtattttagatcactgggatttgtggtctagccggaacgcgaagccgcaacgccgcccccttgtgtgcattttagatcactgggatttgtggtctagccggaactcgcctggccgccctgcgtgcgctggtagaattttagatcactgggatttgtggtctagccggaacttctgcttcggcgtgtcgcccttctttccaattttagatcactgggatttgtggtctagccggaacagggggctgcggcggcaccggcgcgcggctattttagatcactgggatttgtggtctagccggaacgcagcgccgccagtgtatcagctgtaggtcattttagatcactgggatttgtggtctagccggaacctgatccatctggtcttgcgtttgcgggttattttagatcactgggatttgtggtctagccggaacgtgcgtggcgggtcagcctggttacgtgccattttagatcactgggatttgtggtctagccggaactgtctcctgtaggtgatggcagagcctgcaaattttagatcactgggatttgtggtctagccggaaccctcgctcagatcgagagcagcggcggcggaattttagatcactgggatttgtggtctagccggaacctacccatccagacggtgccgcacactggtattttagatcactgggatttgtggtctagccggaaccccctgcatggtcttgagcgactgggcaagaattttagatcactgggatttgtggtctagccggaacagaggcattgatgcgcgacgtggcggccacattttagatcactgggatttgtggtctagccggaactagactgtgctcaaccgcgctaatatagcgattttagatcactgggatttgtggtctagccggaaccattcgccgtactcgcacacctatccgcccattttagatcactgggatttgtggtctagccggaacggctccacccgcttcgactacctgaccggcattttagatcactgggatttgtggtctagccggaaccgcgaacccgatgaactgctttccctcgccgattttagatcactgggatttgtggtctagccggaacctggctgccaacctggtcaaagacgccttcgattttagatcactgggatttgtggtctagccggaacttggcgggcggcgcggcgcgtgcccatgtaattttagatcactgggatttgtggtctagccggaacgcctgagggtcaaccgaggcgcggtcaatgattttagatcactgggatttgtggtctagccggaacgtaagcctgttcaagtccatcctgcccggcattttagatcactgggatttgtggtctagccggaactcggaaccgtaaacggatgaagcgccatccattttagatcactgggatttgtggtctagccggaacgccggccgccgccgctgcatcgtccagcacattttagatcactgggatttgtggtctagccggaacgtctgcgccgctgacttgaacggcgtcgggattttagatcactgggatttgtggtctagccggaactcccgcacccatgttgcccccgctttctgcattttagatcactgggatttgtggtctagccggaactggcatccagcccgctcatcaggccgatgtattttagatcactgggatttgtggtctagccggaacacgagggcacgctgcccccgatgaccgatgattttagatcactgggatttgtggtctagccggaacgttgtcgtcgtcattgttctcactcaccatattttagatcactgggatttgtggtctagccggaactgccgtttcccactacgcaaagacggtgcattttagatcactgggatttgtggtctagccggaactataagtcctatttgatactaaaggataaaattttagatcactgggatttgtggtctagccggaacgactgggtcaacaccgacgatttccattcgattttagatcactgggatttgtggtctagccggaaccatgtcgcgcagctgcaagtcagggatgccattttagatcactgggatttgtggtctagccggaacattgcgatgctcgtcggcgccgccgtgctgattttagatcactgggatttgtggtctagccggaactctgatggtcatgcagaacctctacatcgtattttagatcactgggatttgtggtctagccggaaccgaccgcggtcaggccaacaagcgccgcgcattttagatcactgggatttgtggtctagccggaacgaccagcccgtgccacccgtgccgccctggattttagatcactgggatttgtggtctagccggaaccagtgtggctggcgggcggtgcgggccgctattttagatcactgggatttgtggtctagccggaacgagctggcgcagctggtgcgcaatggccgcattttagatcactgggatttgtggtctagccggaacaggtggattatcgaaatgaaagataatacaattttagatcactgggatttgtggtctagccggaaccatctgccgggcgcgctgctcggccaggcgattttagatcactgggatttgtggtctagccggaacacgtacttcgccgccatgccacacagcaccattttagatcactgggatttgtggtctagccggaaccaatttgccgtgccgatcaatcagcatctcattttagatcactgggatttgtggtctagccggaactgaaaatcaggtgtcggcgatccgcgtcaaattttagatcactgggatttgtggtctagccggaactttttcgtccttggcccagccgcgctccagattttagatcactgggatttgtggtctagccggaaccgtggccgtggccttcaccgccggcaacctattttagatcactgggatttgtggtctagccggaactttgaagtgttgacagccacagcaagccccattttagatcactgggatttgtggtctagccggaactgcaagtggaggcaagcgcagcattgccgcattttagatcactgggatttgtggtctagccggaactcgaggtggcggcatgatgcaaaccaccctattttagatcactgggatttgtggtctagccggaacgctgtgtatgagcgtactgttcaaaaaacgaattttagatcactgggatttgtggtctagccggaactggctctagtttatatcaatctaaaccttcattttagatcactgggatttgtggtctagccggaacgaaatgaccgcaccccagtcacaccctaaggatggtgttcaaaaccccggtcaagcccggattgcgtaagcgaagtgcggcaggaacaatggcgtcatgacccagc

SEQ ID NO: 1877 - DNA, 10080 bp, synthetic construct
  source 1..10080: mol_type = other DNA
  misc_feature 1..10080: note = Synthetic
cagacatatttctattctaacaagtgtcgcgatacaatggagttagacgggcctccccgcatgttggcatggcaatctggtcaggtcgggaacgaagcagccaaacccattccccagcagtgccgggggtaaggctcgtctctcttcattgcaagtctttgtttagtttgatttttgtttttctaagcaatcacttgtgtcaccgaactgtgtcacctaagggcattaactgcttttctattggggtgatacatgtctaaatcaaatggaatttttcaacgtggaagctctcactatttaagagtcgtattaccaaaaactcatccactgcgtagttcatacaaaagcggcaaggttattatttctcttggtgcatgtagttatcgtgaggcattaactttagcggcaattaaacgagctaatatcatagagtcaactgaatctataaaaacacaaacaatcaaaagtaatttagtttcatcaaagcgcaacccatccgcatactaccttcgagatgtatttgaacgttggagagaatcaaaacctcggagtagcgatgccatcaatgcctgtatgcgagccctgttgttatatgaagaacaaacaaaaaaccctctacttaatgaactaaaaagggtccaaggtgatagttttagagcttggcttcagcaaccagaaagaaaaaccacgagtaaaacagcgtatgaccgatttacatgggtaaaaacacttctaaaatatgccttcttagatttggaatttataagtcgtcacccgtgggagggaatagagttagttaaagaaacaaccaatcgacgacgaccatggactaatgatgaattactaaaactatttggacaagacctattcacaaagcataaactgcccagtgataaaaaaagcggctttgatgccgcatactggattccgttattaggaatctacacgggagcaagactcagtgagttagtccaattgcaaataaaggacgtacttattaaagacgaaattacagctatttcaatctcaaatttagggattggtcagcaacttaaaacatctgcaagtgttagaacaataccaattcatactgagttaataaggctaggttttttaaactacttagataacattaaaaatgaaggtcacgaatcactatggccaaaactaaataaacgtaaagacaaacccggggggtatttttcaaattggtttagtgacttcagaaaaagtatcggacttacaggatatccagactttcattgcttcaggcacaccgtcaggagccaactcggagaagctgaggttccagaacatgtaatagatgccatcctcggccacgaaatcaaaggtagtactgggacaaaagtttatacgcatagaacactcaagactcttaaacaagctatagaactatcggctgtatctaggcataaaagtctggcgatgttgaagcgttactatcatccaaatcctgaactactggctgaaaaattaggttaaaaaaccaacaaaaatatttaaagtgctttaaaatttaagtatgtatgtaaaaatacatgaccatcataaggggtggctgtcccagaatgcgattgcatatgaacacgccagcactgcacccggcgccaattaaagccgtgggccgctacaaaaagattggtctccaacatccgttgggggtctagcttttttagtggggtctccaacattttataaatgttttaggagatttaaatgttaaataattcaaaccagttggaactttttcaaagccgtcttcaagacaaggctgaccttgtcttgtatgaaaacctaacaagtacctcagtaattccctataacaaagcatggcaaaaatttctattaactttgactacgccaattatttcaaccaagaaaggcattcctttaattggcccatataagcttaaccaaaacctatcaagaagaaatgagaatgttgaatctgtttctgctttggtatttgatattgacaacccaaaaccatacaagctgaccaatagcgaactaattgaatgggaaaagaaccgtactaacaaggaggaagtatgaatcccttcgatatgccatacggtcatgctgtatgcccctcatgcaacggtgacgtaaatttaaatcaagaacgatatggatttaatgctccagtaactagaggctctcatgagtttttatattatttcctatgcaccaaatgtggaactgagttaaacaagttaaatccgactcaatcggaagcattcgttaataaaatatttatcgccacaacagatgaatggttaaagggcgataaaacagagtatgcaataacaactcttacagcattaattgcgaatgattttgacccagcaaatgcaattgattacggcgtacctatatcaaaagagctaaatgacaagattgtatttggtgagatagacccgtatgaaatagcaccaatactaaaacaacttgcaatgaacggcacaaaagaaaacgggactgttgagagtcccgagaaagatactacaaaatgttaatagattctaacttgattcaacagcttccacaagagctgaaagatttacaaacgtttgtcctttgggagcattaccttgatgaagatgacccaaaaaaacgaccatttgattggcgaacagcaacaggacatggcaaaggaaataatgaccctcacctacatttaagttttgatgatgctttagccaagattaaagaaattggtagcgaagatatcgggctagcaatatatcagccagatacaggaacgcctattatgtttgaaggtaagcagactcttttacacatagtggacttagatggttttgttgcggagcttgacggtaaaaccaagtttcttggattgggtagtgaaatagttgagctatgcaatgacagttattttgaggtcagcccttctggatgtggtgtaaagatattcgtagttagcgatatgccaccaaccaaaaaagaaacattcaagctacccaaaaacgagtatgcagatacataccctaatgttaaaaaatacaacgaatcacatgcggttgaaattttcagtaaagggtactggaactgcgttactggtgatagatggtcaaataaaaaccccaaactaaagttcgttagtgaagcccaattaaaagaggtatacgccctacttcagtccagggctccagccaaaaaacaaccagaattacttcaacatttaattgatacaccacaatctaataacaagctcacgccaaaaggcttaatcaacgtgctagcacgaatagataatcaaattgaggaagcatggtcagatgtggcaaacagtcttgcaagggtttacggaaggtctggtgaggattatttcgtgaagtacagtaagggggaatacaacaaacaaccttatgcaaaatataaagagcttgatgtactcaatcggttcaggcgtgctttaagtgaagttaattcaagacctagtggatatggcataagaagactttgccaattagctggagttgacgttacacaacaagaatttgaagttaccaacacagtcaacaaccaacttcttttcaatggcatgacagctgaagaactatcacttaaaacgtttccaccaatggaatgggcaattcaagatattctgccagagggtagttatcttcttactgcaagaccaaaggtaggtaaatcatggttagctttacagatgtgccttgcagttgcttttggcggaactgtatttaataagaacgttgtcaaaggcaaagcagtgtatcttgctcttgaagataaccccagaagacttaaatcaaggcttgagcaattgcgacctcaaggttatgcgacaccagacttaattcttcacacagattggcttaaatttgacaaaggcggtgttgaaaagctgattgaattgattgaaaaagaaaagcctaagttgattgtgattgatacctttgccaaggttcgtcctagtatggggaataaaaacgtctatgaaagtgattacaaagcacttgagcccattaccaaagttgcaaaccaataccgttgtacgattcttgttgttcaccacaaccgtaaagggaaacccgaaacagacccattagagcaagtcagtggctcattaggattatctggcgcagttgacggtgttctagtaatagatggcaaccgaagtgacaagatgtacaaactaagcctcattggacgtgatatttcagatgacgatgacctcgctatagcaagacaagctaacggtgagtggcgactacttggcgatgccaaaactgtgtttatcagctcagagcgtaaagacatagcagagcttctgaagttcaatcctaaagggctaaagccaaaagagatatctgacatgcttggcaagaaaccaactgctgtgagaaaactactagtctctatgttgttagaccaacaggttatcaatactaaaggcacatacacccaccctaatgcattatgtataggtaacagtagtaacttagataacatcggtagcagtggtaactgcggtaacaccagtaactctaatcacttggtaactactcatgcataagatagcgaacagagtgattaatttccttgggataaatggataaagattctatgctctttaaacgaccccctacatacagtgcaataaacagtcaaatatgtgtacctaagttactaaagttacttctgtactgggtgctaccactgttactaaagttaccgctgttaccagagtgattggagttaccgaaatatgccattacctagcgttgccaaatacggtgcaaaacaatgtaaagctattagtaagaaccttaagcgaaggtgccttaacccagctgcttttggatgcttaacctgcagataccacggagcttggcgaaaagattctagaaaaacaccacaaggcgcaaaccatcagcagtataggcacggtgaacgtacgaaagaatcgattgaagaacaccagaaaacactattacggttgcatacgctggaagaaattggtcatcatattaagatgtttgctgaaggctcaccacgaactcgaggaagaaagccgactggctgggaaccactggacttaaatgaccctaatcagcttgctcttgcaatactgaagacgattaaaaattaaaaaagccgcacatggcggctttgcatttggtgcatttttctgcttgttagcggtcaaagcacatatcccaatcgtatatagttatattataagactaatactatgaaagagacaaatgtttcctaaattgaaatttcgcttagcactagacattggcacaacttctattggttggtgtcttataaaaattaacgaagactatcagcctcaagcgattatcaagatgggggtaaggatattttctgatggtcggaaccccaaaggcggtagctcgctggcagtcactaggcgtgaagcaaggcaaatgcgaagacgcagagaccgcttgttaaagcgaaaagaccgcttactaaaggccttaatcaagcacaaatttttccctacggacgagaccgaacgtcaagcttgcgtaaacttagacccatacgaacttcgtaggaaagcactttacgaacggattgaagggaaagaatttgcaagagccctatttcacattaatcaacgtaggggtttcaaaagcaacctgaaaatagataaaaaagataatgatagtggagcgcttaagcaagcaattatcaagttacgggaaaaactagctacggaaaactgccaaactctaggggaatggttggctaaacgacatgaacaaggcttaagtgttagggcaaggctaaggggtaatacccctaaagaaaaagcctatgacttttatgctgaccgagccatgattgagcatgaatttgacttaatgtgggaaaaacaatcagcatttaatccgacattgtttaatgagatggcaagggttgaactgaaagatattttgttatttcagcgtaatttgaagccagttagggctgggcgttgcacattaattcccgaggaagagagagcaccgcttgcattacccagctcacaactttttagaatctatcaggaagtcaataacctcaggattatttctgaacacttatctgaccgctgtttaaccactgaggaaagaaataaggtggttaatctgctgaaccaaaagaacaaagttacttttaaagcaattgcgaaaaccttacaaataccatctggctcatcattcaatctagaagacattaaaagagattcattaaaaggaaacgctaccgccgttaacttagcaaaacctgaatgctttggagacagatggcatttactaccccttgccgagcaagatttaattgtcgataaattactcaatgaagcaagcgaaagtatagtcattgggtggttaatgaataagtacgggtttgacgaaaataatgccgaagaaatagctaatacaaccctaccagagggctatggtaatctcagcaaaaaagcgcttgataagatagtcccgcatttaattgcggatgttattaccttcgataaagctgtacttgctggcggatttgaaacgcatagtagcttagcctattcacaacaaactggcgaaataatgccatctctaccctactatggtgagcccttaagacgacatgtggcatttgccaaagataaccctaaaaatgatgaggaaaaatacggcaagattgcaaacccgacagtacatattggtttaaatgaattacgcaaagtagtaaatgccctcattaagcggtatggtcatcctagtgaaattattgttgaagtcactagagatttaaaaaatagtcgtgagaaaaagcttgaaattcaaaaagaacaaaaggtaaatcaagatagaaacgaaaaactagttcaagaagcctgtttagccctaggcttaaatgcagatagtcttgaccggtcaaaacgaagagagttatctcaaaaaatgcagctttggtatgaattaaacattgccgaccctatcaatcgttgttgcccatatacaggcgaacaattgagtatttcaaaacttttatctaatgctgttgaaattgaacacatactcccatactccagaacgcttgacgactcattaaataacaaaacagtttgtgttagtcgtgccaatagagataaaggcgatagaaccccgtatgaagcatttggctcttcaaaagtagatgggtatgattacgatgcaattcttcaacgagcgtcattaatgtctaaaaacaaggcgaaaaagtttgcccccgatggctacgagaaatggctaaaagaagacaaggatttcttagcccgtgctttaaacgatacagcatatttatctagaattgctaaagaatatttatccttggtctgcccacccaacagagtatgggcaattcctggtcgaatgactgccatgttaagaggaatttttggacttaatcaatttctatctggcgatgaaactaaaaatagggatgaccataggcaccacgccctagatgcggctgttattggtattactgaccgaggtatgttgcaaagtgtgtcaaaagctaatgcccgtgcaagagggttgagacttaatcgcctttttgagaatatgcccatgccttgggttacgtatagggaacaggttgaaaatggcttaaaacacatcatagtgagctacaaacctgaccatgggtatcagggcgctatgcataaagaaacagcttgggggttgagagcaaatggcataggaacacgaagagtaaaagaagaaggtgcctcaacaagaagtcgtattgaagaaaatctgaacttggtagaaataaatagtacgaataacatagctcgccatggactaactgaagatggcgatatgaaagcctacaagggttatgtgggtgggagtaacttctgtattgaaatctgcgaggttgagagcggaaaatggattggcgaggtcatttctacgtttaaagcttatcaagtcattaggtcacttggtgaagttgctggttatcaacgtttaatgcattcatcactaagccagtccgaaaaaaaacttgtgatgcggttgatgattaatgattacgttaagttaaatcataagggggaggacttgttgctgagaatagtaaaaattagtgccagtaacgggcagataacattttgcgaacatcatgaggctaatgttgatgctagaaatagtgataaagctaatacatttgcatacatcactaaaactgcaggctctctaaaaacatccggcgctgtaaaagtggctgtaaatcccataggaaaagtggttcgcctaattaattaaactatgcaaacacgaatcattgagattgcccaagataacaggcttctatcagtctttcgtggatttttaatcatagaagatacgaatggcgtcaaaaatgaactcgccagaataccgttagatgacattagtgcgctaatagttaacgcttacggtatgacgtacactaataacctattggtagagctttgcgaaagaaatataccattcgttatatgtggaaaaaatcacaacgtttcagggatattattctctactgaagggcactaccttcaagccaaaaggtttgatacgcaaataaagtgctcacaagagctaaaagataatctttgggtaagtgttatcaaagctaaattacattgacaatcagaagtattaaaggcaattggcgcaccgtttattcctgttttttccttaatttcaaaaatacaagaaggtgataaaacgaatattgaggcactagcggcaaaaagatattggcgcttgttatttggtaaaagcttccgaagagataaaaatctaaatgatattaattcacttttaaattatgggtactccatccttaggtcaactaccgctagggctgttgtttctgttggtcttcatcccacactcggcattcatcacaagaatgaaggaaatcctatgcgacttgttgatgacctaattgaaccttatagacctatcgttgacttaaaggtatgggctctgtcacaaagtggtcaagttgatataactccagatacaaaaaagcaactcgcatctttggtatttattgatttaatctggtcggatggcacctcaccccttaacgtaagcctacagaaaactgctcagtctttaacgcttagctatttagatagtcaaaacaaacttgagctacccgatattttccctgtacaaaatattttaattaaaccgtgaatgctatcaagctatcgacttatgtgggttcttgttatgtttgatttaccagtagttgaaccggacgaaaggaaggaagctcaaggcttcagaaattttttacaagataacggctttgaaatgactcaatactcggtgtatttgaagttctgctctagctctagtcaagtcatgacaatttcacgaaaaattgaagcaaaccttcccaaaggaggtaaggtaagcatcttgcaattcacagacaagcaatacgaaaagattatttcatttagaggtaaatataaaaatcctcgcaatcaaaaccctaaccagtacgacttattctaaagcgactcattaatgctaaattaattacataaaaaacatcaacttaccgagttcctggtttaaacgattgggatatgtgctttaaccggatcaaaacctttccatacccaacattcatcttcagtttaaacgattgggatatgtgctttaaccggaacattgacgtttaaaagtcgcaattcattaaaagtttaaacgattgggatatgtgctttaaccggaactgcgtattcgtggcactcaataaaagtatcagtttaaacgattgggatatgtgctttaaccggaacgaatacaagtttacaagtgatacaaaaaatagtttaaacgattgggatatgtgctttaaccggaacgataagatagacacatgaattaaatttttagtttaaacgattgggatatgtgctttaaccggaacaattctgatgaataccttttctttggatggagtttaaacgattgggatatgtgctttaaccggaac

SEQ ID NO: 1878 - DNA, 9502 bp, synthetic construct
  misc_feature 1..9502: note = Synthetic
  source 1..9502: mol_type = other DNA
tacatgtgttcaccggacgcttactctcttattttcatatcgtaacagttgctttttataatgcgaattataataaatttttaaataacattttaaggtaatagtaatatggcctttgctagcttatttacactgatcgatgatgtcgcaacagttttagatgacgtagctattatgactaaagttgctgctaagaaaacagctggcattgttggtgatgacttagctgttaatactaatcagttaactggtatttcggctaatcgtgagttgccggttgtatggcaagtaactataggctcattaattaataaagcgattatcattcctgccgctttattaatctcatatttctttcctattatgatcaccatcttattaatgataggtggtgcatatttagcctttgagggaatggagaaggtacttcatcatttaaaatcgaagttcttaagtcattcacccgatagtgaagaggtgattgtagataacaccgcagatcctagtcaagacaaagacgtagaaaaggctaagattcgtggcgctattcgtactgattttattttatcggctgagattatcatcatagccatgggtgtagtagctcatatggacatatttcctaaaacattagtaatgattgctattggcttaggtattactatatttgtatatggtcttattgctctaatcattaaattagatgatattggtctttggttgatgcaaaaagaatcactacaattacaaaaactagggcgcggcatgattatgttcatgccaaagttaatgcatggcttagcaattattggtacgattgcgatgtttttagtcggtggtggtatttttactcataattggccctggttacatcagataaaagagtcaatagtgggaagttcaaccatcggtggtgtggtaattgacctaggtgtaggtatgatagtgggattagctgcatatttagtgttgcagtattttattagtgtgcagcgagcgcaaccaagaaatctgaccattgattaataaggtatgtaaatagttaattatgaaaatttatcattatgactctgatgataagtattttaattcttcataagacgtaactgatgattattatttggcttatgtagctgcttttaaattagagtcaatcactgacttaagtgtactaatcatgtgatagaggggcatatatggtatttaaatgctccttatgcttatgtttaattagaaattattctttgcgttggtagtattaaataacttcacaatggcagatagctcaatcgtattaaaagaattaggatttaataaatgaattttgaaaacttattcaaaccattagacattgctgctactacagtaaaaaaccgtattttcttggctcctttaactcgtcttcgtgctcaactacctagtgaagttccttctgtattagctaaagagtattactctcagcgtgcgagtggtggtttattaattgctgaagcgaccaatatttccccacgcgcgcgtggatatgaaggtgccccaggtttgtatagcgatgaacagcagcaaagttggcaagaaattgttgaagcagtacatgccaagggttcgaaaatggcgattcagctttggcattgtggtgcgatatcacaccaaagcttattggatgatgggcaatcgcctatttctgccagtgcgaataatgtaattggagcgcgtacaagcgtacgcaatgaagacggcagtgttcgccgtttgcgcacaacacctgctcgtgaagcaagtttagaagatatacagcaagtgatccgtgactttagcgatagtacgcaacgcgcaaaggcggctggttttgattttgtagaaattcatggtgctcatggttatttattagctcagtttttttcacccaatagcaattatcgtacggatcaatacggtggcagtaaagaaaatcgtgcgcgtttgatgcttgaagtaatagatgcatgtgtagcggcttgggataaagaccatattggtattcgtatttcacccctcggctcatttaataatgtcgatatgggttatgacgaagaagagtcgttatggctagtagatcaaattcaacaacggggcattgcctttttgcatatttctgaacccgattgggcaggaggtacgccacttagtttggagtatcgtaaacaaatacgagagcgctttaagcaaactctgatttgcgccggtgcttatacagcagaaaaagctaatcgttttattggcgatggtttaatggatgcggtggcctttggtcgagacttcttagctaaccccgatttaccagagcgttttgccaaaaatgcagaactaaatccgatgcgtcagataggggtttatggtggagatgctgaaggctatattgattacccaagactaggggagtaggtgagtttaaggagtgtcatgtatttagctttatcatgcgcattgtcagattaggtcaaaactaatacacgtacagaaggggttttcgtttctcctaattacgtcataaaattctcatcatcattatcctacaatgaagataattttttataacgtttaagttgagtctatgaaattattatcgctactaattcttaacctctgcgttgctcaatcggtctatgcagatgatgaacgtagttggatggtgagtggtgatgagcttttgtataacttaagggctaatgagtcaaaccaaaatttaacgtcatcgtcatctcttttaaattcgcaggctcagggttatattgtggcagtgatggactcaagggattggtgtatgaaagggcaagttttgcctcatgatgtctacgatcgagtgcatagctatttaaactctcttgataaagatgcattaagtatcaatgcgagtgagcttgttaataatgctttagaaacttattgcaaatcttaaatttacttatcgcaataaattaagtcgatatttgagaagccgtttaagtcttttttatgttttgatagtactctttagaaaaatcaacaaagattatttgcttagagcatgagtgtcgagtagttaatgtttgacatgttaaccgtattttatataaccattttatccaattcgcagtattgtatttctgaagataaagttttcacacaaggcattttatgcgattttttgtagctttaaatactttttatgaagaaaggatgtttttcttttaatgggatatttgtcattgaaaatagaataggtagctttggggaggatggttaataaccactcttcattgttatcaaaaaaggcaaatcgaattttatccggagtggcgatgagtagatttcttaccatcccttgcgcatacatggccgagagctctaatgaatcgataatctttaaatgattatcgacataataaatgtaaagcgcttcttcaaaagggttatcttctgtgatcaataaaaggtaattattgccaacacgatattgagcttctaataccgcaccgcttaatgataattgcttttttaactgtttgtgctcaagcagaagtgttggggttttgtcgatgacttttattacatcgacgatttgaaactcattgatttctttaatgctcattagaaaagccatccacaggtgagatctgtactaagtgcagctagagcacctcctacaaacacacctaaggtgacacagaagggtgcagctgggccacacgcaagtcctgcagcactgccaccagcggctgccccaataaaaccacctccaatgattgcaccttctctagcaactgcgcgtgctttattctctgcgaaagtgatattgtaaacggccgcaccaagggtaacgactatcaatcctcgacccagtttactgtatttacttgccaaagcattcatcgaaggtcttgcacgatcggcgctctcaataatctctaggtaaatacttttctgattggttggcgacaaatttgcaaaagacgcattaaattttttatgagcatatttgtccgttagctcagcgagcgttaagccattttgctttaatttaaccgctaccgatttccctatatcactagtctttaggcgatgcgcttcaaggatgtgattacgtatttcttgtacttgttttgcagctttactagcagtaagcgcaccagacttaactttcagcctgtattcttctgatagttttttggtctgtttgatgtaactcattctgacctgactatcattgataaatcgttgagcgaaattcaatgcttgagattccatttgcgataatgaagcttctagtaaatttctatcataaagagattccactcaatttctcctgttgattagcttggtcagacacgttaaatgggggttatatgctttgtgtgattgagaaagcagttgccgtacatattagcagcttgatatttcagttgcgtgaatgaggggggaggagtggtagattgaggataaaaaataaaagagcccgcatatagcgggctctgcattttatgctttaattagcttgttagcgactaaagctcaattcttaatctgaaattgtacaaacattataagctttgttatcctaattgtaaagtattgcttaagcttaaagtagtagaaaaatattaggagacaaaatgtattatcgtttagctttagatattggtagcaattcaattggttgggctatttttcttttaaggcgagctgaagagaattctcgactttacccttatgctatagctcgtgcaggaagtcgcgtatttcccgatggtagacatcccaagtctaaattatctaatgcagttcaacgacgtgaagcccgtggacatagacggcgtcgtgatcgttacttgcgtcgccgtagtagcatgttgagacagttggttaaatatggtttttttccaaaatccttagctgaacgtaaaaccttagttaaattagacccttttgaattaagagcgcgtggtttggattatgagttaagccccgaagagtttggtcgtgcacttttccatataaatcagcgccgtggttttaaaagcaatagaaaaactgattctaaagacactgatagtggcgtcatgaagcaggctattactgctttcaaagagaagttaaaaaaagagggtgcacgtacagtgggtgagatgctttacaaacgtattcaggagggtttaccagtcagagctcgtctacgcacttatgttattcctcaagcaaacgggcgtaatagtaatgtgaaaagctacgatttatatattgatagagagatgatggaagaggagtttgaacttttatgggagtctcaacgccgttttaaccctgcactatacaacgatgaagctaaacaacgactttggtccacagttttttatcaaagaccattaaaacaagtgagccctggtcgttgtacgtttttccccgaagaggaacgcgcaccagtagctctaccaatagcccaaaaatttaaaatacttcaagaggctaaccacttacgttatgtgggtgatgagggacaagccatagctctaacaatagaacaacgtaatatagttgttaatgagctatctaaaagtaaaagacgaacctttgatgctttacgtaagaaactaaatttcccagggactgtacgttttactatagaagactctaaacgtacgggtcttcaaggggatacggtttttgctgaattggcaaaaaagaccttatatggtcaaaagtggtttagttttgatttaacaaaacaaactgaaatcattaaacacttattagaagaagaaaatgaaagtgaattgattaactggttgataaagaatactgatatagatccggatgtagctatggaattagctcgtatctcattaccatctgggtatatgtcattgtctgaaaaggccttaaatgaaatcgtgcctgcattggaagaatcagtgattacatacgataaagctgtggagtctacatccataggtaaccattctgaagtaagtaaatatcatgacggtgagattatggataaattgccatattatggtgagatcttgcaacgacatgtgggctttggtaccaataatcctgaagactcagatgaggttaggtacggaaaaattaacaatccaacagttcatattggactaaatcaaattagagttctagtaaacgaactgatagatgaatatggacatccaacagagatcattgttgagctagctcgtgatttgaagttaggaaaagaagctaaagaacgtatacaaaagcaacaagctgagaaccagaaaaaaaatatagaacgaagagataagatctctgagttgttatcaataaaaccagaatcagtgagtcgtgaagatcttcaaaagtatattttatgggaggaattatcacttaatccattagagagatgttgtccttatacaggtaagcaaatcccgtgccataagatatatagctctaaagttgaaatagagcatattttaccgttctcaatgacgctcgatgactctatgaataataagaccttggtttatgttgaggcgaatagagataaaggtaacagaactccttatcaagcgtttggagaacaagaggtcgatggatattcttatgaagatatcttagctagaactgcaactatgagtaaagctaagtcttatcgttttgccaaggatggttatcaacgttggttacgtaatcatagcggttttctagctagagcattaaatgatacttcctatttgagtcgaatggctaaggaatatctcagtgttatttgtccacaaagtactaccgttatacctgggcaactaactgctttgataagagcacacttaggtttaaatcatatacttggcttgagtggtgaaaaaaatcgtgaagattatagacatcatgccgtagatgcttgtgttattggcattactgatagagctttattaaaacgctttgcggacgcaaataagtacgagcatcatggtgcgcgaagtcgattgcttgaacgactgccagatccttggccgacatatagaaagcaggtaatacgtgcaattgaaaatatttgggtaagccataaaccagatcatggacatgaaggtcaaatgcataacgaaacagcttttggtaaggttggaccaaaacagtttagatattttaagcgtgaaaatgatttgcgagagcctgtaataagagacaacccagaagctatggtgtcaatcaagagtcgcaaagcggtagatcgtcatggcgttttgaaagatggctcaccgaaaccttataaatattatttaaaagacagtaattactgcatagaaatatatagagaagatgatggtaagtgggcaggacacatagtgtctacttatgatgcttatcaaatagttagaaaggctggggtaaaggttttaagaaatcctgaatatgctcaaaatggaaaacctttagttatgcgtttaatgcgtaatgacatgctaagaatagaacacaacgaaaagcttatgttagtaagggtatgtaaaattaatagttcaggtcaaatgtcttttgctgagcattttgaggcaaatgtagctacaaggagttcaggtgctgataagaatttctcttatattacaaaatatcctaatagtttaaaagcatctaaaggacgattggtcactgtctctcctactggtagattacgtgatccgggttttaaggagtaacattatggtggggcgaattgttgagattgctggtgattacagaaatttgtctctaacgcgaggttttctattagttaaagactcaaaaggagataaagaggagttaggaagagtacctatagatgacattgatgccttaatcgctaatgggcatggtctttcatataccaataatctcttagttgctttggctaaacagggggccccatttattttatgtggttcaaatcatagtccagtaggggtgttatggccttttgggagtaattatgaaacttcgagacgtatcgaaacgcaaatcgaagcaaaacggccattaaagaagcgcatgtgggcgagtatcgtacggagtaaattggagcaacaaggttgtgtactaaaagctattgatgagcctgaccagtttattccgatacttatgagaaaaatacgaagtggtgaccctgaaaatattgaggctcaagcagctagaaggtattggactttattatttggtagcgctttccgtagagatagaaaagcagaggatataaatgcgcttttaaattatggatatacagttttaagagcaactgtagctcgagcagttattgctgctggcttacatcctgcgattggacttcatcacagcaatgcatcaaatccaatgcgattagtggacgacttaattgagccttttaggcccttagttgatttgggcgtatatcaattgattaaagaaggagagagtaaagtaaatgatgagacgaaacgctttttagtgcgtttaatgtatcaggacatgctgactgaaacaggggttacaccattgaccgtatgcactcaaaaactagcgatttctctagcacaagtgttccttggtgaacgagaaaagttagaactaccattacctagtgagccctttgctatgtaatgtttacggaggaaattatgctatcggggtatagacttatgtggatacttgtcatgtttgatttgccggttagcacgaaagcagaacgtaaagaagcaaccggttttagaaattttttattagatgagggttttgaaatggcgcaatttagtgtttatatgcgcttttattcaagctcaaaacaaattgaaacttgtagtcaacgggtctgctcggcattacctaaaggtggtaaagtaagtattatgcagatgactgataaacagtatgaacgaattatttcatatcaaggacagagtaaattacctgcaaaaaaatcaccagatcaattcgaactattttagaaaaaatgaaaattaacaatagaaaaccccgtaaatctctatataaaacagagcattacggggtttctagtttaacagattaagaattgagctctagccggaactgtttgtgttctacaccattttggtcttgaagtttaacagattaagaattgagctctagccggaacggttgcaactggtttagagatgcttagctgagtttaacagattaagaattgagctctagccggaacaatcactctatctgatacggctttagatgtagtttaacagattaagaattgagctctagccggaacgcgggctgtctatgatgcagctcatgaagcagtttaacagattaagaattgagctctagccggaacacgatttctttaatcgtaaatttatttttaagtttaacagattaagaattgagctctagccggaactgcagcgccataccaacgcgcacccattcaagtttaacagattaagaattgagctctagccggaactcaaacattgtttactcctagtgcctaaatagtttaacagattaagaattgagc

SEQ ID NO: 1879 - DNA, 8663 bp, synthetic construct
  misc_feature 1..8663: note = Synthetic
  source 1..8663: mol_type = other DNA
atcacgctgatgcgcgcgttcggccacatccacaggaagcgcggcgagtacgcgcgcccgcacatgccgtagttgccggcgccgtagctgccgccgatgatcaccgtgaacttgggcaccgtcgcggtggccaccgcagtgaccatcttcgcgccgtgcttggcgatgccctcgctctcgtacttgcgcccgaccatgaagccggtgatgttctgcaggaacaccagcgggatgcggcgctggcagcacagctcgatgaagtgcgccgccttcatcgcgctctcgctgtacagcaccccgttgttggcgacgatgcccaccggcatgccctcgatgtgcgcgaagccggtgaccagcgtgctgccgtagcgcgccttgaactcgtcgaactccgacgcgtcgacgatgcgcgcgatgacctcgcgcacgtcgtagggcttgcgcacgtcggtggggatgacgccgtgcagttcctcgggcgcgtacttcggcggccgcggcggccggcgcagcagcgggtcgggcttgcgccagttcaggttgtcgaccacgccgcgcgccagcgccagcgcgtgcaggtcgttctcggccaggtggtcggccacgcccgacagccgcgtgtgcacgtcgccgccgcccaggtcctcggcgctgacgacctcgccgatggccgccttcaccagcggcgggccgccgaggaagatcgtgccctggttcttcacgatgatcgtctcgtcgctcatggccggcatgtacgcgccgccggcggtgcacgagcccatgaccaccgcgatctgcggcacgccctgcgccgacaggttggcctggttgtagaagatgcggccgaagtgctcgcggtcggggaacacgtcgtcctggttcggcaggttcgcgccgcccgagtcgacgaggtagatgcacggcagccggttctgctgcgcgatctcctgcgcgcgcaggtgcttcttcaccgtcagcgggaagtagctgccgcccttgacggtggcgtcgttgcacacgatcacgcactcgacgccggcgacgcggccgatgccggcgatcagcccggcgccgggcgccgcgccgtcgtacatgtcgagcgcggccagcggcgcgatctcgaggaacggcgtgtcggggtcgagcagcatctcgacgcgctcgcgcggcggcagcttgccgcgcgcgctgtgcttggcgcgcgcttcggcgccgccgccctcggccacctgcgccagcttcgcgttcaggtcgtcgacgagcgcgcgcatcgccgccgcattggccttgaactcgtcggatcgcggctcgagccgcgagggcagcgtgggcatggggtctcctcggtcgaccgcgcgcatcgtgcccggcggcggtgaattgacgtttacgttaacgtcaattctacggagccgccatcggggtcgccccgggccgcgcgccgcgcgccgtcagcgcaaccgcgccgccagcgcgtcgacgccggggtacgtgtcgcgcggcagcgccgacttgcgcgcgaaccggccccagggctcgcccgcggcgagcgcgcggcagaagcccgcggcgtcgaccacccacgcgccgcccatcagcgtgacgccgcgcgcgaacagcgcgtcgggcagcacgccggcgccggggccgatcatcgccagcgcgcgggcgcgcgcgcagcgcgcgagcaccgcgtcgagcgtgtcgttgagcagcacggtgctggtcatcagcaccttgtcgcagccctcgagctcggccgcatcgagcgtgatgcgaaagcccgcgcggtcgccggcgagctcggccctcagctcgagcaccgtcagccgcgcgccacgcgcggtgacctgcttcaccagcggcgggaagaagccgaccatgccgacgtgctcgccgggctgcgggtcgagaccgccgatcgagtcggtggcctcgggcggtgcgtaccccgcgcggtcgaacaggctgcgcgtcagcgcatgcgccgcggcgaagcccagcgtgcgccgcacgccctcgccctgcggccaggcacgcgccagttcgagcgcgtcgacgccgaccacgccgccgcctcggcccgcaccgtgcagcgcagccagcgcgccgtcgagcagcacgtagctcagcccgagcgcgccgtcgtcgagctcgagcgcggcgaactcggcgtccttgctgccgttccacggcgaaggcggcaggtgcagcgcgcgcacgcgcggccgcggcagcgccgcgaaggcgcgcgccagcgcgtcgacggtctcggcggccgcggtcaccgcggtttcgcggcgcgcgccggcttggccgccaccggtgcgccggccttcttccatgcatcgaaaccgccgtcgatgtggccgacgtcgtcgaagcccatgtcctgcagcgtcttcgtcgccagcgccgagcgccagcccgcggcgcagaacagcaccagcttccttcccgacgagaacaccggcttgtggtacgggctgtcggcgcaggcccagaactcgagcatgccgcgcggcgcgtggaacgcgccggggatcacgccgtcgcgctcgagctcgcgcacgtcgcgcaggtcgacgaactgcacgtcgtccatgccgtgcagcgcctgcgcgtcctcgatgctgtaggtggtgatgacgtccatcgcctcctgcaccatcgacttcacggtcttcttcatcgcctcgctccgcgcttcagaacggcccctgcgccagccagcgctcgatctgcgccctgcggtcgttgccccagaacggctcgccgtcgacgacgatccacggcgcgccgaagatgccggcagccaccgcctgctcgttgacctgcttcaggcgcgccttccagcgcggatcggcccacaccgcctcggccgcctcggggtcgaggcccgactcgccggccagccgcttgagcgccgccgcgtcgtcgagcatcacgccgcgcgcgaagtacgcgcgcagcccggcgtgcgcccaagccgcggcgcgcgccgggtcgtgttcgtcgtgcagccaccagaacacgcgcgccgcgttctgcgtggcgatcgggaagcgctcgggcggcgtgaaaggcacgccctcgaagcgcgccgagcgcgcgaagtcgcgcatcgagtactcgcgcttgagcgggtacgacaccgggctcttcagctcggcggcctggaacgtcgcgcccagcagcatcgcgtgccagcgcaccgtgcgcccgtgccgggcggccagcgcctcgatccactccgacgcgacgtacgaatacggcgacgagaagtcgaaccagaagtcgatcgccgggcgcgccgcgtgattcgcctgcctgtccatgcggcaaaggtaccacgcgcgcgccgccgcgttgcacgctccgtcgccttgacacacgtcaacctccatggggcgcggcgcggcacgatcggcgccctgcgacacgacagcggcggcgcgatggcggtgtgggaagggttgtgcgtgctgggcgccgccgcggtggcgctggcgttccgcccgtgggcgatgctggcgcgcgcgccgctgcgccacccctggctgggggcgctggtgctgctgccgtggctgtggcgcaccgagtccctgctgcccggcggcctgccgctgcagctgtcgctggcgtcgctgctggtgctgatgttcggctggccgctggcggtgtggaccgcgctggccgccgcggcggtcgccgcgtggatcggcgaccccgcgtgggcctccgggccggcggcctgggccgcgcaggcgctgcacctggcggcgtggaacggggtgctgccggccagcgtcgcgctgatcgtcgggctggcgacgcggcgctggctgccgcggcacctgatggtctacatcctcgcgcgcggcttcggcgcgacgctggtggcgatgagcgtcaccggcgcgctgtgggtggccacgcagccggcaccgccgggcagcgagacgcagctgctgctggtcggccgctggctgatcgcctggggcgacgcgttcaccaccggcatgctgagcgcgatcttcgtcgcctaccgccccgagtggctggccacctacagcgaccggcgctacctgccgccgcgctgaacgccgccggcgggcgcgccgatgcacagcgtcggcgcacggatcgactcgagcagcgcgtcgccacgcgcgcgtttgccggcgtcggcggcgtcatacatcgacggcggcgtggccagcaccagccggcatgcggtgtcgggcgcgaagcgcgcgagtagccacagcgacacgtccgcgccgacccacgccacgaagccggtcagcgcaagcagcccaggggcagtggccgtcccgctcttcatgcagcgcagcgtgggcggcgaagtgtgcaggtcccgcgcatgctcggacgccccgccgccgtcgcccgctaccaaagcgaacggccgcatgtagcggccgttccatttggtgcatccatctgccgaagcagcatctgcttgttagcggacagagctcatatcccgagcatcgaacgggccgaggatatcctttgccgatcgcttcggcaacaaggaggggacgacatgctcaagcggatgcgataccggctgggactcgatctcggcacgacctccatcggatggtgcctgatccggctcgacggcaacgacgcgcccagcgcggtcatacggatgggcgcgcgcatcttcggcgacgggcgaaaccctaaggacggcagctcgctcgcggtcacgcgccgactcgcgcggcagatgcgccgccggcgcgatcggctgctcaaacgcaaggcccggctcgaagcggcattgatcgctctcggcttctggcccagcgaccacgatggtcgccgtcggctggccacgctcgatccctacgtgctgaggcgcgatggtctggacaagccacttgcgcccgaccacttcggacgcgccgtcttccacctcaatcagcggcgcggcttccagagcaatcggcgcaccgaccggcgcgacagcgagagcggcctgatcaagtccgcgatccacaggctgcgtgagcagctcgccgcccaaggcgcacgcacggtcggcgagtggctcgcccagcgccacgaacgtcgcgagagcgtgcgtgcgcgccttcgcgggcgctcggcgagggacaaggcctacgacctgtacgtcgatcgagccatggtcgccgacgaattcgatcggttgtgggcagcgcaggcgagcttcgatcctgtcttctacgacgacagcaagcgccaacagcttcgggacaccctgctgcaccagcgcccgctgcgccccgtgcaacccggacgctgcacgctgatccccgaccagccgcgggcggcgctggcgttgcccagcacgcaacgctttcgcatctaccaggaactgaatcacctgcgcttgatcggcccgcacctgagcgaggcgccactgagtctggagcagcgcgacgaactggcaggcctgctcgagcgtggcgacgtcaccttcgtgaaggtgttgaaggccctgaagctgccaagcgcgacccggttcaacctgcaggacgcgaaacgcgacaagctcaagggcaacgcgaccacgcgggaactgtccaaacccgattgcttcggcgaggcctggcatgcgttcacacccgcgttgcaggacgagatcgtcgagcgactgttgaccgagcccagcgagacggtgctcgtcgactggctgaccacgcgaaccggcgtggacgaggccgccggcgagcgcatcgccgccgcggggctggttgccgggtacggcaacctcagccgaacggccatcgccagcgtgctacccgaactccggcgtgccgtcgtcacctacgacgaggccgtgcgacgggcagggttcgacagccacagcgtgctgtcgcatgccgaacgcaccggtgaagtgatggatgcgctgccgtactacggtgaagcgctgcaacgccacgtggccttcggcagcggcagcaccaacgacccacccgaagtccgctacggacgcatcgcgaacccgaccgtgcacatcggcctcaacgagctgcgcaaggtggtcaacgcgctgatccgccgccacggacacccgtcggaggtgatcgtcgaggtggcacgcgagctcaagcaggggcgagaacaacgcgagcgcgagcaggaacgccaggcgcagcgccaacgagacaacgaggtcttccgcgagcagatcgcggcgctgccggggcgcgcgggccagccggtcccggccgcggacctgcagctcatgcgcttgtggaccgaactcaatcccggtgacgccgccaaccgccgttgcccctacaccggcgagcagatcagcatggcgatgctgttctccaacgaggtcgaggtcgaacacatcctgccgttctcgatgaccctcgacgacagcctgaacaacaagaccgtggcactgcgccgcgccaaccgcgacaagggcaaccgtacaccgttcgacgccttcggccactcgccagcgggctacgactacgcgggcatcctggagcgcgccgcgctgatgccgagggacaaggcgaagcggttcgcccccgacgggtatcagcgctggttgcgcgaggacgacgacttcctcgcgcgtgcgttgaacgacaccgcgtacctctcgcgcatcgcgaaggagtacctgtcgctggtctgcccgccgaaccgcgtgcgcgtgatcccgggtcgcctgaccgccatgttgcgcgggaagttcgggctgaacaccgtgttgtccgccaacggcgccaagaatcgcgacgatcatcgtcaccacgccgtcgacgccgcggtgatcggcgtcacggaccagggtctgttgcagcgattcgccgccgccagcgccgacgcgcgcgaacgccagctggaccgactggtcgagagcatgccgctgccctggcccacgtaccgcgaacacgtggctcgcgccgtggaccgggtcgtcgtcagccaccggcccgaccacggctacgaaggcgcccttcacaacgagacggcgtacgggctgcgggcggacgggcgcgtgacccaccgcgtgatgctcgacagcttcaggagcgccgccgaaatcgagaagcggacctttgccgacgaagcgttgaaggcctggctgctgcaacgcacggccggactgtcgggcaaggcgttcgccgagcgcatcgagacactgcaacgcgagcgcggcatcaggcgggcgaagctggtcgaaccgctgaccgtcatcccgatacgcgacgcgaaccgtgtgcaccgccacggtaccgatgcgcacggcgaaccacgcgcgtacaagggctacaagggcgacagtaactacggcatcgagatctggcgcgacgagcgcggccgctggcaaggcacggtgatctccacgttcgacgcacaccgcatcgtgcgcgagcacgggggcggcgagcacggatggcggcggctgcgccacccgaggcttgcgcagaacggccggccgctcgtgatgcgtctcacgaacggcgactgcatccgactcgaactgggcgggcgcatgccgttattgacggtagccaagatctccaagaacggacaggtgttcatggccgaacatcacgaagccaacgtcgacgcacgcaaccgcgacaaggacagcggctttaactacgtctcgaagatggcggggtcgttccagagcgccagggcgcgacgcgtgaccgtgtcaccgatcggcgaggtgcgcgaccccggcttcccggggtagcgccgatgatcggtcggatcgtcgaagtcgccgacgaccgccgacacctcgcgctgtcgcgcggcttcatggtcgttcgcgacaccgacggcgagcgcaaggaactgggccaggtgccgctggacgacatcgccgcggtgatcggcaacgcgcacggactgagctacaccaacaacctgctcgtcgcgctcgccgagcgcggcgcacccttcgtgctgtgcgccgccaaccacaacgtggccgggatgctgctgcccatcgacggccaccacctgcagggcaagcgcatcgacgcgcagctcgccgcgaccaggcccacggtcaagcgggcgtgggccgaggtcgtgcgtgccaagctgcagcaacaggccgcggcgctcgaggccgccggcgcgccgagcgcgccgctggccgcgctcgcggcgcgcgtgcgctcgggcgaccccgacaacctcgaggcccagggcgcgcgccgctactggacgctcctgttcggcgacggattcaggcgggaccaggacgcaggcggcgtcaacgcgttgctcaactacggctacaccgtgctgcgcgcctgcatggcccgttccgtggtggccgccggcctgcacccgacgatcgggctgcaccacagcaacgagggcaatgcgatgcgcctcgtcgacgacctgatggagccattccggccggtgatcgacctcagggtctggctgctgttgcgcaacgaagagcgcgaggtgacggcggaaacgaaacgtgcgctggtgcgcacgctgtacgacgacatgcccacgccgtcgggcgcgaccccgctgatggtgtgcacgcagccccctgtgccaatatgacctgcgtcacctacccctgaccatttagtgagcaacgaggtaggcatgacgaccaccac

SEQ ID NO: 1880 - DNA, 8649 bp, synthetic construct
  misc_feature 1..8649: note = Synthetic
  source 1..8649: mol_type = other DNA
gcagcctggtgctgctgcacgcgcagacggtgcgcgccagcgcggcgctggcccgggccctgcaggtgcccgcgcgcagtccgctgctggcgctgcgcgtcatgggcgaggccgaggggcggccgctgcatctgagcgagcgctggtttccgctgccgcgcttcgaagggctggccgcggtggtgcgcgaaaccggctccatcaccgccgggtttcgcgcgcacggcgtgagcgactacacgcgccgcgaaagccgcatcaccgccgaactgcccgacgccgcgctcgccgccggtctgcgccagcccgccacccgcccggtgctcctggtcgagagcctgaacgtcgatccggaaggccgccccatcgaatgggcgcgcgcctggtttgccggcgatcgcgtgaaactgaacatccagcatggggaacacgatgagcgcactgcctgaggcatccgccacggcgcaccgctacgcggtgtatttcgccccccggcccggcagcccgggctggcttgccggcagccgctggctcggccgctgcgccgccacgcggcaggccatgccgcaaccggaaatcgacggcgtggcggcggcggacctgcaccggctcaccgccgcaccgcgccgctacggctggcacgccacgctcaaggcgccgttcgcgctggcgccgggaatcgaccgggccgcgctgcaccaggccgtgcaggcgctggcgcgcagcctgcggccctttgatctgccgccgctggaggtggcgcgcatggacgactttctggcgctgctgccaacgcctgcgcagcccgcgaacgccgccatcgacgcgctcgctgcggcctgcgtcacgcaactgcagccgctggccgcgccgttgtccgacgcggatctggcgcgccggcgccgcgccgcgctcacgccccggcaggacgaactgctgcagcgctggggctatcccttcgtgctcggagaattccgcttccacctgtcgctcaccggcagcttgcggcaggcggaccgccagacccaggccctgctgcaggacgccgcgcgggcgttcttcggcaagctgcccgcgcagccgttcgacggcctggcgctcttcgccgaacccgcgccgggcgcggacttcgtgctgctcgattggctggagttgggcgcatgacggcgcggctggtctacttcatgggcccttcgggcgcgggcaaggacagcctgctcgactggctgcgcgcgcatctgcccgcagcgcacgcattgcattgggcgcggcgcaccatcagccgcgtggcgacgcccggcgccgaggcgcacgaaagcgtctcgcccaaagccttcgcggccctgctccgcgcgcaggcgttcgcgctgcactggcaggccaacggactgggctacggcgtgcggcacgcacagctggacccgctggccgccggccaatgggtgctgctcaacggttcgcgcgcgcacctgcccgctgcgctggtgcgctttccgcacctgctggcggtgcacatcagcgccagcccggagcggctgcgcgagcgcctgctggcgcgcggccgcgagacacccgacgcggtcgaagaccgggtgcagcgagcgctgcaattcaggccgcccgcgggcagcgccagcatcgaactgcacaacgacggcagcctggacgacgtgggccagcggctgctgagcgcgctcaggcagcaccccggctggcccggatagcgcaccggcaggtaaaccggctgcgcggcaggcccggcgcggcacgatacactttgcacctgctgactgaaacccggatcccgagcgccccttgccccaccccattcatggtccctaccacgccggcccaggcccgcacctgctttgacctgaaaagcgcctctctgcccgtggtggccgtggtgctcaagaccaccgacttcgcgctgcttgcagccgatctggccgggcgcgtcgccgacgccccggggtttttcgacaatgacccggtgctgatcgacctggccccggtgcgggattcccgggaacccatcgatttcgctgccatcatggccctgctgcgcagccacgggaccctgccggtggcggtgcgcggcggcaaccccgcgcagttggaggccgcgcgcgccgcaggcctgggcgccgtacccgaggcgccgcccgcgcgcgccgaagcgcccgcggccatgcccgagttacccgcgtccgaccccggcaccatggtgctcgacaagccgctgcgctcgggccagcaggtgtacgcgcgcggcgccgacctcgtcgtgctggccatggtcagttttggcgccgaagtcattgccgacggcaacatccacgtgtacgccccgctgcgcggtcgcgccctcgccggcgcgcgcggcaacaccggggcgcgcatcttctccacctgcatggagccgcagctcgtgtccatcgccggcatctaccgcacatccgagaccgcgctgcccgcgaatgtcgcgggtcgggcggcccaggtgcggctcgagggcgagaagatcatcgtcgagcccctggcctgagcccccgttcgccccgttcaccgcaacgcaatccaaaccacagagaaccagcaacaaatggccaaaatcgtcgtcgtgacctccggcaagggtggcgtgggcaagaccaccaccagtgccagctttgccaccggcctcgccctgcgcggccacaagaccgcggtgatcgacttcgacgttggcctgcgcaacctcgacctgatcatgggctgcgaacgccgcgtggtgtatgacttcatcaacgtgatccatggcgaggccaacctgaaccagtcgctgatcaaggacaagcagtgcgacaagctgttcgtgctggccgccagccagacccgcgacaaggacgcgctcacgcaggacggcgtcgggaaggtgctccaggatctggccgcgatggactttgaatacatcgtctgcgattcgcccgccggaatcgaaagcggcgccctcatggccatgcatttcgccgacgaggcgctgctggtcacgaaccccgaagtctcctcggtgcgcgactcggaccgcatcctgggaatgctcggcagcaagacccggcgcgcgatcgacggcgccgatccggtcaaggagcacctgctgatcacgcgctacaaccccagccgcgtcgctgacggacagatgctgagcctgcaggacatccaggacattctgcgcatcaagctcatcggcgtgattcccgagtccccggtggtgctgcagtcgtccaaccagggaagccccgcgattcatgcgcagggaacggacgtgtccgaggcctacaaggacgtgatcgaccgcttcctgggcgccaccgacaagcccatgcgcttcgtcgatgccgaaaaatccggtctcttcaaacgcctgttcggaggcaggtgagccatgggtcgcctgctttccttcctgctcggcgaaaagaagaagaccgcttctgtcgccaaagagcgtctgcaattcatcctggcgcacgagcgcaacggccgcaacggccccgaacccgactacctgcccgcgctacagcgcgaactggtggccgtgatatccaagtacgtgaagatcaacccggatgacctgaaggtgcatgtggagcgccaggacaacctggaggtgctcgaagtcaagatcgaactgccggacgcggtgcgttgaggttctttggtgcaggggggggatttggtcttgccctgtcgagcggcgccaggggctgtggggtattgctgagaccggcggccgattgggctccaaaaagacgaagaccccgcctgcggggtcttccatttggtgcatctttctgcgtgttagcgtccagagcgcatatcccagtgaagtaatcggttgcgagtatagcacaatccgccgctacgactcaatatatcaaggggtgcaaatggacgaggcaagtgtttatcgcttggcgttggatctggggtcaagctcgctggggtgggctgttttgcggttggataggtctggtgcgcctacggccatcatcaaggctggttcccgcatcttcagcgacggccgcaatcccaaggatggctcctcgctggcggttacccgccgtgctgcccgtatcatgcgccgccgccgggaccgcttgctcaagcgcaaggcgcgcatgcacgatcaactgatgcgccatggcttttttcctgctgatgcggccgggcgcaaggtgctggagcggctcaacccctaccagctgcgcgccaagggcttgcatcaggccttgaccccgggtgaatttgcccgggcgctgtttcacatcaaccagcgccggggttttcaaagcaaccgcaagaccgaccgcaaggacaacgagagcggtgcgctcaagcaggccataagcgaactgcgtgcgcagatccacgacagcggctgcgccacggtgggcgaatggttctggaaggagcgcatgcagcaaaagcccgagggcgtgcatcgccagggagtgcgggcgcgctaccgtgaaacgccgtacaccaccgacgagggtcggcagcgcatcgacaagcgctacgacctgtatgtggaccgtgccatgatcgagcaggagtttgatgcgctgtgggccgtgcaggcggcgttgcagccgggcctgttcaccgacgcggcctgtaaggaattgagatacacgctgctgttccagcgcaagctgcgccccgtcaaacccggccgctgcacgctgctgcctgaagaagagcgggccccgctggccttgcccagtacgcagcgctttcgcatcttgcaagaggtcaaccacctgcgactcttggacgaagcactgcgcgaagtgccgctgaccctggcgcagcgtgatgcgctggtcgctgcgctggagagccagggcaaactgggctttgcgccaatgcgcaagttgctcaagctcccgggaacggtgaagttcaatctggaagacgaaaagcgcaccgaactcaaaggcaatgccaccagcgccatcctggcccgcaaggatttgtttggcccggcctgggcggggtttgacgcagcgctgcaagacgagatcgtttggcagcttgtcagcgaggagggtgaggggcgcttgattgcctggctgcaacagcacacgggagtcgatgaggcgcgcgccgaagccattgccgacaccagcctgcccgagggctacggcagcctgagccgcaaggcgctggagcgcatcgtgcccgcgttgcagcgcgaggtctgtagttacgacaaggccgtgcaggcggccggttttgcacaccacagcgacctgggctttgacttcgagcattccggggatgaggtgcagcaggtcggcgaacgcatcattgcatcgacgggcgaggtcaggccgttatttgccttcaagcaactgccgtactacggcaaggccctgcagcgccatgtggcctttggcagcggcaagcccgaggaccccgaggaaaagcgccacggaaaaatcgccaaccccacggtacatatcgggctgaaccaggtacgcacggtggtcaatgcgctgatccgccgctatggccgccccagcgaagtggtggtggaactggcgcgtgacctgaagcaaagtcgcgagcagcagcaggagacacagcgcaagcaggccgaaaaccagcggcgcaacacacgcattcgggagcgcattgcagaaaccctgggcatcagccccgagcgtgtgcgcagcagcgatatccagaaatggatcttgtgggaggaactgagctttgacgtggtcgaccgccgctgcccctacagcggcgaacagatcagcaccaccatgctgctgagcccgaaggtggagatcgagcatatcctgccgttttcgcaaacgctggacgacagcctgaacaaccgcaccgtggccctgcgcgaggccaaccgcatcaagcgcaaccgcacgccctgggatgcgcgggctgactttgaagcccgggggtggagctacgagggcatcttgcaccgcgccgagcgcatgccgctgcgcaagcgctaccgctttgcgcccgatggctaccagcgttggctgggggaggacaaggactttctcgcgcgtgcgctcaatgacacacgctacctctcgcgggtggccgcgaactacctgcggttggtgtgcccgaaaccgcaaggggtgcgggtgattccggggcggatgacggccatgctgcgtgccaagttcgggctcaacgacgtgctgggcctggacggagaaaagaaccgcaacgaccaccgccaccatgcggtcgacgcctgcgtgatcggtgttaccgaccagggcctgatgcagcgctttgcccgcgccagcgcgcaggcccgtgaagacggcctgacccggctggtgcaagacatgcccctgccctggcccagttaccgcgaccatgtggagcgtgccgtgcgccatatctgggtaagccacaaaccagaccatggttttgagggcgcgatgatggaagagaccgcctacggcatccgcaaggacggcagcatcaagccgcggcgcaaggccgacggcagcgcaggccgcgaggtcgtcaaccttatccgcattacagaatctcgccagcctgtgcgccacggtgtggattcccaaggccagcccctgccgtacaagggctatgtgggcggcagcaactactgcatcgagatcacggcgaacgaccagggcaagtgggagggggcagtgatttcgacatttgaggcctaccgcatcgtgcgggcatccggctgggggcggctgcgccattgctcccatggtcagaacggaaggccgttgatgatgcgattgatgatcggggacgccgtccggttggcattggatggaagcgaaaaaacgatgcgtgtggtcaagatttctgccaacgggcaggtgtttcttgtcgcgccgaacgaagccaatgtggacgcaaggaaccgcgacaaggcagatccctttgcttatgtttccaagaaggccggatcatttcagtctgccaaagcccgccaagtcagcatctctcccatcggcgaactgcgcgatccgggcttcaaaggctgacggtcatgattggccgcatcgtcgaaatcgcagacgaccggcggcacctctttgtccatcgtggctttatggtggtcaaagatacggagggtgagcgcaaggaactgggccaagtaccgttggacgatatcgcggccgtggtcgccaacgcacatggccttacgtacacgaacaacctgctcgtggccctggccgaacgcggtaccccctttgtgctctgcggccccaaccataacgccatgggcatgctgctatcactcgatggccaccacgtgcaggccaagcgcatagaggcgcagattgcagccagcctgcccatgcacaagcgcctgtgggcggcagtggtcaagtccaagttggagcaacaagctgcaaccctggcggccgtagccgcacccacggcaccattgcaggccctggtggccaaagtcagaagtggcgacccggacaatgtggaggggcagggcgcgcgccgttactggggcctgctgtttggttcggactttcgacgcgaccaagacggcgacggattgaatgcgctgctgaactacggctacaccatcatgcgatctgctaccgcccgcgcggtggtggctgcgggcctgcaccccagcatcgggctgcaccacagcaacgacgccaatgcgatgcggctggtggacgatttggtggagccctttcgtcccatggtggatctgaaggtatggcagttgcacaaggccggcgagtcgcatgtcacgccagacaccaagcgtgccttggtgcgcgtgctgcatgaggacatgcagacagcagcgggcgtgaccccggtgatggtgtgcgcgcaacgcctggcgacgtctctggcgcaggtgtacctcggcgaccgccccaagctggacttgcccttgccgggactgccactcgcgctggcgggcggcttcgagcccgattgatcaccttgcctgccacaccatgttgtccgggtaccgactcatgtggatggtggtgatgttcgacttgccggtggtagagagagccgaacgcaaggcagcgacacagtttcgcaacacgttgctcgacatgggctttgcaatgagccagttcagcgtgtacatgcggttctgcaccagccagacccaggtggataccctgtgccgcgcagtggagcacgcactgccttctggtggtaaggtccatgtcctccagttcaccgacaagcagtacgagcgtgccatcacctaccgcgggcgcagcaagcaacccgcgcaaaaagcaccagagcagttcgatcttttctagaccatggcgcgaattttttgccgtctgagaacgaaattttccttaaaaatcaaggggttagcgcggtggcattctagcttactgggatatgcgctctggccggaactaccgaaactgtcgctcgcatgactactccattctagcttactgggatatgcgctctggccggaacgccggttctttgcacacacacaagccctgcattctagcttactgggatatgcgctctggccggaacaagacgcgtgtcggggcgtcagtgccggtaattctagcttactgggatatgcgctct

SEQ ID NO: 1881 - DNA, 7020 bp, synthetic construct
  source 1..7020: mol_type = other DNA
  misc_feature 1..7020: note = Synthetic
ggccatggtgaccagcaggtcgaactggtaggaggtcagctccgccggctcgccgcccacggtgatggtgcgcgcgtcgcggtcgatctccaggctgccgaagcgcagcagatggttggccgggggctgggcgccggcctcgcgccggcgcaggatggcgcgtatgcgcgcgagcagctcgcgtggctcgaagggcttgggcaggtagtcgtcggcgccgttctcctggccgaatacttcggccgccacggcttcaccgtgcgccaggccgaggacgccgccgcggcgcgccggctggtcgccgagcaggcgcccgagctggccatcctcgacgtcaacatgccgggcgagaacggcctgtcgcacggtgaagccgtggcggccgaagtattcggccaggagcgagcgcagttccggctcgtcgtcgacgaccatcaccacgggcaggttgtcgggggctgtcacgtcgcggatccctgcggcaaaggcatgcgagcgcggatcatatcggccgaagccggccggcagctgcagcgccccggtgctggcgaacatggctcaacggcctgcggcggcggccggacggcgcacgcgcagcatcgggaacagatcggccagcgcggcgtcggaggcggcctgcaggtcttccgggaagcactcgctgcggtacagcgcggtcggatcgagcgcgatctccggcaggcgacgctcggcgtgcgccggcgcgggggcggtgaaggccgcacgcagccaggcggcggagctgggaagcatctgggtgagcatcgggttcatggcgcgtcctcgtcgtgatggcgcgcatcgtcggcccggcgcgtatcggtcccgcttcagggtgctcacggccgtgtttcatgtgtttcagcgtcgctatcatgccccgcatgcccgtctcgctcgccggccagctggtggtcgccatctcctcacgcgccctcttcgacttcgaggaggagaaccaggtcttcgaggccgaggacgaccgcgcctacatgcagctgcagctcgaacgcctggagcgcgccgccaagcccggcgtggccttctcgctggtcaacaagctgctggccttcaacacgccggagcggccgcgcgtggaggtggtgatcctgtcgcgcaacgacccggtctcgggcatgcgcgtgttccgctccgcgcgccactacgggctgccgatccagcgcggcgtgttcacgcgcggcgagtcgccgtggcgttacctgcggccgctggcggccaacctgttcctgtccaccaacgaggccgacgtgcgctcggcgctcggtgccggcgttccggcggcgcgcgtctacccgcagtcggcgcgcgcttccgacgctcaccccgacgaggtgcgcatcgccttcgacggcgacgcggtgctgttctccgacgaggccgagcgcgtgttccagagccaggggctcgacgccttccagcaccacgagcaccagcgcgccgccacgccgctggcacccgggccgttcaagccgctgctcgaggcgctgcagcagctgcagcgcgagccggggcgcgacatgcgcatccgcaccgcgctggtgacggcgcgcagcgcgccggcgcacgagcgcgccatccgcacgctgatggactggcacatcgacgtcgacgaggcgatgttcctcggcggcctgcccaagggcgaattcctgcgcgagttcgagccggacttcttcttcgacgaccagaccggccacatcgagaacgccgcgccgcacgtgccggccgggcacgtcgccgccggcgtgaccaacggctaagcagcttcagccgagcagccgcgcacccaggggctcgagcagcgggcgccgctcgcagtcctgcagcgcgcgcgcggcgagctcgtggccgcggcggttgagccggaagtagcggatgtgctcgaagccttcggggttgtgaaactcgtcgatcagcgcgtagtcggccagcgtgcggaaggccgagccgaccacgccgccgtcgatcgagcaaccgccccagctctcgctggcatgcaccagcacatggccgcggtgcagggcgcgcagcgcgtcgacgaactctccgcggttggcgatgatgggcgctccgtccatggccccatcttcggccgcggcgaaagtccctgcaggcggaaatgccgcaccttcgccggccagtcccgcgcagcgcagcggtcgtgtggcaaagctcacgcggcgcgaccgctgaaatgacgaaggccgcatatagcggccttccatttggcgcatctttcagcttgttagcgtccagagcgcatttcccaatcatcttgcgtgtgcgactataacagcgctcgaaaagagataaggccaatctgggaggcaacttgacgagaatgaggtatcggctcgcgctcgatctgggctcgacttcgctggggtgggcaatcctccgattgggaagcgacggcgccccctgcgccatggtcaaggccggggtacgaatcttccccgatggccgcaacccgaaggacggcagttcattggctgtcacgcgtcgggctgctcgcgcgatgcgccgccgccgcgatcgcttgctcaaacgcaaggcacgggtcatgcaggcgctgatcgagctcggattctttccctccgatcgcatcgagcgcaaagcgcgcgaacggctgaatccctacgaactgcgcgccaagggactcgatcacgcgttgacgccgcacgagttcggccgcgccgtcttccatctcaaccagcgccgcggctttctcagcaatcgcaagaccgacaagaaggacagcgacagcggggcaatgaagaccgcgctcagcggcatgcggctggcgctcgacgccaacggcaccgacggcaagccgcgaaccgtgggcgaactgcttcatcggcgcttcaccgacgctaccaagccgccgcgcgaacgcaccgtgcgcgcccgctaccgcgaggcgcgcgtgcccaaggaaggcggcggcacgcgcatcgacaagagttacgacctctacatggaccgcgcgatggtccgcgccgagttcgaagcgctgtgggcgacgcaggcccgtttcgaccccgcgcgttacgacgccgcggcgaagcaggcgctcgactaccggctctggcatcagcgtccgctgcggccggtacgcccaggccgctgcacgctgatgcccgagcaggagcgcgcgcctctggcgctgccgagccagcagcgtttccgcatcctgcaggaggtgaacaacctgcgctggctcgacgcaagcctgcgcgagcacacactcacgctcgaacagcgcgatgcagtcgtgcacgcgctggagcggggcaatgcgagcttcgacacgaggattccgaagctcaccggcctgtcgggcgcagcgaagttcaacctcgccgacgccaagcgcaacgagctgaagggcaacgtcaccagcctccggctggcaaagaaagatctcttcggcgacgcgtggcaccgcttcgatgaggcacagcaggacgagatcgtcatgcagttgctcaccgaggagagtgaggcggctctggtggcatggttgcaggctcgctgcggcctcgacgaggcccgggccgagagagtcgccaatgccagcggcctgcccgaaggctacggcagcctcagccgcgaggcgctcgcgcgcgtgctaccggaactgcgccgcggcgtggtgtcgttcgctgaagcggccaagggcgctggctttcaccacagccggctggccgccaacgaggaagtgccggggcgcacgttcccgatcgagaagatcgtcgaaggcactggcgaaattcagcaactgcacgtcttcaaggaactgccgtactacggcgagttcctgcaacgccacgtgggcttcgcagaccccgacgcgaccgaagccgatctgcccgagaagcgctttggtcgcatcgccaacccgaccgtgcacatcggcctgaaccaggtgcgcaaggtggtcaacgcgctgatcaggcgctacgggcacccgagcgaagtgatcgttgaggtggcgcgcgacctcaagcagagccgcgagcaacgcatggatgcgcagaagcgccaggccgacaaccagaagcgcaatgaacgcctgcgccagcaggccgctgggctgcgcggctgtgcacccgagcaggtgaagcatgccgacatcgagcgtctcgtgctgtgggaagagctcagcttcgacatcgccagtcgccgctgcccctacagcggcgtgcagatcagcgcgcagatggtgctgagtccggaagtcgaggtggagcacatcctgccgttctcgcagacgctggacgacagcctaaacaacaagacactggccacgcgccaagccaacagagtcaaaggcaaccgcacaccctgggaggcgcgccacgacttcgccgcgcaaggctggatgcatgacgacatcctggcacgcgcgcagcagatgccgcgcggcaagcgctatcgcttcgccgaagatggctatcagaaatggcagcagggtggagaggctggccaaggcaggagttttcttgcccgcgcactgaacgacacgcgccacatgagccgcgtggcccgcgaatacctgagcctgatctgcccgcaggacacgcgcgtcattccgggtcagatgacggcgatgctgcgcgcaaagtttggcctgaaccacgtgctcggcgtggatggcgagaagaatcgtgacgaccatcgccatcacgccgtggatgcctgcgtgatcggcgtcaccgaccagggcctgctgcagcgatttgcgcgagccagcgccgatgcgcgtcaaaggcagctcgggcgactggtggagaccatgccgttgccttggccgacgtatgccgaacacgtgcggcgggcggtgaacaacatctgggtgagccacaaaccggatcacgggcatgaaggtgccctgcacaacgacacagcctatggccttcttcccgacggatacgttcgattccacaagtcggtggaaggggctcggaccctgcagaccgagagcctgagagtcatcgagatgtcggccccgaaagccgcagagcgccatggtcgcctgcccaacggagaacctcgcccatacaagggccacaagggcgacagcaactactgcatcgagatcgatcgtggcgacgatgggcgttgggattggcaggtgatctccaccttcgatgcctaccaacgcgttcgacgcgacggaatcgctggccttcgcaactctcgtctttcggcgcgcggggggccgctggtcatgcgcctgatgatcggtgactgcattcgtgccgaattcaagggcaggcttcgcgtactcgtggtcaagaagatcaagagcaacggcggcatcttcgtcgccgagcaccaggaagccaacgtgcggcaacgcgaggacgcgaaggacacgagccttgtctacggctcgttctccgccaacacgctgagaaaggcggcagggcgcgcggtcactgtgagccccgcaggcgacctccacgacgccggatttcggccgtgaagccatgatcggccgcatcgtcgaagtggccgatgaccggcggcacctgtcgctcaatcgaggctttctcgtcgtgcaggacactgagggcgagcgcaaggagctcggccaagtgccgctcgacgatattgcggcgctcatcgccaacgcgcacggcctctcctacacgaacaacctgctggtggcgctggccgagcgcggcgcgccattcgtcctgtgcgcggccaaccacaacgcggtcggcatgctgctgcccatcgaaggcaacttcgaacagtcgcatcgcatcgaggcgcagatcggcgccacgctaccgactcacaagcggatgtgggccggcgtcgttcgtgccaagctcgagcaacaagctgcggccctcgaggcggctggtgcccctacggccccactgaccgcgctggcgggaaaggtgcgcagcggcgaccccgacaacctcgaggcccagggcgctcgccgctactggagcctgctgttcggcgacggtttccgccgcgaccgcgacagcggcggcatcaacgcgatgctcaactacggctacacggtgctgcgtgcctgcatggctcgatcgatcatcgctgcaggcctgcaccccagcatcggcctgcaccacagccacgacaacaatgccatgcgccttgtcgatgatttggtggagccgttcaggccggtattcgacctgaaggtatggcaactgcaacgcggcggcgaaagcgacgtgacgccgcagaccaagcgtgcgctcgttcgcacgctgtacgacgacatgcagaccagttccggcgccacgccggtcatggtttgcacgcagcgcctggcgacttctttggcgcaggtgtatctcggcgagcgcgagaaactcgaccttccgctaccgggaatgccgctgtcgctggccgcatcgctgctcgacgaatgacagacggccgcacatgctctcgggataccgactcatgtggatggtggtgatgttcgacttgccggtagtcgagaaggccgagcgacgggcggcgaccgacttccgcaatgccttgctggacatgggcttcgagatgagtcagttcagcgtctacatgcgtttctgcaccagccccgtccaagtcgagacatactgcaagcgcgtggaaggcgccttgcctaccggcggcaaggtcaacatcctgcagttcaccgaccggcagtacgagcgcatcatcagctaccacggacgggcgcggcaggccgacaagaaagcaccggaccagtacgatctcttctagccatgcgatcggtttttcatcctccagaagcgcaaaaccccttgaagatcaaggggttggcgcagcgcgagtctagatgattgggaaatgcgctctggccggaaccgcgctggcgtcgatgaccatcccgcgcccagtctagatgattgggaaatgcgctctggccggaacggaaccccacggcacgcgcaacggtgccccagtctagat

SEQ ID NO: 1882 - DNA, 6832 bp, synthetic construct
  source 1..6832: mol_type = other DNA
  misc_feature 1..6832: note = Synthetic
acaccgaaggtggtttccgtgactgggcctatgagctggcacaaaaagaattcggtgccgagttgatcgacggtggtccatggtgcaaattcaagaatccaaaaacaggtaaagacatcattgttaaggattctatcgctgacgcattcctgcaacaaatcctgttgcgtcctgccgagtactctgtcattgctacactgaacctgaacggtgactacgtttctgacgcattggccgcacaagttggtggtattggtatcgctcctggtgccaacctgtctgactctgttgccatgttcgaagcaactcacggtacagcacctaaatatgcaggtaaagattatgtgaacccaggttcagaaatcctttctgcagaaatgatgctgcgtcacatgggctggacagaagcggcagacctgatcatttcctctatggaaaaatcaatcctgtccaagaaagtaacctatgactttgcccgtctgctggaaggcgcaacacaggttagctgctctggctttggtcaggtaatgatcgaaaacatgtaagccgttttattgcttcaggcaataatccgtttgcaaaacccgcactgcttctggtagtgcgggttttttgttaccattttactgggcaggcatgtttttatggatattgttatgaataagcttgaaaccagaattcctccaccactcattgcgattgtcatcgggcttctaatgtggcaattgagtccggcggctatcaggacagaagagggggcactgatacgccagagtattgctgccatcgtggcatttattggcctggcatgcgattttctgggggccgtttcattccggaaagcaaaaaccacggtgaaccccatgagccctgaaaaatcatcggccctggtttgtacgggtatttataaatattcacgcaacccgatgtacctgggtatggctttgttgttgctggcgttggccatttacctggcgtctgcctgggctttgttgggtgtgatggcatacgtactgtatatcacccgtttccagattattcccgaggaaagggtcatggaaaaactgtttgggcaggaatatctggcgtataaggagaaagtgcggcgttggttgtgagggtggggtgatttcacgttcttgttttcatttttgagtgttatgattggtgtaatagtgtgtataaagtgtaatgacaatttttaaggggaaacataatgccacccaagcataattttgaatggcgttcgcagcgagaatatcaccacttgtttgtaaaccgtgctgataatgatcttgccggacctgcatggcggatagaagttgtggggttgcctggaggtggcgtacctggtaagcaagtggatcaatcagatctgtctaaactgatagacccttccaccggcgggttttgggaaatgatgtgttttgatgactggttgtttgatttggagaagattgagattttgtatccaagtcggatggttaggatttatattgctgaaaaaccctgatttttttaggtgaaaaatttttctttatattaaaagtaaaagccgcacatgtgcggcttttcattttgtgcatatatttgcttgttagcgtccacagcacatatctcaatcaattaagtgtatttatagtaacataggactacaataataacaaaatatttttttaagatagggggattatggcattactacgacgttataggcttgctttggatgttggaagtacatcgattggttgggctgttttaagattggcctctgatacaaatacacctactgcaattatgaaagcaggtgtgcgtatctttccagatggccgtaatccaaaggatggaacttctttagcggttacaagacggcaagcacgctcagccagaagaagacgagatcgtctgttgaaaagaaaaaacagaatgctcaggcaattaattgaactgggtttttttcctgcaacggtagaagccagaaaagaactggaaaaactgaacccctatgagttacgggcaagggggctggatgaagctttaacgccagcagaatttgccagagcgctttttcatattaatcagcgtcgtggttttaaaagcaaccggaaaacagacaagaatgagaatgaaagtggtgcactgaaaacagctattaaaaaagtaaaagaaaaaattgaaaatagtgaagcacgtactataggtgaatacttgtataagcgtatgctgaatggtgaaaccgtacgtgcccgtttacgtcagaccagaatggctcaggataatggtcgtgacaaaatagaaaaaaattatgatttgtatattgaccgctcaatgattgaggatgaatttgagcaactgtggcaggcgcaggcacactggaatccagtgctgtttaatgagtcaaacaaagccttactgaaaaacacactcctttttcaacgaaatctaaagccggttaagcctgggcgttgtacatttttgccggaattggaaagggccccgttggcattgccaagtgcccaattattccggatttatcaagaggtaaataatttacgttatctggatgaaaaatttaatttaatcccattaaacaggcagcaacgtgattcaatcgttgaagagttaaataaaaaccaaaaacgttcttttgatcaaatacgtaaaaaattaggtttttcaggggctgtcagattcaacatcgaagatgataaaaggcaggatttaaatggtaataaaacagcttctattctggctaagaaaagtttttttggtaatcactggtttacctttcctgtaaacaaacaagatgaaattgttcagaagttattggccgaagaggatgaggccaatctcattgaatggttaatcaataatacaggtgttgatgaggcaaaggcagaaagtctatcctcagtggctttgcctgatggttatggatctttgtcttatgaggcgatcggcagaatcctgcctcacttgcaagaggaagttataacgtatgataaggcggtattggctgctggttttgagcatcatagtatgttggatgcctcgcgtgatggagaagtgcatgaagagctgccatattacggtattccactggaaaggcatgttggctttggcagtggtaagcctgaggattcattagaaaaaagatatggaaaaattgccaatccaactgtgcatataggcttaaaccaaatcaggattgtagtgaacgccttaataaaaaaatatggtcatcctaccgaagtggtagttgaagtagccagggatttaaagcaaagcaaggagcagaaagataaagaaagaaaacagcaagctgaaaatcagagaaacaatgcaagacgtcgtgaacaaatcgccggcatattgggtattagcgaagaaagggtgagtcgcagcgatatccaaaaaatgattctttgggaagagcttgcgtatgatcctatggacagaaagtgtccatactctggagtgcaaattagtgcctcaatgctttttagtcctgaggttgaaattgagcatattctgccttattcaagaacgcttgatgatggtatgaataacaaaactctgtgtatgagattggcaaatcgatataaggccaataaaacgccttatgaagcgttcggtacacaagaaattgccggttttaactacgatgaaatggtgcagcgttcaaaaggcatgaaaaaagaaaaatcttatcgttttctgcctgatggctatgaaatttggttgaaaaacgataaggattttctggcaagagctttgaatgacacccgttatttaagtaaattaactcgtgaatatatcaaattgatatgtccgaatacttgggtgattccaggccaaatgacagccaggttacgaaaccagttcggtcttaatgatgtcttgggtttgcacggtgaaaaaaatcgtaatgatcataggcatcatgctgttgatgcatgtgtaattggtattactgacaggtctttactgcaacaattttccagggcgaatcaacaggctcgagaaaagggtctggagcgtttggttgagaatgtgactcctccatgggaaacctatcgtgagcatgtggaacgtgctgtgaataatatttgggtcagtcataaaccggatcatagccatgaaggtggaatgcacaacgatacagcgtattctttattggatgagggatatgttggctatcataaaaataataatggtcaaaaagaattcataagggaaaagctggctgtcctcaaaatgactagcgataaagccagggaaagacatggcgttttacctgacggttcattacgcccttataaaggatataagggggacagcaactattgtcttgaaatagtcaagaatgcaaaagggaagtgggacggtgagatagtttcaacgtttgaggcataccaagttgtcagaaaacatggggacgcagtattaaggaatagagagcaaagtatttcaggtaagccattggtgatgcgcttaataaaaggggatatggttaggtgtgaacatgatgagaaaatgatgactttaagaataataagcattaaatctacaggagtcatagcgttgactcctcatcatgaggctaatgttgatgcaagaaatcgaaatccggaggatccatttaaatatatatataaaactccaagttcattacagaaaagtcagggaagaaaaatcacgatttcactcattggtcaggtaaacgatccaggattcaagggctaggcttatgctcggtagaattgttgaaatagcagaagataatcgtcatctttctctttatcgaggctttttaaaagtcaattccaccgagggggatcgtgaagaactggggagagttcctctggatgatatctctgcggtaatagctaatgcttacggtattagctataccaataatattttggtggcgctggcaaatatgggagctccatttgttttatgtgctgccaaccataatgctgttggtatgttgctgcctattgaagggaattatgagcagtcaaaaagaatggatgcgcaaattgcagcttctgttccattaaggaaaaagctatgggccagtattgttaaatccaagcttgagcagcaggcatgtgtgctagaagtaattggcgcgccttttatacccatacaggccttgattaaaaaaataaaaagtggtgattcaacaaatattgaggcgcaggcagcaagaagatactggtcattgttatttgggaaggactttagacgagatcgtagcgaaagccaaattaatggtttgttaaattatggttataccgttttacgtgctactacagccagagcagtagtggcagcggggttgcatccgagtattggtttgtatcatagcaatgcgagtaatgccatgaggctagtagatgacttgatggagcctttcagagcaatggttgatttaaaggtttaccaattggtgcaagctggaaattatgaggttaaccaagaaacaaaaagaatattggtgagaacaatgtatgaggatatgcaaactctcgctggtattactcctttaactgtttgtactcaaaaacttgctacttcattggcgttggtaatgttaaaagaacgagacaggcttgagttgccattaccaggtttgccgatttcacttacctgaattgaggttttctatgttatcaggatacaggcttatgtggataatcgtaatgtttgatcttcctgttatggaaaaagcagaaagaaaagcagcgactgacttcaggaatgccctgttggatttggggtttgaaatgtcgcagtttagtgtgtatatgcgttttttttcgagttccaagcaaatagaaacctgctgtaagaaaattgagtcagggttgcctaagggtggtaaagtaaacatactgcaattaactgataaacagtatgaaaagattatttctttccagagtaaagtgaaagaacccgctaaaaaatcaccagatcaatttgatttattttgaaatgaacatggaattagttaaaaacaaagccaataacttatttgaaatcaaatggttattggctttgtattttaactgattgagatatgtgctgtggccggaacactaagaacctcgactagtttttttcctgtattttaactgattgagatatgtgctgtggccggaactattttatttggtaatgaaattattgaaatattttaactgattgagatatgtgctgtggccggaacctacagcgcctattagcacctttggtttaattttaactgattgagatatgtgctgtggccggaacacatcccgactgatcacgctattaacaaagattttaactgattgagatatgtgctgtggccggaactaaacaacgccttggcccgcaaaaagattaattttaactgattgagatatgtgctgtggccggaactatattcggcagcggtcgggctgtcaagcgattttaactgattgagatatgtgctgtggccggaactgaggcggcggacgctattgatacgctgacgattttaactgattgagatatgtgctgtggccggaacctgtcaaaaatgttgattcttggaactgagattttaactgattgagatatgtgctgtggccggaacgtgctattcattgtcagcatgcccaccaaaattttaactgattgagatatgtgctgtggccggaacaactgtgacaatttccatatcatccttgtcattttaactgattgagatatgtgctgtggccggaactgccccagaagattgtgtttgcggagcctgattttaactgattgagatatgtgctgtggccggaac

SEQ ID NO: 1883 - DNA, 6727 bp, synthetic construct
  misc_feature 1..6727: note = Synthetic
  source 1..6727: mol_type = other DNA
tctggtttgtcttcaacgacgcggtgaaaatgctcgtgctgcgctactaccgcaaacaccgggacaacgtcatgatctgagcgccattggcaggcgctcaataaggcggctcgaatttcccggcaatgtattgaagcacgatattgtttgaaatgatggcggcatcccggttgatgtaggggcgttgctgctggatttcctgccagcttgccgaggcctggaattcctgaatccggcgtttttccgcctcactcagtaccggtttgcgcgcctgctttccggcggcataaagcgccatcgatttctgccccaactccgaggcaaaaaaccggttgacctgttgcagggtctccctggacagattcttgtaaaccggcgcgtacaaggccacgacgtttctgggattggaaaaagcctccagcaagcttctctcctgcccgcggctgatcttcgtgccggccttgcgcagctcatcgatacgatacttcaatacccgctggacgaaaatatcggcccgcatcaggcgcatgtactcgactaccagacccagatccgcggccgattttgcctgaacgccttttccgagaagatcgttctgcaacaggaaatccgcaatgatttccgcgcgctttctgttgcccccgggactcatgtgcagaacatccatgaaatattccggcttgtcactcatctgaccccggatatcgatcagatccaccgccatgttcccggaaacctccctgatgatgcgagtatgttcctgcatggctttttgccagacggcgttgttgtccggcagcggatgattttggaaatcggtcgcctgcgttatcagcacgggaatcgccccgtgggttctcgcaataccaatcagggtcatcaggttgcgcctgaaggcctgccctgaagaacgcctgaaattttctcccggatcgccgctcatgcttttccatgccaccgagtgaatatgcggcttgattgcgggatgacccagtttttccgctatcctgtccagcaatcggctgtggcgccagaaagggagttgggggtattcccagaccttttgcgcatgggaataatcggtttggaaatccgagaacatcaagcgcgtccaggcatcattgaaacccgtatagagcagcacgatcgcgggctgcagatgaaccactcttcccgccagcagggaaatgatgttcggcgtcgcatacccgcccagcccggcattgatgacattgattttcttgtcgccgcgcgtggacttgcgcagaatctcctccagctggaaaggatagctttcatgcgtgtatacccgcgtgccataagtgctcgatccgcccagggccacgatgttaatcgtgttctcatccgcccggtagaatacgttcttgtccgcccggtagccctgcgcgttatggttgctgttgtccggattggccacataggccgagaagggatgtggctcgaagatcgcctccggattcgtcgtaacctcgggcgctgcactctccggaccggcaaggttatcgtacaagcgcacacccgcttcggccagaacgaaaagcaccagccagatgatacccgtgaaaacaagattctttttcatacccgcaaagccgtcaatgaaagttttcatgattggttattgtcttgccggcaagcgctgccgatatttaccttgtggtattcattgatcgtggtatccgcgtctccactgcgatacccggcaagctctcgccaatggcggtcatggcgccggccaccgcgattttcaccaaacgaggcagtttcagcacgaaggccggttcttccagtggaggcaatccgctcactcacttacctcgtctggccgaagaaaataacatcaaggaagctctgattaattccgtcgttcgtggtgagcctgtcgaaccatgaacgctaagcattgtaaaatcataatgttatatggttcacccttcgacaagctcagggtgaacggaattaatcagagtttcctcaaattgaagctcatggcagtgctgactctcgtctagcaacacgcaagaatccgtgaataatcctgcatattcaaatggatccgacacatttcacacccgattttggcctgccgaaaagcagagaggccgcatatagcggcctcgcattttgtgctctaacagcttgttagcggctggagcacatatcccaatgatgtatgtaccataatattgtaagctaagattcaaatttgtcaaaggagagatgattatgctgcccgccatgcgttatcgacttggtcttgatcttggctcgtcctccataggctggtgcatggttcgcctgaatcacagcaaccagccttgtgccatcatccgtatgggggtacgaatcttccccgatggccgtaatcctaaagatggcagctcgctggcggtcacgcggcggatggcgcgccaggcccggcgtcggcgtgaccgcctgctgaaacgcaagacccaattattgaccgcattggtcaggctgggttttttccccaaggatgccggagaacgcaaggctctggcgcagctcgacccttacgttctgcggcgcaagggattatacgagccgctgtctcccgccgaatttgcccgcgccctgttccatatcaaccagcgccgcggcttcaagagcaatcgcaagaccgacgccaaagacaaggaacgcagtttaatgaaaaaggctatcaatgaactacgggaacgcctcagacaggaagactgcaagaccgtgggcgaatggctggcgcggcggcacgaacaagggttgagcgtgcgggcacgcctgcgggggcgaaccgcaaaggacaaggcctacgacttctacatcgatcgctctctgatcgaacaggagttcgataccctgtgggagatacagcagggctttaatcccgatattttcaccgaccaggcaagggatgagttgcgggacatccttctctttcaacgccccctcaagccggtcaaacccgggcgttgcaccttaatacccgaagatgaacgggcaccgctggccctgccaagcacccagcgatttcgcatataccaggaactgaataatcttcgtctgatcaatccggacatgtccgagcgtccgctgtcactggatgaacgagataaacttgccgatctgctggaaaaaggcaacctgacctttggcaaaatccgccgtacactcaacctcgattccaccaccggcttcaatctggaagacgaaaaacgtgatcgtctcaaaggaaatgccaccagtctggtactgcgaaaagcagcctgctttggtgaagcatgggatagattcgacccggcatggcaggacgccattgtcgaaaaactgctcaacgagcctagcgaatcggtgctcatgcactggctaacagaaaatactgaaattaactcggaacaagcggaaaccctggccaatatcagcctgcccgaaggttatggaatgctgggccggcaggccctggcacgcatcctgccggaactgcgcaaggctgtggtcacctacgacaaggctgtaaccaatgccggatttgacagtcacagcgccctgtcccattttcagcagacgggcgagatcatggaccgcctgccctattacggcgaaccactccagcgccatgtcggctttggtaccggtgaacccgatgacccaccggaaaaacgttttggcagaatcgccaacccaaccgtccatatcgggcttaatgaacttcgcaaggtgatcaacgggctgattgaaaaatacggccaccccagcgaaatcattgtggaagtggcgcgagaactgaagctgagccgcaggcgaaaacaggaaatcgagaaagagcaagccgcccggcaaaaaagaaacaaggcactggtgaaagaagcctgtgaaattctcggctacgagccaaatcatatcgacggcgccaagctgcgcgaactgtcacaaaaaatgcaactttggacagagctcaatccgagagacgtggttgagcggcgctgcccctataccggcgaacagatcagcattaacaagctgttgtcgcccgaagtggaaatcgaacacattctgcccttctccatgacgctggacaacagcctcaacaacaaaacggtatgcctgcgccgcgccaaccgggaaaaaggtaaccgcacgccctttgatgccttcggcaaacaagccgtggagggctatgactacgatggcatgttgcaacgcgcccggcacatgccccgcgccaaggcgtggcgtttcggcccggatgccatgcagcgctggctgcgggatgaacaggactttctcgcccgcgccctcaatgataccgcatacctctcccgtattgctcacgagtatcttaccctcgtctgcccacaagtgcgcgtcatacctggccgtatgacagccatgctgcgtggtaaattcggcctttccaccctgctcggcgattcgcccacaaaaaatcgcaatgaccaccgccaccacgccatcgatgctgccgtgattgcggttactgatcaggggctattacaacgctttgccaaagccagcgccaatgcccgggagaaacaactggaccgcctggtggaaaacatgccgctgccctggcctgcttaccaggaacaagtacaacgggccgtaaacaccatccgcgtcagtcatcgtcccgaccatggatatcagggcgcgctgcatgaagccactgcatggggtctgcgaaaagatggcaaggcagtacggcatgaaacgcccgaaggtggcggttcccgaaaagccaggatcaaatccgccgatgccatgatccccatcagcagcaccggtgacccggaacgccacggaaaagatgttgatggcaagcccagagcctacaaggcctatctcggtggcagcaattattgcatcgagataattaccaatgaaaaaggcaaatggcaaggtgaggttgttaccacctatgaagcctatcagatcatcagaaaatatggagaagataaagggtggaagcgcctgcgcaatccaaaacaaagccagagtggcaaacctctggtcatgagactgatgaacggggacatgatttcaatggtgaataatgatacacggtgcctgatgcgggtatgccaaatcaagcgctccaagagtatcatttttgcacctcacaacgaagccaatgtggatgcaagaaatcgggacaaaactgacccattcagttatatctccaagactcccggcagtctgcaaaaaagccgggcccgttatgttaccgtatcccctattggcaacatgaaggtttaccgctaggtacatagcatcatgctcgggcgaatcgtggaagtggccaacgacaatcggcacctgttcgtttcacgcggattcatggttattcgtgagacaaatggcaacggaactgaactgggacaagtaccgttggatgacattgccgccgtagtggctaatgcccacggcctgagttataccaacaacctgctcgtggcactggcagatcgtggcgtccccttcgtgctatgtggtcccaatcacaaccctgcaggaatgatctggcccgtcgacggccactccacacagtcaggccgatttgacgcccaacttgcaacaaaaaagcccttgcgcaaacgcctgtggtcttccattgtcaaaagcaagctgaaccagcaggctgccgcactggaggcagccggagcacccgtcacccccctgacatccctggttgcaaaggtacgttccggtgaccccgacaacattgaggcacagggagcacggcgctactggcgactgcttttcggcgaagacttccggagaaaccggcaggctggtggagtcaacgggctgctcaactatggttacaccgtgctgcgtgcggcaactgcccgcgccatcatcgccgcagggcttcatccaggcatcggcatccatcacacgaaccagggtaacgccatgcggttggccgatgacctcatggaaccctaccgcccctttatcgatctgcttgcctggcaactcagacgccagaacatgacagaggtaaccccggaaaccaagcgcatcatggtacgcggactctacaacgatctcatgaccaatgcaggcgctacccccatgcaggtatcagtgcaaaaactggccacgtcactggctcaagtctaccttggtgaacgggagcagctcgatctgccattgccaggtttgcccatcgccatgtctaccgatctgtccgcagattgaagaccatgctgtcaggataccgaatcatgtggattgccgtaatgttcgatttaccagtcgttagccgcgaagaacgtaaagcagccacagccttccggttatcccttctggatatgggctttgaaatgtcacagttttccgtctacatgcgtttttgctccagccaggcccaggtagaaacctactgcaaacgtatcgaatcggccttgcctgaaggcggcaacgtcaatattctcaccctgacggacaaacaatatgaacgtatcatttcctaccagggccgcagccgacaggacgcaaaaaaagcaccagaacaatttgaactattctgaatgtctcgcgaaaaaatcactccgaaaaacaaaaaaccccatgatattcatggggttgcgacagatggagtttacatcattgggatatgtgcaccaaccggaactacgggcctggtcatgatactgccaactggagtttacatcattgggat

SEQ ID NO: 1884 - DNA, 6591 bp, synthetic construct
  source 1..6591: mol_type = other DNA
  misc_feature 1..6591: note = Synthetic
agtggacggcgctggggttggcgcgcacgagacaggcgattgccgcttgaggtcgatatagctttttgcgggaagcgttatctcattgggactcggtgcgatttatggtgttagttgattttggcgcttttaccgatttagcccatgtctaataaggcgttcagctaaaagctgaagtcggagcaccgtaggatgggtggaacgaagcgattcccagactacgttctcaaaacaaacgcgaatacccaaatacctacccaaaaatagccaattgaatcggctgtggttacgaactcgaatttcgcacaagcgctcatgccgactgataccaaacggcccgaccgacaccatgcttggtcaatcgccccatttcgaccagtttacgcaagtgaaccttgaccgtgttccggttggcaagactcgcggtcaccgcatcattgatcgtaatttgcccttgaccgcgtgccagattcagaatcaatagcgacaactcgggaagcggtgaaagcatcaacttttcgtgttcaaccttcgcgttgaggcgcatcacttgcgacgcgagcgagcgcaggaaaaacagaatccacggctcccaggtgggcgcatcgcttcgaatcgtgccctgcgtttgccgcagtgccaagtagtagccctgcttgttttgctcgacgatagattcgagcgaactgtagggcacgtaggcgtaccccgcctgcaacagcaacaaggtcgtgagcacgcgagacagtcgaccattgccgtcctcgaaggggtgaacttctaagaacaccaccacaaaaacggcgatggccaacagcggatgaagtgtcttaccgtccttttccgcccgataccattgcaccaattcggtcatcaagcgcggcgtctcaaacggcgacgccgtctcaaaaatcaccgcaacctgattgcccgcctcatcgaatgcagccacatggttcgaatgcgtcttgtaatgcccccggtggcggacatctttgtccgcgtacaccaacaggtcacggtgaagttgcttgatatggttttcagagaacgggatgtgctcccaggcgctaaacaccagctccatcacctcggcatagcccgcaacctcctgttcgtcacgggtggcaaacgacttgatttcaagccgcgcaagcaacgcttcaacgtcgcgattagtgagcttgctaccctcgatacgagtagacgagccaatgctctcgatggtcgccacgcggcgcaacgcaaatagccgctcgggtgcaagcatcccaagcgcgcgccaagcgcccttaaattcatcaatctgagcgatcagcttgaggatgtccgcggagatggaaatattctgaatattcaacatacccagtaatttacccataaatacccattttgcaaatctcgatgcgccccttgacgcggatcggccatttcgcccgctcccgcggatggtcgacgatgtgtccacgagacggcccctccgacagcaaacgccacgacgcgcgacaacaaagttatggacagcttgaaaaaaatttctggaaaagaccgcgagacgttcaacgctccgccgtgtgtcttctgcgccgtcttgacagacagtgcagcagcgcattggacgcacattcactcatcagcaaaattcgctcgcccaatgtaaaaagagccgcatatagcggccctttcatttggtgcatctttcagcttgttagcggccagaacacacatcccaattagcgtaagtgacgttactatcgtttgaatcgcgtttttagtcaagcgcacaatcacaaaaggaggatgttgctgtggtgcgaaaaatgttttaccggctagcgcttgaccttggttcaacatcactcgggtgggcaatgattcgcctcaacgagaacaacgagcccatcgcaatcataaaggcaggtgctcgcatcttctctgacggtcgcaatccaaaagatggaacctcgcttgcggttacgcgacgcgatgcacgcgcgatgcgccgccgccgtgatcgattgttgaagcgcaaagcgcggatgatgcgcgcgttgatcgagcatggtttctttcccgccgacgaggccgaacgaaaagcgctcgaacgacttgatccatacgcgcttcgcgcgagggggcttgacgaaccgttgacgccgcccgagttcgcgcgcgccctcttccatatcaatcagcggcgcggcttcaagagcaatcgcaagaccgatacgaaggaatccgacagcagcgtgatgaaaggtgcgatcaactcgctccgtgcgctcctcgcgagcggagaagcgcacacgcgcacggttggcgagtggctccacatgcgcacgcttgcgggtgacccgacgcgtgcgcgacgacgcgaggtggtcgtgacgaaagacgacggcaaaaacaagaagctcgtgagctacgacctctacattgatcgtgcgatggttgagaaggagttcgacgagctctggaagaagcagtcgtcgctgaatccagcggtctacacgagcgcaattggcgcggaactgaaagacgttttgctgcaccagcgcccgctaaagcccgtacggccaggtcgatgcacattcatcccaacggaggagcgcgcgccacttgcgctgcctagtgtgcagcggtttcgcatttatcaagaagcgaatcatttgcgaattctcgggcggggcttggagccagtcgcgctcacgttggaacaacgcaacattgttgctgatgcactggagcggaacggcaagcagacgtttacccagctcaaaaaattgctaggcatcggcgggtcagcgacgtttactcacgaggacgttaaacgcacggaactgaagggagatggaacgagcgccacgctatctaaaccggatcaattcggcaagacgtggtttgatttcgacgatactttgcaagacgaaatcgtcatgcgcatcctcaccgaagagagcgaagtcgcgttggtgaattggctcattgagcgcacgaagattgacgaacagcacgcgcaaaatattgcgaatgtcgggcttgcagaaggctatggcagcgtgagccgagcagctcttgcgcgtgtccttcccgagcttcggcgcaacgtcgaaccaccgttgacctacgacaaagccgtcatcgcagcgggcttcgagcaccacagtaatctaagtcccgccgcgactggcgaaatactcgacgagttgccttactacggcgagccgctgcagcgcttcgtcggattcgccgatccacgcgcgacggaaaacgatcccccagaaaagcgcttcggtcgcatcgccaatccgacggttcatatcggactcaatcaagttcgcagggtggtcaacgcactcattcgcaagtacggtcacccggctgaaatgattgttgaggtcgcgcgcgacttgaagcagaacaaggaacagcgtgaggaagacagcaaacggcaagcggcgaatcagtttcgcaacgcgcggtatcgcagcgtcatcgcaaagcagttgaacatcgatgaaaaccaagttcgccgcgatgatttgcaaaaggtattgctgtgggaagagttgaattttggcgatgcgttgaaccgcaaatgtccctacaccggcgagtcgatcagtctggggatgctgctctccgatcaggttgaaagtgaacacatcttgccgttttcgatgacacttgacgacagtctcaacaacaaaaccgtggcgctgcgtcgagccaatcgcgacaaaggcaacgcgacgccgtggcaggcttttggtgagcgcactgttgccggttacgactacaacgccatcctcgcgcgcgccgaattgatgccgaagaacaagcgctatcgtttcggcaaagacggctatcagcaatggctccgtgaggacaaggatttcctcgctcgtgcgcttaatgacacacgctatctctcacgcgtggcgcgagagtacgtgcgcctcatctgccccggagcgcgagtgattcccggccagatgactgcgatgctgcgcggcaaatttggcgtgaacaatgtgctgggcgtttcgggagaaaagaaccgcaacgatcatcgtcatcacgcggtggatgcgtgcgtaattggcgtgaccgatcaaggtatgttgcaaaaattcgcgagtgccagcgcgagtgcccgcgagcgaggcttagggcgattagtcgaaatgatgcccgatccgtggccgacgtatcgcacgcatgtggcgcgtgcagtgaacgcgatttgggtcagccacaagcccgatcactcgcatgaaggtgcgatgcacgataccactgcatacaaaccaccgcatttggacaacgcaaagatgtggaggacgaggggaatcaacgggcagaacccaaatgagaagaaggcggattccgaggcgatgatttcaatcaccgacggtaacactgcgaaccgacacgccaaggatgagcacggcatcgcacgctcatacaaaggctacgtcggcaacagcaacttctgcatcgatattgtgcttaatggcaaaggcaagtgggagggtgaagttgtttccacatttgatgcgtatcaaatcgttcgcgcggatagcgtgacacggctgcgcgaccgcgtcttgagcatcagtggcaaaccacttgtgatgcgcttgattgtcaacgattcagtgcggttaaaggtcaatggtgtccttcgcaccatgcgcgttgccaaaataagtggaaacggacaagtttttatgtctgactgtcacgaagcgaatgtcgccgcgcgcaacagcgatgctaaggatgagttcgggtacgtgtcgaaaatggctggttcgctccacacagcagaagcacgccgcgtcacgatctccgaaatcggcgaagtccgcgaccccggcttcaagggataacgaatcatgatcggccgcatcgttgaagtggccgatgaccgacgacatctgtttgtgtcgcgcggctttatggtcgtgcaggacactgagggcgagcgcaaagagcttgggcaagttccgctggatgacattgcagcagtaatcgccaacgcgcatggcttgtcgtacacgaataatttgctggtgcagttggccgagcggtgtgcgccgtttgtgctgtgtggggcaaatcacaacgtcgttggaatgttgattccagttgatggcaactatcagcaggccaagcgctacgacgcgcaaatcgcagcaaccaaacccacgcacaagcgcctgtgggcggacatcgtgcgcgctaagcttcagcagcaaggcgcggcgctggaagcaacgggcgcgcccactgcgccgctcaccatgctcgcgcggcgcgtgcgctcgggcgaccctgacaatctggaagcgcaaggtgcgcagaaatattggcgactactttttggcgatgattttcggcgcgatcaacagggcgcaggtttgaacggcatgctcaattacggctacaccgttttgcgcgccgcaaccgcgcgcgctgtggtcgcagcgggcctgcacccgacacttggcattcatcattcgaacgagggcaatgccatgcgtttggttgacgatttgatggagccgtttcgcccaatgattgacttgcgtgtctggcgcttgcatcgcaacgggcaaagtgaagtagtgcccgataccaagcgcgctttggttcgcgtgctgtatgaggacatgcaaacgggcatcggcgcgaccccggtaatggtgtgtctacagaagctcgccgtgtcaatcgcgcaggtctatatgggcgagcgtgagcaactggatttgccgttccccggattgccgctcgatatggtagccagcctgagcgaatagcaaaagaaccgccgaatcaatcaacgtgctttcaggatatcgactcatgtggatggtggtgatgttcgacttgcctgtgatcgaaaaaaacgagcgcaaggacgcaacgcgctttcgcactaacctgctcgactggggattcgagatgtgccagttctcggtttacgcgcgcttctgcacgagtcaggcgcaaatcgatacactcgtcaaacaagtggaatttgcgctgccggaaggcggaaatgtgaacgtccttttcttcaccgataagcagtacgaacgcatcatcagcttccgaggcaggcaaaaagaccccgcaaaaaaagcacccgatcagtatctattgttctaaatgagcacgattttctcgacccagaatatgaaaaaccccctgatttctcagggggttatcacagagctagtctagctaattgggatgtgtgctctgaccggaacaagggcctcacctacctgcagggattcgtaagtctagctaattgggatgtgtgctctgaccggaactaccgttccaaatacgcgctttttcgagagagtctagctaattgggatgtgtgctctgaccggaacaagaagccgactacggccccgacacgccccagtctagctaattgggatgtgtgctctgaccggaactcacagggctgttcagattgggttaactaaagtctagctaattgggatgtgtgctctgaccggaaccgattctgtgggacgggctcgttggcccggcccacagaatcgc

SEQ ID NO: 1885 - DNA, 6557 bp, synthetic construct
  source 1..6557: mol_type = other DNA
  variation 1863..1872: note = n is a, c, g, or t
  misc_feature 1..6557: note = Synthetic
cctgaacacactaccgtcactcaaaaaaaatcgactaccacacccaccgtcatggtggtggacgattcactgacggtacgcaaagtaacctgccggttgctggaacgcgaaggctgcgatgtgctgattgcaaagaacggcgccgaagccatccaaatactccaggaaaccactccggatgccatgctgatcgacctggaaatgcctaaaatggacggttttgaactgatcaaaaagatccgcgccaacccggaaacagcccatatcccgattatcatcatctcgtcccgaaccgcggaaaaacaccggaaaattgccaacgatttgggggttaatatatttctgggcaaaccttataaagaggatgagttgttaaaccatttgtccggattgatcagatcactcaaaaaatgaaggccgcatatagcggccctctcatttggtgcatctttctgcttgttagcgtccagagcacaaatcccaatatactgttgcgggatacattctaatgatagaacacaaaacgatcaatgaaatcctacaaaaactttagttacagtcggagaacataccatgctgcgtaagatgcactatcgcctggcacttgatttagggtcaacttcactgggttgggcaatgatcagattggatgccaatcagcaaccttgtgcaatcatcaaagcaggagtgcgcatcttttcaaatggccgtcatccgaaagatggttcttctttggctgtaacacgccgggaagcccgtaccatgcgccgtcgccgtgaccgcctgctcaaacgcaaggcacgcatgatgcgtacacttatagagtatggcttttttcctgccgaagaagcacaacgcaaggcgctagaaaccatggatccctatgcgctacgtgctagaggattggatgaagcgcttactccctccgaatttggccgcgcactgtttcacatcaaccagcggcgtggcttcaaaagtaaccgtaaaaccgataaaaaagataacgacagcggcgcattgaaaaccgccatcaatacacttcgcgaaatactcaaaaccgagaactgccgcacggtaggtgaatggctacacaagcgcaatgaagcgggtcaaaccgttcgcgcacgctaccaccaaaacaaaaccatcaaagatgatggcaagacaaaaattgacaagtattacgacctttacattgaccgtgccatgattgagcatgagtttgatgagttatggaaaaaacaagcggaattaaatccaaccttgttcagcgaagctgctcgcatcgacctgaaagatgtcttgttgcatcagcgtccgctcaagcccgtcaaacccgggcgttgcacattcatgccggacgaagaacgcgcgccgttagctttacccagcacacaacgctttcgcatctatcaggaagttaataacttacgtattttgcgggaaggtttaaaggaagaaccattgacgctggaacaacgcgacaaattggttgcaaaactagaacgcgggaatcagtcatttaagtctgcaatccctaaaaccataggcgtatctggcgcggtaggatttaatctggccgatgccaaaaaaaccgaactcaaaggcaataccaccagcgccattctcggcaaaaaggaacatttaggcgaagcctggtttacattcaatgaaaccaaacaagatgccattgtgctgcaattggtcaaagaagaaaatgaagctaaacttattcggtggctgcaagaccagacaggtattgatgaaaaacatgctgaagttattgccaatgtcgggttgccggaaggttacggcagtttatgcaccaaagcattggcacgcatcctgccggaacttcgccgnnnnnnnnnngacgtaataacgtacgacaaagccgtccaagccgccggctttaaacatcatagccagcttggctcaaacattgaaatttccggcatcaccttcaaaatcgaaagcgttgaccaggattccggtgaaatcaaggaattccacattcacaaggaattgccttactacggcgaatatttgcagcgtcatgttggctttggcagcggcaaaccggaagattccatcgaaaaacgttacggcaagatcgccaatcccaccgtgcatatcggactcaatcaaattcgtgtggtggtgaatgcgctgatcaagcgctacggacaccctcgcgaagtaattgttgaaatagcgcgcgacctgaagcaaagcaaagatcaacgcgatgaagaaagcaagcggcaaaccgagaatcagaaacgtaacgaacggttacgtaaggatattgcgggtatcctgggaatcagcgaagaacgtgtccggcgtgacgacattgagaaaatgattttatgggaagaacttagctttgatcccgcagatcgccgctgcccttattcctgtgttcaagtcagtaccaccatgctgttgagcgatgaagtggaaatcgagcatatcctgcccttttcacaaacactggatgatagcctcaacaacaaaacagtggcgctccgtcaggccaatcgcatcaagggcaattacacgccttgggaagctttcggtgcgcgaagtatctcgggttttgactatgcagcgattctggctagagctgaactaatgcccaaggcgaagcgctaccgcttcgccgaagacggttatcaacgctggctcaaagacgatgcaggctttctggcgagagcactgaacgattcgcgctacctgagcaagattgcacgtgaatatatgagcttgatttgccccaatacgcgcgtcattcccggacaaatgaccgcaatgctgcgcgcaaaattcggtctgaacgatgtactcggtctgaatggtgagaaaaaccgtaacgatcatcgccaccatgcagtggatgcctgcgtaatcaccgtaacggatcaaggcttattacagcgtttcgccaaagccagcgccagtgcacgtgaacgacaactcaatcgccttgtggaaaaaatgccactaccgtgggaaaactatcgagaacatgtgcaacgcgccgtcgaaaatatttggattagccatagaccagatcatgcctatcagggtggaatttttgattcaacaatttatggattgagaggaaagggaaaagcaacatatagacaggaaattgatggccaacgtcaaaggcccatcttaaatcgtgaggttgttagttttacagacgataaagcaaagtcacaaagtggttatcggcataggctacacaaagacggcactcctaaaccttacatgggactgtggagtcgtagcaattactgcattgaaataatcaaaacagaaagcggtggctggtcgagtgaggtaattgagcgctaccgagcctaccagattgttgcaaaatttgacgaagcaagattaagacatcctacgttaagcatagaggggaaaccattaataatgcggctattgattgatgattatgtccgtgcggaaaataatggaaaaacacaattattgtgtgtactaaaaatcaatagtacaggagcaattactttcattctgcataatgaatcaaatatcagtgcacggtatttcgcaaagctcgctgcacagaaagaccagaaagctggaaaagcattcaatgcaccggcgttagaagataatttcttccaaaaaagtatttcgccagaaagcttacgcggttttaaagcgcgtcgcgtcaccatttcacccattggcgaacttagcgattctggtttcaaggaataattgaaatgattgggcgcatcgttgaagtagcggatgaccggcgacatctgtttctctcgcgaggtttcatggtggtcaaggataccgagggggaacgcaaggaattaggacaaataccactggatgatattgctgctgttatcgccaatgcacatggcctgagttataccaataatctgttagtggcactggccgaacgctgtgcgccgttcgtgctgtgtgccgccaatcacaatgcggtgggcatggtgctgacgaccgatggcaattatcagcaagcaaaacgattttatgcgcagcttgccgccagccagccattgaagaagcgtctttgggcggaaattgtcaaatccaagcttcagcaacaggctgatgcacttgaagctgcaggtgcgccatttattcccctatccgctttagtccgtaaagtacgttcgggtgatccggataatttcgaagctcaaggagcgcggcgctactgggggcttctgtttggggatgattttcgccgcgatcaacaaagtgatggccttaacgccatgctcaactacggttataccgttttgcgcgcaactaccgcgcgtgctgtggttgcggcgggattgcatccaactattggcttacatcacagcaacgaaggcaatgcgatgcgcttggtagatgacctaatggagcctttccgtcctgtaatagatctgaaagtctggcaattgcatcagcatgtgaatctcgggtgacaccagaaagtaaacgtgaattggtaagaacgctatacgatgatatgcaaaccagtgcaggagcaacacctctaatagtctgcacgcagaaacttgccacttcactggcacaagtttttatgggggaaagaaataaaatagacttgcctttgccagggttgccactcgaccttgccgcatcatttctggacaactaacaacgggccatgctttccggatatcgcttaatgtggatcatagtcatgtttgatttgccagtcgttgagaaagctgagcgtaaagctgctacagattttcgcaatactttgttagacatgggttttgagatgtcgcaattttctgtctatatgcgtttctgtagcagccagagtcagatcgatacgtattgcacacaagtagagaagagcttgcctatgggtggtaaagtgaatatcctgcaatttaccgacaaacagtatgaacggatcattacttttcgcggaaaagccaaacaaccaagcaaaaaatcacccgagcagtatgaacttttctgacaaatattatagtttcttcacttgcatacacattaactctattaacaatcatagagttaatgtgtagttagtttagcatattgggatttgtgctctgaccggaaccaataccgccgactgttacatgcagaaccaagctcttcactcaaaaaatccgaccaactaagtaaatgaagcaagtctgaattttagtatagctatcgctattcactgcaagcgattttccactcagcttcatcgatgctgtccggtggtaccatttcccatttctgcggttggctgtacgagcgaatcaaatcgccatcctccatattccaactgaataacgagaaagccagttttctcatctgcttttctttgcaatcgtattcgcgccggattttctcggataagaattcaaccccggaagctttctgcacgatttgatagtcgaacaaaacccacattttgacccgattgcctgccttgcgaatcgaagcgatgtcggcataagcagtgtaaccgcctttactttcgctctcacccacttttgtccattccgccatcgcactagtactaataagggccagaattagagtgaagagtagttttttcatagtgtatttccgtttcttgtgatcagaatggggggcctgaaacgcagctaacaggtggagctttggttattcacaggtgctcagtaacgataagcaatctttgtccggcaaagcatggtgtagtgaagcatgtgccaaatagcgaatacaaaagacaaacaacagacggattttcacattaacgctgtttaaatgcaattgtgccaggcctcactgtgtgcaaagtttgcgtaaagagagcgtcccgccgcaagccgcggggtatgaattgcgctttttaatccgttggttttgaatcagctttcgtcccaagaggcgaggaattaaacccacagagattaaaaatcagtgttatttacgctcttgatcaacaataatcacattctttttaacgatagcttgcgcacgttcaattttcactatctctttaatttctattctcttctccttgtttgtaaaaacaatactatgatcgccgactggtacattacccagtatataaaacccctgcgcgtcagtgattgattgtatttgaggtgatccggataaagacacttcgattttatcaacaggctttcctgctaagttaggatctttatcaccaaatgtaacaatgccggcaacagccccatactgtggagcagcattcttttccggggccattttattggcgagggatcgcaccatgagcaggatcgtttctgatgcaaatccagcggcaaatgccaaaacgacagcattggtcgtattgctgggctcaatcagatagtacgcaagaatcgcaagaaaaggtgccgaaataaattgcaccatttgaaatatcaagtgttcacgaaattcgtattgcgatagttttggttgcctctcggtggcgatatgctctgaaccggcctgtttttggagttcgggtagccgtctggtcaggctgatac

SEQ ID NO: 1886 - DNA, 6126 bp, synthetic construct
  source 1..6126: mol_type = other DNA
  misc_feature 1..6126: note = Synthetic
agaaaaagtcgccgctttccttgaggcctacggcgaaggcacgcgccacttcaccatctccgccatcaacggcgagggctgcaaggaaatgacttacgccatcatggaacacctggaccgggtcgcggcacaagaacaggaagcggtcagcgacagcgcgcaggaaagcggaatcgatatctacgacccatcgctatgaaaaccgtactgacacaagcccgtcgcatcgtcgtcaaagtcggcagcagcctggtcaccaacagtggcgccggtctggacctgcgggctatcggcaattgggcgcagcaaatttccgccctgcgcgcgcacggctgcgaggtgctactcgtctcctccggcgccatcgccgagggtatgcaacgcctcggctggaaacaacgccccggcgcggtgcatgaattgcaggcggcggcagccgtcggccagatggggctggtgcaagcctacgaaagcgcattccgcgagcaccacctgctcgccgcgcaagtgttgctcacccacgccgacctggccgaccgcgaacgctatctgaatgcgcgctccaccctgcgcaccctgctcaacctcggcgtcataccgatcatcaacgagaacgacaccgtggtcaccgacgagatcaaattcggcgacaacgacaccctcggcgcgctggtcaccaacctgatcgaagccgacacgctggtcatcctcaccgaccagaccggcctgttcaccgccgacccgcgcacagacagcagcgccacccccatccgtgaagcgcaggcgggcgacggcaaactggagctgatggccggcggcacgggcagccacatcgggcgcggcggcatgatcaccaaggtgctcgctgccaaacgcgccgcgcgcagcggcgcgcacaccgtcatcgcctccggccataaaaaagacgtgttgccgcgcctgctgcaaggcgaagccatcggcaccctgctgctcgctcccgccctcgcgctggatgcgcgcaagcaatggctggccgaccacctgcaggtcagcggcaaactgactttggatgacggcgcggtgcgcgccctgcgccaggaaggcaaaagcctgctccccatcggcgtcaccggtgtcggcggcaacttccagcgcggcgcggtcgtcgccctcctcgacggcgacggccgcgacatcgcgcgcggcctggtcaactacagcgccgacgaagcccgcctcatcgccagaaaacccagcagcgagatcgaagccatcctcggctatatcgacgagccggaactgatccacagagacaatctcgtattactttgaagaagcaaaacaaagttgcggaacaaaccaactgaaaaaagctgaaccgcgaggcagtcggcaaagccacaatttgattctgcggtaatactatccaaccaaagcaaagagccgcatatagcggctctttcatttggtgcatctttcagcttgttagcggtcagagcacaaatcccaatctactggtgggtggcatcctagttcccagaatcgatatcgtcaagaaattcgtaatagaatcccacactcacacaaagggggcaacatgcaaaataggatgcgttatcgcctggcgcttgatttgggttccacctcacttggctgggcaatgattcgactgaatgccgacaaccaaccatgcgccgtcattaaagcgggcgtccgcatcttctccgatggccgcaatccaaaggatggatcctcactggccgttacccgccgagaagcgcgcgccatgcgccgcaggcgcgaccgcctgctgaaacgcaaggcgcgcatgttgcgcacgctcattgaatacggcttcttccccgcagaagaagtgcagcgcaaggcattggaaactctgaacccttatgtgctgagagccaaaggcttggatgaagctctgagtcctgcagaatttggccgcgcgcttttccacatcaaccagcggcgcggcttcaagagcaatcgcaaaacagacaaaaaagataatgacagcggcgcactgaaaactgcaatcagcaaactgcgcgaaacgctcaaaacagaaaactaccgcacagtcggcgaatggttatacaagcgcgacttggctggcaagcccgtgcgcgcccgttatcaccaggacaaagagatcaaggaagacggcaagacaaggataaacaagtattacgacctctatatcgatcgcgcgatgatcgagcatgagtttgacgaactctggaggaatcaagccgaactgaacccctcacaattcaacgagaaagcccgtgacgacctgaaagacgtactgttgcatcaacgtccactcaaacccgtcaagcctgggcgttgcacgctcatgccggatgaggaacgcgccccgctggctctgcccaccacccagcgtttccgcatgtatcaggaggtgaacaacctgcgcatcctgcgaaatgggctgaaggaagaaccattaaccttgcaacagcgtgacacgctcatcaccgcactggaagaaaacaacaaatgtacattcacgaaaatcaagaagctgctcggcgtaggcggggcggtgaaattcaactttgaagacccaaaacacgaagaactaaaaggcaataccactagcgcaatccttggcaagaacgaacacttcgggcctgcatggttcaaactcaacgaaaccgagcaggatgccattgtgatgcaacttctcacggaagaaaacgaaggcaagctcgtgcactggctgcaaaatgaaactggagttgatgaacagcacgccgaagcaatcgccaatgcaggcctgccagaaggctatggcagtctatgcgccaaagcgcttgcgcttatcctgccggagttgcgcaaagatgtcgtaacgtatgacaaggcggtacaggccgcaggctttgaacatcacagcaaactcaccaccaattcagaaattcctggtgtcaccgtcaaagtggaaatcatcgatcaggatacgggtgagatcaaggcattccatattcacaaggaactgccttactacggcgaatacctacagcgtcatgttggctttggtagcggcaaaccggaagactcacccgagaaacgctacggcaaaatcgccaatccgaccgtgcatattggtttgaatcagacccgactggtcgtgaattccctcatcaagcgctacggacatcccagcgaagtaattgtcgaggtggctcgtgatttgaaacaaagccgggaacaacgcaaggaagaacaggagcggcaggccaagaatcaaaaacgcaatgaacgtctccgcaaggaggccgcaggaatactgaatatcagcgaagaacaggtacaccgagacgacatcgagaagatgattttgtgggaagaactgagcgatgatatcgccgatcggaaatgtccttattccggcaccccaatcagcgccacgatggtattgagcgatgaagttgaaatcgagcatatcctaccattttcacaaaccctggacgacagcctcaataacaaaaccgtggcgatgcgcaaagcgaatcgggtcaaaggcaaccgaaccccttgggatgcaaggcaggattttgctaatcaaggctggaactttgaggacatcgttgcacgtgccggcaatatgcgcaaagaaaagcgctatcgctttgccgaagatggttaccaacgctggctcaaggatgacaagggatttttggcacgcgcgctgaatgacacacgccatcttagtaaagttgcgcgtgaatacctgaacttgatctgtcccaatacgcgcgtcattccaggtcgcatgacggccatgttgcgcggcaaattcggcctaaacgacgtactcggcctccacggggaaaagaaccgcaacgaccaccgccatcacgcggttgatgcctgcgtcattgcggtaacagatcaagggcttctgcaacgctttgccaaagccagcgccagcgcgcgcgaacaacaactcaatcgcctggtggagaacatgccactgccatgggaaagttatcgggagcatgtgcaacgtgcgattgaaaatatctggattagccatcgtccagaccatgcttatcaaggcggaatttttgatgccaccatttatggattgagaggggaaggcaaggcgacctacaggcaagaaattgatggtcaacgccagaggcctatcttaaaccgtgatgttgttagcttcacagatgataaagctaaatcactgaatggctatcgccacgggctacttgagaatggctcccccaaaccttacatgggactgtggagcagaagcaattactgcattgaaatcatcagaacagaaaatgctggatggacggctgaagttatagaacgctaccgtgcataccagattgttgctcaattcggagaggccagactacatcatccgaccttaagcattagtgagcaaccattggtcatgcggttgttgattggcgattatgttcgcgcagaagttgatggaataacgcaattgatgtgcgtactgaaaatcaacagcacaggtgcaattacattcgtgctacacaatgaatcaaatatcagtgcgcgttataccgcaaagcttgcggcacagaagggtcggaaggcgggaaagccattcaatttgtcggcgttagaagacaacttcttccagaaaagtatttcgccagatagtctgcgcggcttcagagcccgacgcgtaaccatctctcccatcggcgagttgcgcgatcccggcttcaaggaataagggaaatgataggccgcatcgtcgaagtggcggatgacaagcggcatctgtttctctcgcgcggttttcttgtggtgcaagataccgaaggtgatcgcaaagagttggggcaggttccgctggatgatatcgctgccgtgatcgctaatgcccacggactgagctataccaacaatctgctggtggcactggcagagcgttgcgccccgtttgtgttatgcgccgccaaccataatgcggtcgggatggtgatgaccatcgacggcaattatcagcaggccaaacggtttgacgcgcaactcgccgccacacaaccattgatcaagcgcatgtgggcagacatcgtcaaatccaaactccagcaacaagccgctgcgcttgaggccgcaggtgctccatttgttccgctgcaagcactggtgcgcaaagttcgctcgggtgacccggagaatttcgaggcgcaaggcgccaagcgctattgggggttattgtttggcgaagactttcgccgtgatcagcaaggtggcggcattaacgccatgctcaactatggatatacagttcttcgtgctgccaccgcacgcgcgatcgtcgcggctgggctgcaccccaccatcgggctgcaccacagcaacgaaggcaacgccatgcgtttggtggacgacttgatggagccgttcaggccggtgattgacttgaaggtttggcaactccagcggcaaggggaaacaatgatcacgcccgaaagcaaacgcgccctggtcaaaactttatatgacgacatgcaaaccagcgcaggtgcaaccccggtgatggtgtgcgcacaaaaacttgcgatctctttggcgcaagttttcatgggagaaaaagacaagctcgatcttccactgccggggctaccgctcaatctcgcgtcgtcattgcaggatgattagcacaagatgctctcggggtatcgccttatgtgggtcgtggtgatgttcgatttgccggttgtcgaaaaggccgaacgcaaagccgccacggactttcgaaatgcactgctcgacatgggtttcgagatgtcacagttttcggtttatatgcgtttttgcagcagtcagagccaagtggacacctattgcacacaggtcgaaaaatccttgcccgcgggcggcaaagtcaacatactgcagttcaccgacaaacagtacgaacgcatcctcacattcagaggaaaagccaaacaacccgctctcaaatcgccggatcaatacgagttattctgatggaacacgttgtttctttcccgcaaaaacacgacaatcacccggtgaatcaggtggttgtcgtgttgcgagtttagcagattgttgcgagtttagcagatt

SEQ ID NO: 1887 - DNA, 6062 bp, synthetic construct
  misc_feature 1..6062: note = Synthetic
  source 1..6062: mol_type = other DNA
gagcatgatctgctcgttgaatacaaagccactgttgcccaagcggcggcagatcaagagcgtcgcaccgctgagattgtgaaacggcacgaagccgacaaagaggctatccatgaggattatcaaactaggcttgctgacttgcgtcgtgattacgagcgtcggttgcgcgacaaggacggtgccggctccgtgcccgccgctcccgcaaccaccagccgagttgatgatcccgtcagtgacacacgatctcttgaacgttccgcgctcttagagcgatgcgctgaaaccacgctacaactggaagaactccaggagtgggtcaggcgcgttacacgggctgggggatgatatgaacgccgcaaatctatctgaagagtaataagcgcactgaggatataggctgtgatggtagagatcacggctgttattcgacacctcgcacgcagatgacttcgaacagggcggagtgcttcctattcttgcatgatttaacttcaccatgctaaggtttgcataggaaaaactggcggctccatgcaaaggttaataagcggagatggtcgtcaaaatccctcaaccgactctcaaacagcgtccactagtcaaactcgattacgcacttggctagcactagtgctaaacagctgaaggtattgaaatgaagctcttcgttatcatgttcatcgttcttttcgcaatggggtgcgccaggcactcatcaacagtacaggcgaataacaacagcactagcactaacagcgcgcaacgccaggctgactacaaagccacagagcaacgcattcttaatgattgtacgaacatcaaaacgaaccctgcattttcgagtcttgccggaaagatacccttgactagtcaggaaatccaaaatcggcctttaaaaatgctagccctcaaaactgtaccgtcgtcagcatcggagctttatgctatcgaacaatatgcgggttttaaatcgcaatgcgcgaaacgttgggaaaggttttataaccgtgctaagtggcctcagctagggaggatcatggtggccgctgagaatgctaggcaaaaacttttacttgatctctatgagaaaaagatatcttttggtgcttataaccaagcaatggtagtggttgatgaagaagctgataaagcgtgggctgcggcagttgaaagagcgcgtgcccaacgcagggcgaatggccttcgcgctctccaaatgggctgggcgcttagtggagccaaccctgcaaaccaacggtatcgtggacgcacagaaacaacatgtaggcgctacggtaacgaagtacgttgtgaaagctactagttaagccaacggcaagggttcgatgacccctcttgagccgtcgggtctgctattgacgcgtttgcttgttagggtgatgccggcatgacgtgcgctcagcacggcgggtaggcgctcaacgctactgccaaccataaccagagcagtttaaaaactactgcacataaaaataagggccgcgtatagcggccccatcatttggtgcatctttctgcttgttagcgtccagagcgcatatcccaattgtttacacgttaaggataacacgatactctgtgagcgacagtaaaattttctgaggtgtatcgtgggaaaaatgcggtatcggttgggcctagatttaggtagcacatcgattggttgggcgatgcttcgtctcgatgcagacaataacccttgtgcagtgatcaaagctggggtaaggattttcagtgacgggcgcaatccaaaggacggttcttctctagcggtcacaagacgtctggctcgcgcgatgcgccgaagacgcgatcggttgctgaaacgtaagcaacgaatgcttggcctgctcataaagcacggcttttttccagcagacgagtctgagagaaaagccctcgagctacttgatccttacgagctacgtgctcgaggcttagaccaagcactagagcccggtgagtttgcccgcgctgtattccatatcaatcagagacgcggattcaagagcaatcgaaaaacagacaagaaagacaacgatgccggcgcattgaaatctgctatcagctcagtgcgagaagcgcttgattcagcagggtgccgtacggtaggcgaatggttacataaacgaaagattaacgggcagtcagttagagcccgttatagagcgtacgacgtcatcagcgactctggaaagaaaaagcaggaattcaaatacgatttgtatatcgaccgagagatggtcaagcaagaattagccctcatttgggaaaaacaagctagcttgaatccagcattattcaccgaggtggctcgtcgagatatcgaggattgtctattgtttcaacggccactcaagccagttaagcctggtagatgcacattactcccctcagaagaaagggcaccgcttgctcttccgagtcagcaacgttttcgcattttgcaggaagttaacaaccttagatggatcggtgacgatctcacagagcagtcactgactaaaacgcagcgcgataaagtcgtggaggccctcgaaaagaacgggcgtcgaaccttcaaccaactgcgaaaactactgggtattgatgcggaattcaacctcgaagatgcgaagcgctcagatctgaaggggaatgctaccgcggctattctgtcgaaggacgatcactttgggagcgtgtggcatgtacttagcctttctcaacaggaccggattgttactcaattattgacagaagagaacaccggcactttggtagcgtggctcatcgaaaatacggagatcgaagaagcaacagctcaacgtattgctgagactaggctgcctgaaggttatggcaacttgtcagaaaaagctctatcgaaaatattgccacagctgtattctgaggtagtttcatacgcggacgcagtcattaaagctggctttgaacatcacagcaatatttctcatgccgccaccggtgaaattcttgagtcacttccttactacggagagtacctccagcggcatgttggattcggttcgggtaacctcgaggacactccggaaaagcgcttcggtaagctggctaatcccactgtacatatcggccttaaccaacttcgcgttgtcgttaatgagttgatccgtcgctacggtcatccgagtgaggttattgtcgaggtggctcgcgatttaaagcagtcgcaagagcaaaggcgcgaagagcagcgaaggcaggcagagaatcaaaagcgcaacgagcgcttacgctcacaagcagcagagttacttggcataacacctgacagggtgaaaattgatgatcttcataaacttatcctgtgggaggagctaaatttaggaaacgctgcagacaggagatgcccatacagtgggttgcagattagcgctgagatgctacttgggcctgaggtcgaaatagaacacatattgcctttctcaaggactttggatgacagcctgagtaacaaaactgtttctctacgacaagcgaaccgtataaagggtaatcgcagcccttgggaatcaaaagaagatttcgaacgaatgggttggtcggctgaggcgatgatcgaacgcgctaaaaagatgcccaaaaataagcgctaccgatttggtgaaaccgcttggactgagtgggataaagaaggtcaagggtttttagcgagagctctcaatgacacgagataccttagtcggattgcccgagagtacctctctctgatttgcccgcagcagacgagggtgatccccggtcaaatgacggcgttattgcgtaggaaattcggattgaataacgttcttagtcatgacggcgagaaaaaccgtgatgatcaccgccatcatgccgttgatgcgtgcgttgttgcatctacggatcagaggctgttacagcagtttgccaaagccagtgccaatgcacggtcaagtcaagtggggagactcgtggacgacatgccattaccatggccatcctttagagagcatgtgcaacgcgctgtcaaccagatatgggtcagccataagccagatcatggctttgaaggcgcaatgcacaatgacacagcatatggattgcttgaagatgggatggttaaagttcgaaaaaacgttgacggggttcgtgtgacagaaatcactaaattgaatgtcattcccatttccgatcagcgaaaaattgataggcacggtcaacttccggatggatcgccgaaaccatacaaaggctacaaaggtgatagcaattactgcattgagattgtaagaggcgacaaaaatcaatggtcaagtgaagtaataacaacctttcaagcatatcaagttgcgcgtaaagtggaatctgaaggacaacgagacaagaatctaagctcaaatcagcaacctttggtgatgaggcttatgaaagatgattgtgtcttcgtcactgacaatacggacgagaagcgtttacttcgtgtagtcaaaatcggaagcaatgggcagatttttctagcagagcattacgaagcaaacgttgacgcaagaaatcgggacaaaactgactcattcagttacatatcgaaaactgcaggctcccttaaaaactttcatgcccgaatggtcgcggttagcccagccggtttcctgagagaccccgggttcaggggctgagtatgcctgggcgcattgttgaaattgccaacgataaccgcttcctttcggtttatcgcggttttcttgttgtccgatcaacgcaggaggagcgcgaggaaattggcagagtgcccttagatgacattgacgcgttgatttgtaatgcatacggcctaagctacacaaacaatgttcttgttgctctggctgaacgtggttctcctgtggttttatgtggggtgaatcactcgccggtcggagttatttggcccctcgatgggaatcactaccagagtcgaaggatcgatgcgcaaataagctgcaaaccaacgctccgcaaacagctatgggcgtcgatcgttatctccaaaattcatcaacaagcagcgctgctgaaggagcttgggcgaccccatatggcaatcaaacgccttgcgaaacaagttcgaagtggtgatcctaacaacatcgaagcgcaagcagcgcgtgcctactggccactattatttggtcccgcttttcgtcgaaatcgcactgaggcaggggtcaacgggctgctgaactacggatataccgtgttgcggtcctgtgttggacgtgcaaccgttgctgcaggattgcaccccagcatcggttttcatcatagcaatgaaactaatccaatgcgtttggtagatgacttaatggagccataccgcccctttatagatcagaccgttttgacgttagttgagagcggccaaacagaaattaactacgagtcaaagaggcagcttttaactacgctgtacagcgatatacgcacggatacgggaaagtctccactgacagttgaaatacaaaagctttccacttcagttgtgcacattcttatgggacaggtaaacagcttacacctgccaacaatcagctagaagaaagtttagtgggtgtactaggagggtatcgaattgtgtggctcatagtgatgttcgatctccctgtgctgacagccgctcagaggtcgtctgctactcaattccggcttagtctactggacatgggatttttgcgtgcacagcttagtgtttacatgcgattctgcaccagctatgcgcaggcgaatacgtactgtcagagggtgaaaggtgcattaccagacggcgggttggtgaatattgtgcagatcactgataagcagtacgagcgcataatgacattcgagggcaaaaaggctactccaccaaaagagccgatgcagcaattcgatttgttgtaagcgcgccattaaccccatggttcacagccgtcgctaaatatgtgattctcgatcccctcagttacacagggggtcaccatgacagacagcgagaagtattggttcgaacatctgcggctcatcgacagaacagg

SEQ ID NO: 1888 - DNA, 5898 bp, synthetic construct
  misc_feature 1..5898: note = Synthetic
  source 1..5898: mol_type = other DNA
aagcagatctaactggtaaagatggaacttaggcagcactaacagttgcgaagttccattcactattaggattgtgatagcctcaatcatcacatacagcttgatgaaatcctaagtgtaatggtctgcccggaggggatccattaagtgatcacgatttggatccattaagcgatccgtgacactaggtattccttaatatacccattatgtcaatttatcgattaaatcgttgatttcaaatagttttacctctaccgaacaattcctgagaatttgtacaacatcatttttgatcttaaaagactctaacaaattaacatcgattagtttttgccgcatgttaaaagattcaatctaaaacctgttacccagcgttatttaccctaacccagttaccgctgcttaattcactaaaaccaaggtcatcgagatctgctgacgtcaataatgttactagtgagactgggtgtccttcggtcttgtagttgctcagcatgtgtttataaggatcactcgatgagcttttgggagggaaagcttttaaggtatcattaaaagcagaaagccgcatatagcggccttcccatttggtgcatctttctgcttgttagcgtccagtgctcatatcccaatcgaataagtgagtcaattttagcatgaataaaatgaaatacagactagccctagatttgggttcaacttccctaggttgggcaatggttaggctaaaaaactcagaaccatgtgcgattattaaggccggagtaagaatttttagtgacggtagaaaccccaaggatgggtcatcacttgcagtctctagaagggaggctcgtgcaatgagaaggcgcagagatcgtcttttaaagcgaaaagcaaggatgatgaaaacgttggtacaccatgggttctttccagatgatcctttgaaaagaaaattgtttgaaactttagacccgtatcaattgagggcaaggggattaactgagccattaaaaccggaagagtttggtcgagcactttttcatatcaatctaaggcgtggattcaagagcaatcgaaaaactgataaaaacgaatcagatgacaatgcactcaaaagagcaataagtacccttaaaaaagctattgttgacgaaaactgcaaaacagttggtgagtggctacacaaacgaaacactaaaggcttaactgtacgagcaagataccgtcaaaccaaagttgaaaaagacgatgggaaaagtgaaattttcaaaagttatgatctttatgtagatcgagggatgattgaaacagagtttgataccctctgggaggttcaatccgggttcaacccttcgctttttaacgaaactgcaagagacgaacttaaagattgcctcctacaccaaagaccgctacgccctgtaaagccaggtagatgcactttactacccgaagaggaacgagcaccgcttgcattaccgagtcagcaacgttttaggatattccaagaattaaataatttaagaattattggtaaagatttagaggacatacctctatctatagaacaaagaaatactttagccgatgctctggaaactaattccaaacgcactttcactcagattagaaaattgttaactctttctggtgcatctacatttaatttagaggatgtaaaaagaaccgaacttaaaggtaatgccactagttccatactctcaaaaaaggagtcctttggtgatcgatggttcgaatttactcaagaaaaacaagatcaaattgtgtctcagcttgtatcggaggaaaacgaggcaaaactaatcaactggttgatgaaagaaaccaaagttaatgaaaatactgcagaaaagattgcaaaacaaggacttcctgaaggctatggtagcttatgccttaaggctttagaccgaatattgcctgtactccagaaagaagtcatcacctatgataaagccgtgatagctgctggatttgatcaccacagtaatatcagccatgcatctacaggagaaatactaccggaactcccctactatggagaatatcttcagcgccatgttggatttggcactgggaatccggatgatgttcctgaaaaacgatttgggaaaattgctaatccgactgtacacattggtctgaatcaagttagaactgtcgttaatgctttaattaaacgctatggacatccaagtgaagtcatagtggaactggcgagagatttgaagcaaagccaagatcagaagaaggaggagaatcaaaggcaaggagaaaataaaaaaaggaacgaccgaatacgtaaaacaatatcagaagtattaaaaatagatgaagagcaagttagagtcgctgacactcaaaaagtaattctctgggaagaactaagcaatgatgtttcaatgcgtatatgcccctatagtggaaagcagatcagcattagtatgctcttatcggatcaagtagagatcgagcacattcttcctttctcaagaacgttagacgacagtctaaataataaaaccgtcgcaacccgtcaagcgaatcggatcaaaggtaatcgcactccctgggaagctgttgctgatttcaatgcacagggttggcccgttgaagggatgctcgatagagcagagttaatgcccaggaataagcgttatcgctttggtccagacgggtactcaaaatggttaaaggaagacaagtcatttttagcgagagcattgaatgacacaaggcatttgagccgtgttgccaaagagtatctaagtctgatttgcccccaaaatacaagagcgatacctgggcaaatgaccgcgatgttaagggcaaaattcggactaaacgatattttaggtcttaatggcgagaagaacagaaacgatcatcggcatcacgcagtagatgcatgtgttatcgcagtaactgatcaaggaatgcttcagcgttttgctaaagctagtgaaagtactcgtgagcgacaattaaatagacttgttgaaaccatgcctttgccatgggagacttatagagaaagtgtttcaagagcagttaataatatctgggtaagccacaagccagatcatggacacgaaggagctatgcacaacgatactgcatatagcttacttaccgatggtaaagtcggagttcataagatggtagatggtgttcggactttctttgagtctgcattaaaagttattccaatcacagaccctaaagctacgaacaggcacggaacactaccaaacggtgaaccaaaaccctacaaaggatacaaaggggatagcaactattgcatagagataataataaatgaaaaaggcaaatgggaaggagaagtcatatctacttttgaagcttaccaaatagttaaaaattacggactgaaggctttgagtaatccaaccctaggaataagtggaaaacctttagtaatgcggcttatgacaaatgattgcttaaaaattaaaataggaatcgaacaaaaaattgttcgtgttacaaagattagtagtaatggtcaaatctttttagctccattaaacgaagcgaatgtagactccagaaacagagacaaacttgatccattttcatacatctcaaaaatgcctggttctttgaaaacatgcaacgctattaaagtttcaatttcgcccattggaatattgaatcattaaacccaaaggggtaaatatttatgttgggacgcacaattgaaattgcagatgacaaacgacatttatttaaattccgtggttcgatggtcattcaaagcactggggttgatggtaaagagttaagtcgaataccattagaagatatttcctctgttattgcaaatgcacatggcataagttacacgaataatttattagttgcactagcagaacaaggtgcaccctttgtgctttgctcctcaaaccataatgcagttggtatgctgttgcctattgaaggaaattttgaacaggctcaccggatggacgctcaaatttcggccaagttgccacttaaaaaaagactttgggctgatttagttaaattaaagctagaacaacaggcttgtgttcttaaggaggttaataagccaactgcaccactgcaccgccttgccatgaaagtaaaaagtggagatccacaaaattttgaggcgcaaggggcaaggatttactggaagttcttatttggagagaaatttataagggatcggcaagcagatggtgttaactctttgctcaattacggatacacaattcttcgagcatgtaccgccagggcagtaatagccgcaggacttcatcctagtcttggtttacatcatagtaacgacaataactcaatgaggctagttgatgatttaatggagccatttcgaccgattattgatttagttgtttggaaattgaataatgctggaattgaaagcgttacccctgaatcaaagcgggagttagcattaagtttatatcacgacctcaatactcgttcgggacgtgtgccagttaccatagctattcaagacttggctacttctttggctttggtgtttttaaaagagcgcgaaaatatcaacctccctttcccttctattccattgattaagcaaactagcagcgaacaggagtgactttatacaatgctttcgggatacagactaatgtgggttttagttatgttcgatttacccgttactttaaaggccgagcgaagggctgctactgaatttcggaataatttattggaccttggtttccaaatgagtcaattcagcgtatacatgcggttttgtactagtactgcacaagtctctacattttgcagaaaagtggagttaagcttacccaaaggcggtaatgtaaacatcctgcagttcactgacaaacaatatgaaaaaatcatatcttatacaggaaaacgcaaattggcatcaaaaaaatcccccgaacaatatgaattattttgaaaatagctgatttttttcaacacaataaagcaaaaaaccctaagaaaatcagagggttattgctgttggagtttactcgattgggatatgagtactgaccggaactcaggagaagcgccagtcatcgatatggttagtttactcgattgggatatgagtactgaccggaacctgatcccgcaatcgtgtatgagattcagtagtttactcgattgggatatgagtactgaccggaacagccagctttacaacatgaaccttgtgttcagtttactcgattgggatatgagtactgaccggaacagactacgatctattgtttgctgagcaccaagtttactcgattgggatatgagtactgaccggaacccaaactgttgatggttgttgatgattcttagtttactcgattgggatatgagtactgaccggaacttgtttgtattgtcgtatgccatttcaatcagtttactcgattgggatatgagtactgaccggaacatccggtgatgtaatgtttgataacgaggaagtttactcgattgggatatgagtactgaccggaacattcctgtaaattatttgttttccaaagatagtttactcgattgggatatgagtactgaccggaacatctctgttaattgactcataggggttcacagtttactcgattgggatatgagtactgaccggaacgatcttgaattatgcccatttagcgttatagtttactcgattgggatatgagtactgaccggaacaatttccagtacataatgaccgtctctaatagtttactcgattgggatatgagtactggcagaaacaggattacgcagcttacttaaatcaaatgtaatacatgtcgaaaaaaatcaggtgcaataagatgcccatcccccgttaattggaaagag

SEQ ID NO: 1889 - DNA, 5757 bp, synthetic construct
  source 1..5757: mol_type = other DNA
  misc_feature 1..5757: note = Synthetic
ggttttggcgctcagcggcgcgcagcatgtcgaggaaggtcatggggggattttagttatcagggccaccccgcccaaaaagacgaaaggccgcatgtagcggcctttccatttggtgcatctttctgcttgttagcgtccagagcgcatttcccaatcgaatacgcagaataaatatagcacaatgtactcaaattatttgtatttgagttttaaagggtgatcatgggaacaatgcgctaccgccttgcactggatcttggctctacatcgcttgggtgggccatggtccggctgaacgcccaggacgacccctgtgccgtcatcaaggccggggtgaggatattcagcgatgggcgcagccctaaggatggctcttctctggcggtcagccgtcgcgaagctcgcgccatgcgacgacgccgcgaccgcctgctcaagcgcaaggcccgcatgatgaaaacgcttttggcgcacggctttttcccgcaagacgtgctcgcacgcaaagccttggaacggttggagcctctggcgctgcgtgccaaaggtctgaatcaggccctgcagcccgccgaatttgcccgcgccctgttccacatcaaccagcgccggggcttcaaaagcaaccgcaaaaccgacaagaaggaaaacgacagcagcgcacttaaaaaggccattgggcaattgcgtgaagccatgcaggccaccggctgccgcaccgtgggcgagtggctgtttgcccgccaccaaaagggcctgcccatccgggcgcgttatcgcgaaaaccgcatcacccgagacgatggaaaaaccaaggttgaaaagagctacgacctctacatcgaccgcgccatgatcgaagccgagtttgatgccctgtggaccaagcaggctgaactcaaccccatgcaattccacgaaacagctcgcgccgaactcaaggactgtttgctgcaccagcgtccgctcaagccggtcaaaccgggccgctgcacgctcatgcccgaagaagaacgcgcgcctctggccttgcccagtcagcagcgttttcgcatctaccaggaagtcaacaacctgcgcctgatccgcgaaggcttgaccgaggagccactcaccacagcccagcgcgaccagatcatgcaggcgctggagacaaaacccaaagtcaccttcgcccagatgaagaaactgctgggcttttccggccagttcaacctcgaagacgacaaacgcaccgaactcaaaggcaacgccagcagcaccaccctgagcaagaaagagcactttggcgccacttgggcgggcatggatgcggcgcagcaagaccgcatcgtcatgcagctgctcatcgaagaaaacgaagccacgttgattcaatggttacaagacaacacgggcgtggacgagatcaccgccgagcgcatcgccaacgccgccttgcccgagggctacggcagcttgtcggccaaggcactcgacaaaatccttcccgcgttgcaacgcgaagtcatcacctatgacaaagccgtgatcgccgcagggtttgaccaccacagccacatcagccacgcggccacaggtgaaatcctgccgaccctgccctattacggcgagtacctgcagcgccatgtgggctttggcagtggcaaacccgaagacccgcccgaaaagcgcttcggcaagatcgccaaccccacggttcacatcggactcaaccaggtccgcacggtggtcaacgccctgattgcccgctacggccaccccagcgaggtgatcgtggaagtcgctcgcgatctcaagcaaagccaggaacaacgcaaggaagagcaaaaacgccaggccgacaaccagcgccgcaacgaacggatgcgcgagcaaatcgcgggtctgttaaacaccgccccagagcgggtcagaaccaccgatctgcacaaaatgatcttgtgggaagaactgaaccgcgacaacgctgccgaccgccgctgcccctacagcggcgtgcaaatcagtgcggccatgctgttttcagacgaagtggagatcgaacatatcttgccgttctcgcaaacactcgacgacagcctgaacaacaaaactgtggccatgcgccaggccaaccgcatcaagggcaaccgccccccctggcaagccaaagacgactttgcgtcgcagggctggactaccgccgacatgctcgcccgggccgagctgatgccccaaaaaaaacgctaccgctttggtgaaaacggatatgaccagtggctgcgcgaagacaagggatttttggccagggcactcaacgacacccgtcacctcagccgtgtggccaaggaatacctcagcctcatttgcccgcaagacacccgcgccattccggggcaaatgacggccatgctgcgcgccaaattgggcttgaacgacatcctgggcctgaacggagagaagaaccgtaacgaccaccgccaccacgcggtcgatgcctgcgtgatcgccgtaaccgaccaaggcatgctgaatcgctttgccagcgccagtgccagcgcacgcgagcggcaactgaacaaactggtggacaccatgcccctaccctgggacaactaccgtgagcatgtccagcgtgcgatcgacaacatctgggtcagccacaaacccgaccatgggcatgaaggcgccatgcacaacgacaccgcctatggtctgttgggaagtgaccgggtgcatgttcggaaagtgataggtggccagcgtgtgcgcgaagaaagcacgctcaaggtcattccattcgcaaacgtcaaagccagcgaccgccacggcctgctgcccgatggccagccgcgcccctacaagggctacaagggcgacagcaactattgcatcgagatcgtgcgcaacgacaaaggcaagtgggagggtgaagtgatctccactttcgaagcctaccagctggtgcgccagggcggcgtgaagcgcctgcgccacccatcgctcagttgcagcggcaagcccttggtcatgcgtttgatgattgatgactcggtattgatcagcattgatggggctaagcatgtacttcgattggcatacatggcatctgcaggaacaatggcttttgcaccctgccacgaggcgaatgtggataagcgcacacgcacgaaggaactggcatacatcttcaaaacggcaggctccctgcaaaagtccgagggacgcagagtgaccatttcccctatcggcgaagtgcgtgacctcggattccgtaggtaaaccaaatagtatctaaatggatacaatcaaactttaccacctgcagcaaaccccggtcttcggtcgctggctcaaagacctcaaggacctgcaggcaagggctgcgattgtgttgcgactcaagcagctgcaggcagggtatctgggggatgccaagagcgtgggcgatggcgtgtcagaaatgcgatggcacatgggccctggctaccgggtgtatttttgccgacgtggccagcaagtcattgtgctgctggcaggcggggacaaatcaacacaggtgcgagacattgcacgcgccaagcaattggccaaggagtacgtacatgggcaagacgacagcatttgatgcagcagactacctcgacagcgaagaaatgattgccgaatacctgaaccaggcactggccagtggtgacaccgacttattgctcgcagcgattggcgatgtggccaaagcccgtggcatggcccaggttgcacgtgactcgggactggggcgtgaaagcctctacaaagccctgaccgcaggggccaaacccaggttcgacaccgttttcaaagtgcttcaggccctgggggtgcgcatgcaggcccaacccctggcccactgaccaggtctgcacatgctcggccgcattgtcgaagtcgccaacgacaagcgccatctgtcgatgtaccgtggcttcatgctggtgcacagtaccggcgaagacagacaagaagtgggccgcgttgcactagacgacatgagtgccctgattgccaatgcccacggcctgagctacaccaacaacctgctcgtgtcgctggccgagcgcggcgtgcccatggtgctgtgcgcagccaaccacaatgtggtgggcatgctctggccgctggatggtcatcaccagcaagcccaccgcatcgaagcacagatcgcctgcaaccagcccacccgcaaacgcctgtgggcggccatcgtcaaatccaaattgctcaaccaggccgaagtgctggccgccaccggtgccacggccgcaccactgcgcatgctggcacggcaagtcaaaagcggtgacccggacaacgccgaagcccagggtgcccgcaaatactggggcttgctcatgggcccgttgtttcgccgcgaccagcaggcggatggcctcaacgccatgctcaactacggctacaccgtcttgcgcgcagccactgcacgggctgtggtggctgccggtctgcaccccagcctgggcctgcaccacagccacgacaacaatgccatgagactggtggacgacatgatggagccctttcgacccgtcatcgactggaccgtgtggcaactgcaaaaccaagggccttgcgtggtcaatgccgacaccaaacgtactttggtgcaaagtctctaccaggacttgaagggtgatgcgggcaccacccccgtgttggtggcggtgcaaaaactggccacgtcgttggcacaggtcatggtgggtgagcgcgacaaactggacctgccgcaacccggtgtgccccagcgtcacacagaacccgatgacgaatgagtcgcagggtcaaaacctcactcagtggctaccgaatcatgtggatgctggtgatgtttgatttgcctgtggtcacagcccccgaaaggctggcggccaaccagttcaggcacagcctactggacatgggttttttgcgctgccagctcagcgtgtacatgcgcttttgcaccagtgcggcgcaggtacacacttattgccagagggtggaggcggcattgcccaatggcgggcaggtcaacatcatgcagctgaccgacaaacagtacgaacgggtgatcagttttcagggccgcaaggcgcagccgccgaaaaaaacacctgatcagttcgatctttttggctgagggcgcgaattttgaagagactcaaaacacggaaaccttatgcaaaacaagaggttaacgcgtttcaagtctagtcgattgggaaatgcgctctgaccggaacgacctgctcatggggcctaacggaactccaagtctagtcgattgggaaatgcgctctgaccggaactcaaccaggccacactgcaccgctacatggagtctagtcgattgggaaatgcgctctgaccggaactggggccagtggcttcgcgcaccagggtgaagtctagtcgattgggaaatgcgctctgaccggaacccacatccgactcataccttgtgccgagtaagtctagtcgattgggaaatgcgctctgaccggaacttcgtgctgggcgcatacgtgctgggcgctagtctagtcgattgggaaatgcgctctgaccggaatttcggcaatcccatgtgcccacatctctgccagacaggttgtgtgcatgatgcagtcagacatggcaacagcccctaagattcccccatgcacaaactctcctctcgccaatggatcgtcctggtcctgctgaccatcgtctggggcatcaactggccga

SEQ ID NO: 1890 - DNA, 5644 bp, synthetic construct
  misc_feature 1..5644: note = Synthetic
  source 1..5644: mol_type = other DNA
acaaaacggagctggcgctgttcaaggcgcagaacatcgacatcacgaacttcgagaacgagctcgaggggttcaagaccgcgtttgcgaagaactacgaccttgcctccaggcggttccagacggcgatcgaggagatcgacaagtcgatcgaccaccttcagaaaacgaaggaggccttgcttggcaccgacagaaaccttcgtctcgcgaacgacaaggcgcaggatgtgacgatcaagaagctgactcggggtaatccgacgatggctgccaagttttccgagctaaagagttaaagtccatcgggcgccggatctggaggagagcgttggcaggccaagcaatgcgtccagtaaattgggggaagctcaatctggcctgaacaggcgatagaacgaggcttgtccgttcctcgcgtttcgacctacctggccgccgcccttggcacgcccccgcttcaagcggccgtcaatctttactcatggaatgctcaggtctcagccgccttgctgaaccctttgcactgctgcgaggttgtagtgcgaaatgcagtgtcagaagcgctcgagatggtctacggtgccaactggccatgggacaacacattcttcctgagtctggcgaaccctggttggcccgcattcaatccgcgaaaggagctcgatcgtgttcgcggcatgcacacgaccacagggaaggtcgtagccgaactgaagttcgccttctggcaaagcatgttcaccggccgatttgatggtcgtatctggattccacacatccgaaacgtcctgccgaaccacaacccgtgctgtctgtacaggtcgtacgcaaggccattcacgacgatctagagagactgcgcaagctgcgaaatcgtatagcacaccatgagcccatctttaccagggctctcaccatcgatctacaaacgatcgaagggttggtgcggcgtcgctgccctgtgacggccgcctggatgctttccaatcagactgcctctcaactgatcgcgtccaagccaccttgatcggtacgacgcgccgttttaaacatgcttcccggacgaacaaccaatggccaccgcacccattcagtttgatctgctatccaacgctatggactctgtctcctatgccgttgagcttctcgcatggccggacattcaaaacgacgagcgtcgaatgaaacaagcaatcctgagcatctcccagggcgttgaattgctgctcaaggagcggctgcggcgagtccaccctgctttcatgtttgaggacgtcgacaagtatccgagccttgatgccagaaccattggggcggaacgcgcgctggccaggctcaaaagtgttgccaacattcaagtccgagattccgacaagcaacttgtgcgtgatctcaagcgaacgagaaatgcgatcgaacacgctgagtggcacaccactctggcagaagcgaaggccatcgttggacccgcactcagctttgcaatcgacttcgccaaaacgcatctcgaccgggatctgtcttacgaattccgtcgcgacagcacatgggaccagctgctggccgaattgcatgaattctcgtccgcacatgcacgccgcctggcagcgaatgccggaatagaccaggtgagcttgatgacctgcgaccactgtcaccacgaaacacttgatcgtcttgaacaaagctgtcgcttgtgtggccactggaacagtgacgaagaaccagggaacttcagtttcgatgccgagggtccatgacaggtagggaacgcttcagacgtctggattcggtgtgaacatggctgagcccgcccgagcttgcagcttcacggcaccgcttcgcatcaatggtctctgcgcggccgcggaggtggttgatgcgtgctgctgtgcgctgaaaagacgaagggccgcatgtagcggcccttccatttggtgcatctttctgcttgttagcgtccagagcgcatatcccaatcgtttagtttccagagattaacacatcgtgatacaagtcgcgctctgatttgaaagggaagaataaatgacaaaaatgcgataccgccttgctcttgacttgggcagcacatccttgggttgggccatggttcgacttaccaacgcgagccagccaacccctgtcgccctgatcaaggcaggtgtacgcatcttcagtgacggccgaaacccaaaggatggatcttcacttgcagtcagtcgaagagaggcccgagccatgcggcgccggcgggaccgccagctgaagcgcaaggcgcgcatgatgcgcacacttgttgcccatggattttttcctggcgacgacgccgctcgtaaagccctgcaactcatcaacccctatgagctgcgtgccaagggcttagaccaagccctgaagcccgaggaatttgggcgcgcgctgtttcacatcaaccaacggcgcggcttcaaaagtaaccgaaagaccgataaaaaagacaacgacgcgggcgctctgaaaatcgcaatcagcaagttgcgccaaagcttggtggacgagcactgccgcactgtaggagagtggctacagaagcgcgatgccactgggcaaacggtacgcgcccgctaccgccagcagcgggtggagagaaccgatgggaaaacgagcatcctcaaaagctacgatctatacatcgaccgcgcaatgatcgaggccgaattcgatgccctatggcgcaagcaggccgagttgaatccggtgctattccatgacacagcacgcgatgagttgaaagattgccttcttcaccagcgcgctttgaaacccgtcaagccaggtcgctgcaccttgctccctgatgaggtacgcgcgcccctggcactacccagccagcagcggtttcgtatttaccaagaagccaacaacctgcgtgtgttgcgcgagggcatgaaagaggaacctttgacgctggcgcagcgtgaccaactcgcagcagcgttggagcgcaatccaaaacgcagcttcatccagatcaagaaactactgggcttgggtggcgaggtgcagttcaacttcgaagaccccaagcgccaggaactcaaaggtaacgctaccagcgccaccctgagcaagaacgagcatttcggcgcatcgtggtttgacttctccgaagaccaccaagacgctatcgtgatgcagctggtgagcgaagaaaacgaggccaaactgatcgtctggttgcaagcggaaaccggcgtcgacgaagcgcgtgccgaggccatagccaacgctgctctccccgaaggctacggcagccttagcgcaaaagccctcatccgtatcctgcccccgttgcgcggagcggttcagacctacgacaaagcggtccaagctgcgggcttcgagcaccacagccggctaaacaccttttctgaagtgcctgggctcacgtttgacacaggcatcgagcgtatcgacccgcagactggggaggtgcagcggatacacgccttcaacgctctaccctactacggggaacgcctcacgcgccacgtgagctttggcactggtgccatcaccgatccgcccgagaaacgcttcggcaagatcgcgaatcccacggtgcacatcgggttgaaccaagtgcgtgtggtggtgaacgcgatcctcaagcgatacgggcatccggcagaagtgatcgtggaagtggcccgcgacctgaaacaaagccaggaacagcgcaaggaagacaacgagcgccaggccaagaaccagctgcgcaacgaacgcttgcgcgccgacgctgcgggaattttgaagatcgctcccgagcgagtacgccacgccgacattcaaaaactcatcttgtgggaagaactcagcttcgaccccgccgatcggcgatgcccctacagcggagctcaactgagcgcggccatggtgcttagcgaccaggttgaaatcgaacatatcctgccgttttcccaaacgctcgacgacggcctgaacaacaaaaccgtggccacacgccaggccaaccgcgtcaagggcaaccgcacgccctgggcggcgcgcgacgacttcgctgtgcagggttgggattacatcgggatcctccaccgggcggaacaaatgccgcgcttcaagcgctatcggttcggggaagacggctacgagaagtggttgaaagatgacaaaggctttttggcccgagccctgaacgacacccgctacctaagccgcgtagcccgcgaatacctcagcctgatctgcccgcaagacactcgggtgatccccgggcagatgactgcaatgttgcgcgccaagttcggcctaaacgacatcctcggactcgacggcgaaaaaaaccgcaacgaccatcgtcatcacgccgttgatgcctgcgtgattgctgtgacagatcagggcatgctgcagcgttttgctcaagccagcgccagcgcacgcgagaagcagctcaaccgcctggtggaggacatgcccctgccttggccaacctaccgtgagcatgtggcccgagcggtacacaacatatgggtcagccacaagccggatcatgggcatgaaggcgccatgcacaacgacacggcgtacgccttgttgggcggcgggatggtcagcgtacgcaagacggtagacggcgtaaggcagaaagaagtgggcgcgctcaaggtcatcgaattcagcgattccagtgccctgcaacgccatggccaattgcccaacggtgagccccggccctacaaaggctacaagggcgacagcaattactgcatcgagatagtgcgtaatgaaaagggaaagtgggaaggggaagtgatttcgacatttgaggcgtaccagctcgtacgagaacatggcgctgagcggttgcggcacccaagcttaagtttgagcgggaagcccttggtaatgcgactggtcaaagatgacaccatcagacttactcacgcagatgcgaggcgccttgtccgtttggcacatgcgaatgcagcgggaataatggccttcgcagaactccatgaggccaacgttgacaagagaaaccgctcaaagcaactctcttacatattcaagaccgctggctcactgcaaaaatcaagtgcccggcccgtacctgtatccccgctcggcgagctccgcgaccctggcttcaaggagtgagctgaaccaggttaacgtgttgcagttcactgataaacaatacgaacccatcctgagctttcgcggaaggaccaagaggcccgcgaacaaaacgcatggctagttcgcccgtttctttttttatagcgtgctctcgtccggtgaaagaatagtgatcgaggcggatcactcatctctcatagagagatgacagagacagcaagcaactttcgtgcacgctctagtgaaagaaagttgaagtttgccgagaacgatccgtttttccgcgtcttctttaaaaggcactatttccgacgaacggaaagctgccttaagtgctcaataaaatcaatggaatcaatgtcttagattaggtaagcatcaactttctttcattatgtgtgaaagaaagttgactccgtcgctgagtggagtagcctgctgggcgtgtggaaggaagagacatgcctcagctctactgcgctccattgagcccacc

SEQ ID NO: 1891 - DNA, 5028 bp, synthetic construct
  source 1..5028: mol_type = other DNA
  misc_feature 1..5028: note = Synthetic
atagaacgggctatgcgagacttcgttttcatggcggctctctttctgtgaggctcacgcctcgggcttagtcaccactcgtgtatcacgagcagcgaggagccgccgctttcaattttcaacagctactgggacatctccaaaaacagcgagggccgcatatagcggccccccatttgttgcatctttcagcttgttagcgtctagagcgcatatcccaaacaactagagcttcattatgacgaaattacagcaaactggcaagaccccggcggcagcgggactcccgtccatgcgctatcgtctcgcgctcgacctcggagccaagtccctcgggtgggccatgattcggctcgatgcggacggccaaccgtgcgccattatccgcgccggggtgcgcatcttttctgacgggcgccgtccgaaagatggcacgtcgctcgccgagcagcgacgtctcgctcgcgccatgcggcgccggcgagaccggctcctccggcggaaagcccgcgtgcgacggctcctcgttgagcatgggtttttcccgaaagacccagcggagcagcggctccttgagcggctcaacccctacgagcttcgagcccgtggtctcgacgaggtgctcacggggccagaatttgcccgcgccctctttcatctcaatcagcggcgtggcttcaagagtaaccggcgcaccgatcgcgccacggaagacaaacagatgggccccctaaaagccgcgatcgcggacgtgaggagcgccatcgacgcggccggtgatggcggtcgcgcacgcaccgtcggcgagtggctgtggagacgtatgcgcgaggggctgccagtccgtgcccgatttcgcgagctgcgagtacaacaggcagataaccgaacgagaaagacgacccagtacgacctgtctatcgatcgggcgatggtggaagcggagtttgaccaactgtggcatgcgcaagcgcgcatggagccggcgctgtgttcagaggcggcgcgaacagcgattaaggacgcgttgctctatcaacggaaactacaccccgtcactccggggcgctgtacgttcctgcctgaagaggctcgggctgccctcgccctcccatcaacgcaacgatttcgcttgtatcaagaggtcaacaatcttcgcgtcttggatgcagacttacatgaacgctcactgacgattgacgagcgtgaccgggtcatcgaagccctcgagacccacattaagcgaacgttcacggcactaaagaaactgctgcggctgcccgccagcagccaattcaatctcgaagacgtcaagcgcgtagaactgagaggcaacatcacgagtgccttgctgtcgaagccggacctctttggtgaccagtggttccactatccaccggacgaccaagaccgcatcgtcgagcacctgctgactgaggagagcgaaactgtgcttatcgactggttaatcacgcacaccggtgtggacgcacagagggccaaggccgtggcggcggtcaccctaccggccggctatggccatctgtcggtggcggcgattcgccgaatactgcccttcctgcggcacagcgtgaccagctttgctgccgcagcgcgtgaggcgggcttccatcacagcgtgctgtccgagaacgaggcggtcgacgggcggacggtgcccatagagctcatcaacaccacgacgggtgaggtgcggacgtggcacgtgtgtcgccagctgccctactacggagaggtgctgggcaggcatgtggcgttcggcagcggaaagccggaggacccagcagaaatccgatacgggcgcatcgcgaaccccacggtgcatatcggactacatcaagtgcaagtcgtcgtgaatgcgctgctgaaacgctacgggcatccgcgggaggtagtcgtggaagtcgctcgagagctgaagcaaagttgggagcagcgccgggaggaccagcagcgacaggccgacgctcagaagaggaatgaccgactgcgtgccgacgtggcatcagtcttcggcttaccgcatcgcgtcacgtccgctgacatccagaaactcatcctgtgggaggaattgagtggcgatgtgctcgatcgccgatgcccctatagtggcgagcggctcagtatggcgatggtgctctccgaccaagtcgaagtagaccatattctgccgttctcacggacgctggacgacagccttaacaacaagaccctcgccattcgcggggccaatcgtctcaaaggcaatcgaacgccatgggaggcccgccacgacttcgaggcacagggctggagcgatgaggggatggcgctgcgagctgggcgtatgcccaagcagaaacgatatcgcttcgccgaaaacggctatcaacgctggctacaagaagacaaagacttcttggcgcgcgcattgaacgacacgcgctacctcagtcgagtggcgcttgaatatgtgcggctcacctgcccgcaagacacgcgtgtgatcccggggcgcatgaccgcgatgctgcgggcacgatttggcctaaacagcgtgctgggcgtgaccggagacaagaaccgggacgaccaccggcaccacgcggtcgatgcctgtgtcatcggggtgacggaccacgccttgctcaagcgatttgcggacgcgagcgcaagtgccaaagagcaccgcctcgaccgacttgttgagagcatgccactgccgtggccaagctaccgtgcacatgtggagcgggccgtgacgcatctctgggtcagccatcgtcccgaccacagttatcaaggcgctatgcataacgatacggcctacagtcttcgggctgaggggcgtgtcgcctggcatgcctacgtcgatggccgccgggagcgttatgaggatcggctgacggtcattcccatcacgcatgcggtgcaccacgcccgccacggcacgctgcctgatgggacgcctcgtccctacaagggctacaagggcgacagtaactattgcatggagatcgtccggggacccaagggcaggtggcttgggcgactggtgacgacgttcgaggcgtatcaggccgtgcgcaggtcgcatggagacgcggcagtactacggcatccgacgcggagcctcactggcgagtcgctcgtgatgcgcctgatgaagaacgacatggtgcgattggaattagatggcgaaactcacacgatgcgcgtcgtggcgattggagccaacatcatattggccgaactacacgaggcaaatgcagatgcccggaatcgggacaaggaccacgcgttccggtatacctacaagaccgccgatacgctccgacaagcacgcgggagacgcgtgacggtgtctccaattggtgacctcactgaatctggattcaggaccgactgatggtggggcgcattgtggaagtagccgatgaccatcgcgagctgtgcgtcaaccatggtcatctcgtgattatggattcgacaccgccacgatctcgactgggcaccatacccctcgacgacatcctcgcggtgattagtcacgcacgcgacgtcaccatgagcagcgaggtctgtgtcgcgctggcggctcgcgctattccattagtggtctgtgattctacttttatgcccgtcgcgatgttgctgggcctgcagacgcaccacgtgcaggccagccggatcgaggcacaagcctctgccacgcgaccgacgcgcaagcggttgtgggcacgtgtggtgcgcgcaaaactcagtcagcaagctgcagtcttggaggcgattggagccagcgcgtcggtggtcaagagactcgcgggaagtgtcagaagtggggaccccaacaatcttgagggacaggctgccagacgatattggccactcctcttcggtccccagttcaggcgccgtcgcgacgaaggcggcattaacgccttcctgaattacggctatgccgtggctcgtgcgggaatggcgcgcgccgtcgtcggggctggattacatcccagtctgggcctgcatcacagccacgacgagaatcccatgcggctcgtggacgatctggtggagccttttcgtccgctcatcgactttgccgtatgggaattagtgcggcgaggcgagtctgcgctcacgtcggccaataagcgggtccttgtgcgggcttgctatcaagacgtcgccacggatgcaggtgagaccccagtattcgtggcgatgcaacgcctcgcaatttcggtagcgcaggtacttaccggaacgcgtgacgcgcttgatctccctgtgccccgtatcccattcggctcttccctgtcccgtgcctagccgccgagaggtgttatcgggctatcgaatgatgtggttactggtaatgttcgacttgcccgtactcacgaagcgggagcggaaggccgccacggactttcgccacacgctcctcgacttaggcttcgaaatgtcgcagctcagtgtgtatctgcggttttgcagcagccagtcgtacgtcgagacgctatgcggacaagtggaacgggccttgcccgtgagtggcaaagtgcatctcgtgccgctgaccgacaagcaatacgaacgcaccattaccttcgacgggcgcatgcctaaagctcgaagaaaaacaccggatcagcttgagttgttttgaaaggccgctcgtgttttcgatagaaaaaatgccgtaagctgttttatttcaacaacttacggcgtctacattctagcagcttgggatatgcgctctagccggaactcacccgggcgttagcgctgctcataaataattctagcagcttgggatatgtgagcttgatccgattccgtggacactttccgaagggtgcgccggaaaatgttggaagagttctaccaattgcgaatggcgcccctagggtgctagggtgggggtggggcattccctcaatttgaatgtgcccctttctgtgccccctggggcacacatggtccctcttgccgtcggcgttttctccttagtctttcatcttg

SEQ ID NO: 1892 - DNA, 4751 bp, synthetic construct
  source 1..4751: mol_type = other DNA
  misc_feature 1..4751: note = Synthetic
ttaccgcactatcgacacagggatagggatggctggctgcacaaccgtcctgacacccacaaataatcgtatatatttcaaggaaatttagcatatttcgcttcaactttttggcctaccgaaaagcagaaaggccgcatatagcggccttacattttgtgctctaacagcttgttagcggctggaacacatatcccaatgatgtgtacgaagaaatattataggctatggggaaaatctgtcaaaggagaaacaaacatgctgcccgcgatgcgttatcgactcggcctagacctcggttcttcttccatcggctggagcatggttcgcttggaccaaaacagccaaccctgcgccatcatccgtatgggggtacggatcttccccagtggccgcaatcctaaagacggcagctcgctagcggtcacgcgccgggtggcgcgccaggcccgtcgtcggcgtgaccgcctgattaaacgcaaagcccaactaatggccacattggtcaggctgggtttctttcccgatgatgccggagagcgcaaggctctggcgcagctcgatccatacgaacttcggcgcaaggggttgtacgagccactggcgcccgccgagtttgcccgcgccctgttccacatcaaccagcgccgcggcttcaagagcaatcgcaagaccgacgccaaagacaaggaaggcggcctgatgaaaaaggccatcaacgaactacgggagcacctcaaacaggaagactgcaagaccgtgggcgaatggctggcccggcggcacgaacagggcctgagtgtgcgggcacgcctgcggggtcgtaccgccaaagacaaggcctatgacttctacatcgatcgttctctgatcgaacaggagttcgatatcctttgggaaacccaacagcaattcaatcctgatgttttcaccgaccaggcaagggatgaactacgggacatccttctctttcaacgccccctcaagccggtcaaaccgggtcgctgcaccttgatcccagaggacgaacgcgctccgctggccctgcccagcagccagcgatttcgcatataccaggaactgaataatcttcgcctgaacaatccggacatgtccgagcgccctctgacactggaagaacgcgacctgctcgctgacaagctggaaaaaggaaacctcacctttaaaacaatccgccgtaccctcaaactcgattccgccaccgatttcaacctggaagacgaaaaacgcgatcgcctcaagggcaatgccaccagcctggtactgcgaaaagccgcctgctttggtaaagcatgggatgagttcgacctggcatggcaggatgccatcgtcgaacaactgctcaacgaaccgagcgaatcggtactcatacactggctaacagaaaatgctgaaattaattcagagcaagcagagaccctggccaatatcagcctgcccgaaggttatggcatgttgggccggcaggctctggtgcgcatcttgccggaactgggcaaggctgtggtcagctacgacaaggctgtcatcaacgccggcttcgacagccacagcgccctgtccaattttcagcagacgggagagatcatggacgcgctaccctattatggtgaaccactccagcgccatgtcggctttggtaccggcgaacccgatgacccaccggaaaaacgctttggcagaatcgccaaccccaccgtccatatcgggctcaacgaactgcgcaaggtggtcaacgggctgattgcaaaatacggccaccccagcgaaatcatcgtcgaagtggcacgagaactgaaactgagccgcaagcgaaaacaggaaatcgaacgtgaccaggctgcccggcaaaaaagaaacaagacactggtggaagaggctagcaagattctcggctacgccccggaacatatagacggcgccaagcggcgtgaattatcacaaaaaatgcaactctggaccgaactcaacccgaaagacgtagttgagcgacgctgcccctataccggcgagcagatcagcattgaacggctgctgtcgcccgaggtagagatcgaacacatcctgcccttctccatgacactggacgatagcctcaacaacaaaacggtgtgcctgcgccgcgccaaccgggaaaaaggcaaccgcacccccttcgaggcctttggtaaacaacccattgagggctatgactacgacggcatgttgcaacgcgcccggctcatgccccgcgccaaggcatggcgtttcggcccggatgccatgcagcgctggctgcgggatgaaccggattttctcgcccgcgccctcaacgatacggcatacctctcccgtattgctcgcgagtatcttaccctcgtctgcccacaagtgcgcgttattcccggccgtatgacggccatgctacgcggcaagttcgggctttccaccctgctcggtggttcacccacaaaaaatcgcaatgaccaccgccaccatgccatcgatgccgctgtggttgcggttactgaccaggggctgttgcaacgctttgcaaatgccagcgccagtgcccgggagagacaactggaccgcttggtggaaaacatgccgctgccttggccgacttaccgcgaacaagtacaacgggccgtggacaccatccgcgtcagtcatcgtcccgaccatggctatcagggcgcactgcatgaagcccatgcctgggggctgcgaaaggatggcaatgcggtacggcatgaaacgcccgaaggcggcggtgttcgtgaaaccaagattaggtccgcagatgccctgattcccatcagtagcaccgccgaccctgatcgccatggaaaggacgcagatggcaatgtaaggccctacaaagcctatattggaggcagcaactactgcattgagatcgtcgccaacgaaaaaggaaagtggcagggtgaagttgttaccacctatgaggcctatcagatcattagaaaatatggcgaagaggaaggctggaagcgcctgcgtaatcctaggcaaagccagagtggcaaacccctggtcatgcggcttatgaaaaatgatcttgtaatgatgaagctatacggtgcccatacgttgatgcggctttgtaaagttggccagtccaaacagatgttttttgctccacataatgaagctaatgtagacgcacgtagccgggagaaatccttccagtacatatcaaaaatgcccggcagcctgcaaaagaccgatgccagatatgttaccgtttcccctatcggtgacatgaaggtttatcgttaggagcgcagggcatgctgggccgaatcgtcgagatcgccaacaacaaccggcacctgttcatttcacgcggcttcatggttattagggagacggatggtaacagaaataaactgggacaagtgccgctggatgacattgccgccgtggtggccaatgcccacggactgagctataccaacaacctgctcgttgcactggcagatcgcggtgttcccttcgtgctttgcggtgccaatcacaaccccgtgggaatgatctggcctgttgatggacactcatctcaagctggccgatttgatgcccagcttgatgcgaccaaacccctgcgcaaacgtctttggtcttccattgtcaaaagcaaactgaaccaacaggccgctgctctagaagcggccggagcacctgacatgcccctaaccgccctagttaccaaggtgcgctccggtgaccccgacaatatcgaggcgctgggagcacgacgctactggcaactgctttttggcgaagacttccggcgagaccagcagacaggtggactcaacggactgctcaactatgggtacaccgttctgcgtgcggcaacagcccgcgccatcatcgccgcggggctccaccccagcatcggcgtccatcatgccaacaagggtaacgccatgcgtctagccgatgatctcatggagccctaccgcccgtttattgatctgctcgcctggcaactcaggcgccaaggtctgatagaggtaaccccggaaaccaagcgtgtcatggtacgcggactctacgacgacctgataactgaatcaggcgttacccccatgcaggtatcagtgcaaaaactagctacgtcactggctcaggtgtaccttggtgaacgggagcagctagatctgccattgccgggcctgccccttaccatgacaacaaatctggacacagagtgatgtaatgctgtcgggataccgaatcatgtggattgccgtgatgttcgatctgcccgttgtaagccgagaagaacgcaaagccgccaccgcttttcggctgaccctgttagacatgggttttgaaatgtcgcagttttccgtctacatgcgtttttgctccagccaagctcaggtagaaacctattgcaaacgtatcgaattagccttgccagagaacggcaaggtcaatatccttaccctgacggacaaacaatatgaacgtatcatttcctaccagggtcgcaaccgccaagatgccaaaaaagcgcctgatcagtttgacctgttctgaatttcccgcaaaacctctttccaacaaaacgcaaaaccccatgacaaacatggggttgcgacacttggagtttacatcattgggatatgtgcaccagccggaactggttgattgattgttcctcgtccacggttagtttacatcattgggatatgtgcaccagccggaactgc

SEQ ID NO: 1893 - DNA, 4739 bp, synthetic construct
  source 1..4739: mol_type = other DNA
  misc_feature 1..4739: note = Synthetic
gtgggcgacctgttcggcgccggcaagatgttcctgccccaggtggtcaagagcgcgcgcgtgatgaagcaggccgtggcccaccttatcccctacatcgaagaggaaaagcgccagcaggaggccgcgggcctggacgtgacgagcaagggcaagatcgtcatcgccaccgtcaagggcgacgtgcatgacatcggcaagaacatcgtcaccgtcgtcctgcagtgcaacaacttcgaggtcatcaacatgggcgtgatggtgccctgttccgacatcctcgcgcgcgcgaaggccgagggggcggacatcgtcggcctgtcgggcctcatcaccccgagcctggaggagatgcagtacgtcgccggcgagatgcacaaggacgactatttccgcatcaagaagatcccgctgctcatcggcggcgccacctgctcgcgcgtgcacaccgccgtcaagatcgcgccgcagtacgaaggccccgtggtctacgtgcccgacgcctcgcgcagcgtgagcgtggcgcagagcctgctgggcgagggcaaggacgcctacctggccgaggtgcaggccgactacgaccacgtgcgcgagctgcacgccaaaaagaagaaggtgccgctgtggccccttgaaaaggcgcgcgccaatgccgcgcggctggactatgccccggtggtgccgcgcgcgctgggccgccgcgtgttccgcaacttcgacctggccgagatcgccaggtacctggactggggcccgttcttccagacctgggatctggcgtgggcgttcccggccatcctcgacgacgaggtcgtgggcgaggaggcgcgcaaggtctacgccgacggccaggccatgctcaagaagatcatcgagggccgctggctccaggccaacggcgtgatcggcctgttccccgccaacagagtgggcgacgacatcgagatctacaccgacgagacgcgcacccaggtcctcatgacctggtacggcctgcgccagcagaccgaaaaacaggtggacgccgaaggccggctgcgccccagccgcagcctggccgacttcgtcgcgcccaaggagtcgggcattgccgactacgccggcatgttcgccgtcacggcgggcctaggcgcggaaaagaaggaaaaagagttcctcgacgcgctcgacgactacagcaacatcctcttcaagggcctggccgaccgcctggccgaagccttcgccgagtgcctgcacgagcgcgtgcgcaaggacctatggggctatggcgcagacgagcgcctgagcaacgaagacctcatcaaggaaaaataccagggcatacgccccgcgcccggctacccggcctgcccggaccacacggccaagatcgccctgttcgacaccctgcaggcgcgcgagatcggcatggatctgacggagagcatggccatgttcccggcgtccagcgtcagcggcttctaccttgcgcacccgcaggccacctatttcgtggtcgggcagatcggcgacgaccaggtgcaggacatggccgcgcgccgcggcatggacgtcgaggaactgcgccgcaggctggcgccgaacctggggtgaaggctcaaggtagagacctccaaagacgaaagccccgcatgcggggctttccatttggtgcatccagctttttcaagcatctgcttgttagcggccagagcgcatatcccagtgaactgagtagctgcaatataccaagtctgttacaaaatgcaagcgtctttgatgtgggaggaaacgtatgtggaatttgcgctatcgcctggcgcttgatttgggatccacctcgttggggtgggcgctcttccggctggatgtatgcaataggccgatggcgatcatcaaggctggcgtgcgtatttttagcgatggccgcaaccccaagaagggcgcatcgcgggttgtggcccggggtgcggcccgtgccatgcggcgccggcgcgaccggctgctcaagcgcaaggcgcgcatgcagaccaagctggtggagcatggtttctttcctgctggcattgatgcgcgcaaggcgctggagcggctggacccctatgcgctacgcgccaaggggctgcgtgaagccctggcgcccggcgaattcgcgcgggcgctgttccacatcaaccagcgccggggcttcaaaagcaatcgcaagacagacaagaaggacaacgacagcggcgcactgaagaaagccatcacccagttgcgccaacagatggtggagcaaggcagccgcacggtgggcgaatacctgtgggcgcgtttgcagcggggccagggcgtgcgtgcccgctaccgcgaaaaacccttcaccacggacgaaggcaagaagcgcattgataaaagctacgacctgtacatcgaccgcgcgatgatcgagcaagagttcgatgcgctctgggccgcgcaggccacattcaatcccgcgttgttccatgaggcggcacgcgctgatttgaaagacacgctgttgcaccagcgccgcctgcgccccgtcaagcctggccgatgcactttgctgcccgaggaggagcgcgctccgctcgcattgcccagcacgcagcgctttcgcatctaccaagaggtgaatcacctgcggctgttggatgagagcctgtgcgagatggctttgacgctggagcagcgcgatgccgtggtggctgcgttggagagcaaggcaaaactgagtttcgagcagatccgcaagctgctcaagctctccggcagcgtgcagttcaacctggaagatgccaagcgcacggaactcaagggtaacgccacgagcgcggcattggcgcgcaaggagttgttcggtgccgcgtggagcggttttgacgcggcactgcaggacgagatcgtctggcaactggtgaccgaggagggggagggcgcgctgatcgcgtggctgcaggcacacaccggcgtggacgaagcccgtgcgcaggccattgccgaggtgagtctgcccgaaggctatggcagcctgagccgcaaggcgctcgcgcgcatcctgcctgcattgcgcgctgcggtcatcacctatgacaaggcggtgcaggctgcgggattcgaccaccatagccaactgggtttcgagtacgaccccggtgatgtggaagcccaggtgaactccgagacgggcgaaatccgccccgtgttcaagcagttgccttactacggcaaggcgctgcagcgccatgtggcctttggcagcggcaagcccgaggacccggatgagaagcgctacggcaagatcgccaaccccacggtgcacattggattgaaccaggtgcgcacggtggtcaatgcattgatccgccgctacgggcgccctgcgcaggtagtgatcgaattggcgcgggacttgaagcaaagccgcgagcagaggcaggaagcccagaggaagcaggccgacaaccagcggcgcaatgcgcgcatccgtcgttccattgccgaagtgctgggtatcagcgaagaacgggtgcgtgcgagcgacgtccagaaatggatctgctgggaagagctgagttttgacgtggccgatcggcgctgtccctacagcggcgtgcaaatcagtgccgccatgctgttgagcgatgcggtggaggtcgagcacatcctgcctttttcaaagaccctggacgacagcctgaacaaccgcaccgttgccatgcgccaagccaaccgcatcaagcgcaatcgcacgccgtgggatgcgcgcgccgacttcgaggcgcagggctggagctatgacggcatcctgcagcgcgccgagcgcatgcccctgcgcaagcgctaccgcttcgcgtccgacggctacgagcgctggctgggcgatgacaaggatttcctggctcgcgcattgaacgacacccgctacctctcgcgcgtggcggccgaatacctgcggctggtgtgtcctggcagcagcacgcgcgtgattccgggccagatgacggcgctgcttcgcgccaagtttggcctcaatgacgtactgggcctggatggagagaagaaccgcaacgatcaccggcaccatgccgtggatgcctgcgtgatcggcgtgacggaccaggggctgatgcagcgtttcgccactgcgagcgcccaggcccgggcgcctgatcgcctgatcgtcgcgatgcaatcccgcggggttccgtttcctgcgcccgatgctgaccgcatggcggaactcgtgcgatcgggcgactgggcgcgcctgaaagccgccgatgagggaacccggccatgagtatgcctgccgcgcgtgtcggcgatgcgcatgtctgcccgatgaccacgggcacggtgcctcatgtcggcgggccgatcatgccgatgtgcgccttcaatgtcctgacaggcaacctgccgcaagcgcgcatcagcgataaggccatgtgctccgggccgaccgacatgatcgcgctgggggccttcaccgtgctggtcaaggggatgccggcggcgcgcatgggcgacctcaccgcccacggcggggttatcgtgggcggaatgccgaccgttctgatcggcaacgccggtagtgccaacctcggtgccatcggccaatcgatggtcaccacgatcatcggcgacaaggtgaccgaagtggccaaggccaagatgaaagagacgctgatcgcggccgccaagcagggtctgccgttctgcgagccgtgccggggctaggcgat

SEQ ID NO: 1894 - DNA, 4695 bp, synthetic construct
  source 1..4695: mol_type = other DNA
  misc_feature 1..4695: note = Synthetic
attgtaagtataatctagttatggcgaaaaatcaagaccatcgatgctagttttttttctaaattaggcccaaaaagccagcacaggaaaaattcagacgcctgtttatgaaaatgtcagggagtttgggtcgctctccgaaaaccaagatgctttggatacgaaaaagggtcgcatatagcgaccccgcatcttgtgcatctctcagcttgttagtggagaaagcccatttcctaactgactgcgaaaattttatctagaggacgatgaaaatgcaagactctgtctcaaaaatgaaatacagactcggaatcgaccttggaaccacttccttgggttgggctatgttgcggcttgacgaacaaaacgaaccttacgccgtaattcgaaccggggttcgtatctttaataacggtcgagacccgaaaacggaagcctctttggccgtagcgcgccgtcttgcacgtcaacaaagaaggactcgtgacagaaaaatcaggcgtaaagaacgccttatcggggagctggtggacatggggttcttcccgaaagaacccattaaacggcgtcaactcgcctcattagatccttttgaacttcgaactgaagccttagatagggctctttctccagaagaatttgccagagcgattttccatttagccaaacgacgcggcttcaaaagcaatcggaaaacagattccggcgataccgaatcgagcaagatgaaagaggctatcaaacgcactttaaatgaactacaaaacaagggttttcggaccgtcggtgagtggctcaatatgcgccatcaacaacgcctcggcacgcgttcgcgcattaaaaaatgtccccaccggttccggtaagcaaaccaccgcatacgacttctacttaaatcgattcatgattgagtatgaatttgatcgtatttgggaaaagcagtcccaaatgaatcccggccttttcaccaatgaacgcaaggccatcttaaaagacattatcttttaccaaagaccccttcgtcctgtggaacccggacgttgcactttgatgccggacaatccacgagcaccgctggctcttcctcaacaacaagactttcgtatttatcaagaagttaacaacttgaggaaaattgacccgaccaccctgcttgaagttaccctcacactgcctgaaagagatcgaatcgtcgagttgcttcaacgaaaacctgctctgacctttgatgccgtcagaaaggcgctttgctttaacggaacatttaatttagaaggagaaaatcgttccgagttaaaaggcaatctcacaaactgtgcgctcgctaagaaaaaactatttggagaaagttggtattccttcgatgcccataaacgatttgaaatcgttgaacatcttttgcaagaggaatccgaagaaaaactcgtttcctggttgaaaagggaatgcaatctttctgaagagagtgcaaagaatacggcttccgtgcgacttcctgccggatacggagccttgtgtcgagaggctttagatttgatccttccatatctgaaagctgaagtcatcacatacgacaaagcagtccgaaaagccgggatgaaccacagcgaactgacattagcacaagaaaccggtgaaatccttccggaactcccttactacgggcagtatctcaaacgtcacgtgggtttcgggaccgggaaacccgaggattccgcagagaagcgttacggaaaaattcccaacccgacggtacacatcgccctcaatcaattgaggaccgttgtcaatgctttaatccgcagatatggaaaaccgacacagattgttatcgagcttgctcgagaactcaaacaaaacaaaaaggcaaaagatcaatatcgaatcgagatgaatcacaaccagattcggaataagaggattcgcactgatatttcgaaggttctcggaatcaatccggaaaatgtgaaacggaaagatattgaaaaacagattttatgggaggaacttaatctgaaggacgcaacggctcgttgttgtccttatagcggaaagcaaatcagcgcagaaatgctttttaccgatgaagttgaaatcgatcatattctcccgttttcaaggactttggacgattcaaagaataataaagtcgtttgtatccgagaagccaaccgcattaaagggaatcgaaccccctgggaagcacgaaaggatcttgagaaacgaggatggtcggtagaagcgatgacggcacgcgcccaagcaatgccgaaagccaagcgatttcgcttcgccgaggacggatataaagtttggttaaaagatttcgatggcttcgaggcacgcgcgttgacagacacacaatacatgagtcgagtcgctcgcgaatatcttcagttaatttgccctagtcaaacctggtcggttcccggacagctcaccggaatgttaagaagatttttaggtctaaatgacattttgggtgttaatggtgagaaaaatcgcgatgaccaccgccaccatgccgttgatgcctgcgtgattgccctcacggatcgttccatgttacaaaggatttcgacagcaagtgcgagggctgaaaataaacatcttactcgtctgttggaatctttcccggctccatgggctacgttcaatgagcatgttacccgcgccgtgaaatcgatttgtgtcagtcacaaaccggagcacgcctatcaaggggccatgaacgaacaaacagcctacggcttaagaccggacggatatgtcaaatacagacaaaacggaaaagtggaacataagaagttaaatgttatccctcaggtatcggtcaagggaacctggagacatggtcttaactctgacggatcattaaaagcgtacaagggactaaagggagggagcaatttttgtattgaaatcgtaatgggagagggcggtcactgggaaggcgacgttattacaacatacgaggcctaccaaatcgtacgggcgaaaggagaagctgcgctttatgggagtgtgagtcgctccggaaaaccgcttgtaatgcgcttgatgcaaaaggatatcgttgaaatgactcttgcggatggccgatgcaaaatgcttctttataaaatcggccaaaacaaacaaatgttcttttaccgtatcgaaaatgccggcggtgggaaagaagatgtttccaagagaccgggatccttacaaaaaacgcttgcgaaaaaaatcataatctccccgataggagatttccgtaaggaaagattatgattgggcggatagtcgaaatatcaaacaacaacagatatctttctgtgtatcgggggtttcttctcgtgaaatcacttggggaagaagcttccgaactcggaagaattccgctggacgacattctggccgtaatcacgaatgctcacggcttgtcgtactcaaacaatcttctcgtctctttacttgaaagggatattcctcttgttattacctcggacaaatacgttccgatgggcattctttggcctgttgaaagccatcaccttcaggctaaacgtatggatgctcaaataggggccagtcttcctctaaaaaaatcgctatgggctcaagttgttcgagaaaaaattcgtcaacaatctctgttgcttcatcatctgggattgcctttttctcgattagacagactggccaaagaagtaaaaagtggcgacccagacaacaaagaagcaattgcggcgcggatttattggacttcggttttcggtagcagtttcctacgaaacagagaggcccccggcattaatgctttactcaactacggctacacggttattcgatccgcgactgcacgcgccgtcatagccgctggcttacatccgagtttaggaatccaccataaaaatgcatctgacgctatgcgcctggtggatgatttgatggaacctttccgaccgttagtcgacttgatggtgtttagcctgacaagagagaacccgagtgccgaatggtctatatccactgaaataaaaagaaaactcgtcagcattttattttggaatgttctttttgaggaagatcagtgtcctgtgatggttgcgatgcaaagattggcactgtcgctttcgcaagtgtatttgaaagaaagagtccgtcttgcattcccgaagttgtttgaatacgggaaagacatggctaaagatgatttcgggatatagacttatgtgggcacttgttatgtttgaccttcctgtcattacaaaacaagaacgtcaggcagcaacagtgtttcggaagaggcttttggacatgggcttctttatgtgtcagtacagcgtctacattcgtttttgtaccagttctgcggacgttgcctcctatacaagaaaagttaagatgttccttcccgcctcaggtcatgtttccattcttgtaatcactgatgcgcaatacaagcgcattctaaacttcttttctaggaaaagagccactgcaaaaaacataccgaaccagttggaattgttctagtttaatcaagtttttaaagccgaaccaccccaaaatctctttcaaatcaagtcgttggagcagttcggattgtatcagttaggaaatgagcttaggccagaacaacaggctgaccttgcgcgagcgctcgacgattgtatcagttaggaaatgagcttaggccagaacttt

SEQ ID NO: 1895 - DNA, 4404 bp, synthetic construct
  misc_feature 1..4404: note = Synthetic
  source 1..4404: mol_type = other DNA
cagacggtggcacgccttcaagaacgccttcggctcgaacagcccgccatcgccaccgaggccctgctccagcaactggccgaacgccttcagcccgccgccagcgcctcggcggcccagccgctgcgctggatccgcgccgccgtcggcagctcggtgcgcctcatcccggtggacgacatcgactacttgaagtccgacgaaaaatacaccctcgtcgcctggcgcggcgacgccggccgccccgccgaggccttgatccgcacctcgctcaaggccctgctcgaacagctcgaccccgcccagttccagcaagtgcaccgcgccgtcgtcgtcaacctgaacgccgtcagccacgtcacccctggcctcaacgaaaaggccgacctgcacttcaagcaccgccccgaggtgctgccggtgagccgtacctacctgcacttgttcaaggcggagtgagtggggggctggcttgcgcagtggctgcgcaagttgcgccgcataaaagacgaaggccgggatatacccggccttccatttggtgcatctggcgaaaactcgcttcagcttgttagcgtccagagcgcatttcccagcgaaatgaacgtctagactctagcagcaccgttgggctgacggcaagcagggaggcacgcaatgggcaagatgcgatatcggctcgcactggatttgggctccacctcgctcgggtgggccatgctcagattgaacgaacgggatgagccttgtgcggtcatcaaggcgggcgttcgcatcttctcggatgggcgcaatccgaaggatggcagctcgctagccgtcactcgacgcaatgcccgagcgatgcgtcgtcgccgcgaccggctgctcaagcgcaaagcacggatgaagcaggcgctgattgaattgggcttctttccggctgacgaagcccaacgcaaagcccttgaaaccctcaacccttacaccttgcgagccaagggcctggatcaggccctcacacccgccgagttcgcgcgggcgctgttccacatcaaccaacgtcggggcttcaagagcaatcgacgtacggacagcaaggaaaaggactccggccaccttaagaaggcggttggagagctgcgcaaagcgattgaggctgaaaacttgcgcagcgtgggcgaattgcttgagcgccgacgcattgctggccttggtcagcgtgcaagacccaagctcaatatccgcaccggcgcggtgttgggctacgacctctacatcgatcgcgcgatgatcgaacaggagttcgacgcgctgtgggccaaacaagccgaactcaatcctgcgcagttcacccagacagccggggcacgtctcaaggacgtgctgctgtttcaacgcaagctgcggccagtcacgccgggacgatgcacgctgcttccctccctgccacgcgcccctctcgcattgcccagcagccaacgtgcacgcatctatcaggagctgaaccacctgcgcatcctcaacgccagcctgggcgagcaggcgctgacgctggcacagcgagacaccttggctgcagccctcgatcgccacgccaagcgcagcttcacccagatcaagaagttgctcggactgtcaggggctgttcaattcaactttgaagacccgaaacgccaagagttgaagggaaacaccacgaacgccatcctgggcgatgccaaacacttcggccctgcatggttcgatttcaacgaggccaagcaagacgtcatcgttcaacgactcgtgaccgaggagagcgaagcggcgctgatcgactggctgcaggcggagacgggcattgatgaatccctcgctgagcgcatcgccaacgccggtttgccggagggttacggcagcctgagcgcagaagctttggcgcggctgttaccagccttgcgagccgaagtcatcacttatgacaaggcagtgattgctgcaggcttcgagcatcacagccaactctcgccatccgccacgggggagatccttcctacgctgccctactacggcgaggcgctgcagcgccatgtgggcttcggcaccggcgcaccggaagaccctcccgagcggcgcttcggccgcatccccaaccctacggtgcacatcggtctcaaccaagtgcgaaccgtggtgaacgcattgatcgaacgctacggccaccccagcgaagtgatcgtcgagctggcccgcgacctgaagcagagccgggagcagcgagaagaagagaacaagcgccaggcagaacgacaaacccgcaatcgaaagtaccgcagcgagatcgccgcacatctcagcatcagtgaagagcgggtcaaggctgacgacctccaaaaggttcagctgtgggaggagctcaacctcaagaacgccgctgatcgctgctgcccctacagcggcgctcagatcgggtttgcgatgttgttcaacggcgaggctgagatcgagcacatcctgcccttttcgatgacgctggacgacagcctggccaacaaaactgtggcacttcgccaagccaaccggatcaagggcaaccgcaccccttggcaagcctttggcgagcatccccaacccggctttgactacgcagccatgctgttgcgcgcggaagccatgcccaagaacaagcgctatcgctttgccgctgatggctaccaacagtggctacgcgacgatgccgggttccttgctcgcgccctgaacgacactcggtacttgagccgcgttgcacgcgagtacctgagcctgatctgcccgcaaggcacacgcgtgattccaggtcagatgacagccaaattgcgcggcaagttcggcctcaacgacatgcttggcctgcgcggcgaaaagaaccgcaacgaccaccgccatcacgccgtggacgcctgcgtgattggggttaccgatcaggggttgctgcagcgctttgcgcaagccagcgcctccgcgcgggagcgcgcgctagatcgactggttgatgacatgcctctgccgtgggcaagctatcgagaacatgtggcacgtgcggtagcccgcatttgggtcagccacagaccagatcacggctttgaaggcagcatgttcaaggagaccgcccacggcattcggccggacggctcagtggtgcagcgcacccgcgctgacagtgaagcagggcgcacggttgaatacgtggcccccgttcgtgcgccgcagcagttggcgagacatggcttggatgacaagggacagcctcgcgcctacaagggctatgtgcccgatggcaatcacggcattgagatcgtgcgcagcgagtcaggacgttggcaaggcgaggtcacggccacattcgaggcctaccgcgtggctcgtgaacgtggtgttgatgcacttagccacccgacccaaagcctcagcggcagacccctcgtgatgcgcttgatgatcgatgacttcatcaagcttgagatcgatggacgcttacgggtgatgcgcattgcctccatcaacgcggccggccggctcagccttgccgaccaccaggaggccaatgtcgatgctcgcaaccgtgatcgcgaaggcgattggcgctatacctacaagcaggccgggtcattgcaagcagcgaaggcacgccgcgtcaccatctcacccgatgggcggctgaacgatccgggctttgccggctgagcggtcctcatgctcggccgcatcgtcgaagttgccgacgaccaccgccacctcagtgtccagcggggcttcatggccgtgcatgacactgatggcgagcgtcggcagctcggccaggtggcgctcgacgacatcgccgccgtcatcgccaacgcccacggcctcagctacaccaacaacctgctggtcgccctggctgaacgtggcgcaccgtttgtgctctgcggcgccaaccacatggtcgttggcatgctctggcccactgacggcaacttcgagcaatcgcgccgcatcgatgcccagctcggcgccagccagccgacgcgcaagcgcctgtgggccgcagtcgtccgtgccaagctggagcaacaggccgctgctttagaagccgcaggccatagcccggcaccactgacgcagatggccagccgcgtgcgcagtggagacccggagaaccacgaagcacaaggtgcccgccactactggcgccaactctttggcgccgacttccggcgcgaccaagaaggcgatggcctcaatgccctcttgaactacggctacaccgtgctgcgagcctgcaccgcccggtcggtcattgctgccggtctgcacgccgggatcggcctgcatcacagccatgccaacaacgccatgcgcttggtcgatgacctgatggagcccttccggcccgttgtcgacctcaaggtctggcaactg

SEQ ID NO: 1896 - DNA, 4397 bp, synthetic construct
  misc_feature 1..4397: note = Synthetic
  source 1..4397: mol_type = other DNA
atccacaaacaccacgcgatcaccgtcaccgtcaatggcgatacccaaatccgcacctactgcgataactttctcttgcagcgcttctggcttggttgaaccgcagctgcggttgatgttggtgccgtttggctccacaaacatgggaataatttttgcgcccaactcactgaatacatcgggcgctatgttgtaggtagcgccgtgggcgcagtccaacacaatttgcaggcctttgaggttaaagccccaaggcatagtgcccttacagaattcgatgtaacgaccagatgcatcgccaatacggcgcgctttgccgagcttttcggcggtcaccataggtttttctaactcttcttcaatcaaacgctctagttcatccggcaatttagtgccattgccgccaaagaatttaatgccgttatcgacatagctattatgtgaagcgctaatgacgatgcccgcttgcgcttggaacgtacgtgttaaataggcaacgcccggggtcggcatggggccgagcaggcctacatccacacctgcgttgatcaagcctgcttgcagggctgactcaaacatatagccggaaatacgcgtgtctttaccaatcaaaatcatgttttgaccatcaaagcgatccttgagcacgcagccagccgcccaacctaacttgagcataaaatccggggtaatggggaactcacccaccaaaccacgaataccatcagtaccaaaatacttgcgagacataattccttactccgctgacaaaaaatgcgctgtgactattcgttcacagcagcgagaacctttaatacatctaccgtagctgcaacatcatgtacacgaataatggcagcaccgcgttcagcagccagcattgccaacgccaaactgccggatgggtacggcaacgttagccgccaagcgctaggccgcattcttcccgaactcaagcgcgcggtaatcacctacgacaaggcagttgtagcagccggctttgaaagccacagcgcgctttctcatagccaacaaacgggtgagattcttccagagctgccctactacggcgaaccgcttcagcgccacgttgggtttggaactggaaatccggctgacccggcagagaagcgatttggcaggatcgccaaccctaccgtccatatcgggctgaatcaactccgcaaggtggtcaacgcgctgatcaagcgctatggccacccatcggaggtcatcgtcgaggtgacgcgcgaactcaaacagagccgcgaaaagcgcatggagatccagaaggagcaggccgcgcgccaggcacaaaacacaagatggaaggaggagatcaaggaaatcaccggctttgatgcttcggtaattgatttgcagaaaatgaagctctggacggaactcaatcctggcgatgttgctgggagatgctgtccctataccggcagccccattagtttgacgatgctgttttctgatgaagtagagatcgaacacattcttccattcgcccgaacgcttgacgacagcctgaacaacaaaaccgtggcattgcgccgcgccaatcgcgacaaaggcaacaagacgcctttcgaggccttcggccattctccgccgggatatgactacgaagcaatccttaagcgcgcgagcgccatgtttcgcgacaaagccaagcgctttgctccagatggttatcagcgctggctaaaggaagacaaagactttctggcaagagcactaaacgacactgcatatctctcgcgcattgcacgcgagtatttgtcgctggtctgtccgcacaatcgcgtgcgcgccatccccggccgtctgacggcactgctgcgggccaagtttggcttgaacgacgttcttggcctgcgaggcgagaagaatcgcaatgaccatcgccatcatgcggttgacgcctgtgtaatcggcgtgaccgaccaaggcttattgcagaaagtggcacaggccagttcttcgacgcgcgaacgtcaagtcaacaagctggttgagacaatgccagagccttttgcgcgttttcgcgatcatgtctcgcgggccatcgaatccattgttgtcagccaccgcccagaccacagctacgaaggccgtctgcacaacgatacggcgtatggcttgttaggtgatggcatggtgcagtacacaagggttgtagagggccaacgcattcgcgaaccagagaagctcaacgtgattgagtttgcggagccgaaagccaatcaccgtcatggcacgctgccagatggttcgcctcgtccctacaagggctacaagggagatagcaactactgcattgagatcacgcgtaaccagaaagccaagtgggaaggcagggcgatttcgacatttgacgcatatcagattgtccgcaaccaagggctgggggcgttgagaaatccggctcaaagcttgaacgggctgccgctagtcatgcgattgatgaagcacgactgtgtgcaactctcgattgatggcagcaagtggctgtatcaggtggcttgggtgcgatccgatgggcgaattgcgttagcgcctttgaacgaggctaacgttgatgcccgcgaccgctcgaaggaggatttgttctcgtatcttgtcaagactccggggacgttacagcaactgaaagcgagctttgtcacgatctccccgataggggacgttcgcgcccttccctccgaaggctaactaaagtgattggccgcattgtcgagatagcggacgacaagcggcacctttttgtgtcgcgcggtttccttgtggttcagcaaaccgatggtaaacgcaaagagctggggcaagtaccgcttgacgacattgcggcggtcgtcgccaatgcccacggcctgagctacaccaataatcttctggttgcacttgcggagcgaggtacgccctttgtgttgtgcgctgccaatcacagtgccgttggaatgctcattccagttgagggcaactaccagcaagcaaagcggttcgatgcgcaattgagcgctggcaagcccgtgcacaaacgcctctgggcagaaattgtgcgtgcgaaactgcaacaacaggctgctgctctggaagccgcgaaccaaccgaccgccccacttacagcattagcggccaaggttcgctcaggcgacccgcagaatttggaagcccagggcgcacgccgctattggggcctgctactcggtgatgaattccgccgtgatcagcaggcagggggcgtgaacggcttgctcaactacggctacacggtactccgggcagcaaccgcccgttcggtcatcgctgcaggacttcacccaaccattggcctttttcacagcaatgagggaaatccaatgcggctagtcgacgatctgatggagccgttcaggccgttgatggatttgcgcgtttggcaacttgtcaggagcggccggaccgaagtgtccccggatacgaagcgcgcattggtgaaggtactctatgacgatatgcagagttcaatcggcgccacaccggtaatggcttgcattcataggctcgccatctcactggcgcaggtttacctaggcgagcgcgatagactcgatttgccgcttccggggttgccgctggacatggcggccatttccgctcaggacgtgaacccttagcaaatgctctcggcatatcgactcatgtggatggtcgtcatgtttgatctgccagtggtggagaagccggaacgcaaggcggcaaccgagtttcgtaataccctgctcgaccttggatttgaaatggcgcagttttcggtttacatgcgcttttgtacgagtcaagcgcagaccgatacgctcgcaaagcgcgtcgaagaagcgttgccaaatggcgggaaagtgaatatcctgttcttcacagataagcaatacgaacgcgtgctaactttctacgggcgcagccaacagccgcctcaaaaagcccccgatcaattcgatttgttttgaaaatgcatcttgattttgaaaatgcatcctgattttccgtccccaaaagcgaaaaaccccttgattactcaaggggttgtcgcactgcgagtctagctgattgggatttgcgctctgaccggaaccctgacaacgaggagaaaacatgaaaattaagtctagctgattgggatttgcgctctgaccggaacttcgacgccgcactccagttcatgccagcgagtctagctgattgggatttgcgctctgaccggaacgcccgggtgtcatgccgacaacgcccaagcagtctagctgattgggatttgcgctctgaccggaactgcgctgcagtgaacctttggtgcacctcgagtctagctgattgggatttgcgctctgaccggaacgaacgatgtcgag

SEQ ID NO: 1897 - DNA, 3056 bp, synthetic construct
  source 1..3056: mol_type = other DNA
  misc_feature 1..3056: note = Synthetic
aacggccggaatgatgacatccgagcaatggcgggcaagtactgcgatacgcagtgtttttttgcggtcgcgctctcttgaataatcttcgagacgttgccaggcgcgcattgattccatggccacccgataaaaatctgcgccgtcttcggtaagagtgagcgcttttcccgaacgatcgaacaacgcaaatccaagtcgctcttcgagctgagaaatcacgcggcttgcggcggaagccgacagcgcgatcttgtcggcggctgcaagcagacttccggattcgacaacggcgcagaagagtcggacggatttcgatttgagttccatgtgagtagtaagaaaaaaggaacgagcccaaatttcttgcatggacgactgaaaatgagtcgtgtgcaatcaggcggaatacgttaaaactttcgtccgccaatggagaattatttaagattgtcgaagataataaccttggataattggcttgaggctggcaagccttcagaaagaagaaaggggcgcatatagcacccctcggatctgttgcattttgcaatgcttgttagtggcaaaagctcgtttcctaacgatattgcgttgcaagtttaacctgctcttagcatcacgtcaattacctgaatagctacaagcggagttttatatgccttcaaagatgcgttatcgccttgcactggatttgggaacaacgtcaattggctgggctatgctcaggcttaaccaacacgataagccgcacgctgttatcagggccggtgtgagaattttcaatgatggaagagttccgaaaacgggagaagctctggcagttcaacgacgtttggcgagacagcaacgccggacgcgtgatcgcagtcttcggcgcaagaacaaactgatcaatatgttggttcggttcggcttctttccggaaaatccagcagaacgtaaatcacttgagaggctaaatccttacgagttacgagcaaagggtctggagcaacaactcaaacctgaacaatttgcaagagctttgtttcatctagcacagcgtcgaggatttaaatccaatcgcaaaacggacaggggtgatactgaatccggcgtcatgaaagcggcgattgctgaaaccaaacaagaaatagaaaccttagggtgccgtacgatcggcgaatacctctataagcgattgcagtccgggttgggaacaagggctcgtcttcgcgacaagcccaaggtgaaaggcggctcgacgaaggcatatgacctgtatacggaaagaagcctggtggagaaggaatttgatgtactttggaatgtccagagtcgtttcgccccggaactttttacgctggaaaaacgtgaggcactaagggataccattttccatcaacgtgatctgcgcccagtgaagccgggacgctgtactctgttcccggaagaagagcgagcacctttggctttaccctctcagcaaagattccgtatctgtcaggaggtgaataatcttcgcaaaatcgatgaacatttgtgttcggtcgaactcactcgcacagaaaaagcaaagctggtacaggctttgagcttagctagaaagaaaacattcgagcagctccgaaagactattggctatgaaggtcaatttaatctggaagatgctggtgccgggagggcggagcttaaaggaaatgaaacatccgttgccatcgggaagatcattggtaaggattggttgaattattcgctatcagaacaagataagctggttttaatgctgctcaatattgagtcggaatcggagcttatcgataagcttcaagaagaattcggcctgtcagaagctgtggcaaagaaattgtccggaacctcattggttagcggatacggggctctttcccgtaaggctatagacttaatactgcctttccttgagcagggtatgacatacgataaggccgttgcggctgcagatattccctcgcacagcgatttgacatggcaggtgaagagagaagtgacggatcaacttccttactatggtgaagttttgcaacgtcacgttgggtttggtactggagatcctaaggatgctccggaggtgcgttttggcaaaattgccaatccaacggttcatatttgcttaaatcagcttcgcctcattgtaaatttgatcataaagcgctatggcagaccggatgaggttgtaattgaggtagctcgagatcttaaactttctcgagaaaagaaaaatgaaatagcaagaaagcagaagaaaaatcaagaaaaaagagatcaggtgagaaaagaaatagcggcaattttagagtgtgatgagagccttgttaccggcgaagatattgaaaagtggttgctttgggaagaacttaacccgggtagagctttagaccgttgttgcccctatacgggtaagcaaattagtgcagtagatcttctctcgaaatcctttgaaattgaacatattttgccgagatctcgcacgcttgacgattctaggtcgaataaaacggtatcctattggaaagcgaatcgactgaaatcaaatatgacgccatgggaagctcgcgagatttttgaagctcaaggctggagttatgaagatatattgaagcgagcggaaaatcttcctccgaataagcgttatcgttttggtgctgatgggtacaaaatatggctaagagaggactccgactttttatcgcgagaactaacggacactcaatatattagtcgtattgccagagaatatgtttctcttgtttgcccgaagaatacctatttgattccttgacgaatgacggcgatgcttagacactgtttgggtcttaataccattctcagtgacgatgacaaaaagaaccgcaacgatcatcgccaccatgccgtggatgcgtgtgtcattggcataactgacagatcgttgctgaacaagattgccacagcgagcgcaagaggtgaggaaatgaatgataggaggctacagaggactgttgaagagccctggacaggcttccgagagagcgtgcgtcgcgcagtagaaagga

SEQ ID NO: 1898 - DNA, 16131 bp, synthetic construct
  source 1..16131: mol_type = other DNA
  misc_feature 1..16131: note = Synthetic
cggccattaagcaggcgcggacacagggcgcgtttctggatgtgacacacggcgccgacgcggttgtgatgacgctgaccattccgcgaggcgcttgctgacgccccgctcgaatacccgggcgctgcgcccgaaccgctgaaagggtgattctcatggccggtcaaaaagttttgctcgtggacgacgaggtggaattcaccaaaacgctttcagagcgcatggaagcccggggcattcatgcccataccgcggccaacggcgccgaagctctcgaaaaactggacgcggaaaaattcgacgccatcattctggacatgcagatgcccggcatggacggcatcgagaccctgcgccgcatgctcgagaaaaatccggatttgcaaatcattctgctcacgggctacgccaccgtgggcaaaagcgtcgaggccatgaaaatcggcgccaaggatttcctcgaaaaacccgcgaacatcgaggagctggtcgagaagatcaagctcgcgggcaacgagcgcatcgccctggtcgagaagcgcgccgaggaatccatcagggacatcctcaagggcaaaagctggtaagaggttttttccaatctcttacgcggcgattccatgcatttgcattcctcgcctgccgtatatatacatttgtttatgactgcatgcgtgagaacagcgtacgcgccgcgtgcacacgcggcgcttatgtttgcggcgctggcgtgcctggcttgcgcgcgcgccgcagccgtgcctccgatgggcgcggagccgctgctcaccgccgccgcggtgcgcgatgtgacatggctctcggattcaagcgctctggcggtaaacacggaccgcgcactggtgctggtcgaggcgcacgggccgcgcgtgctgtccggcccggacgcagttctgtctcccgacggcaaaagcattttgttcgcggacgcgcagggcagactgcgcgccatggacgccgggagcggcgccgtcacagatttgggactatatggcgctgcgccgcgatgggcgcccgaaggacggcgattcgcatacatagccgacggccgctgcgcgcccggcgcggaggcgtggttctgcccgcccgcgggcctggtggccgcggacatgagcgccggggagcttgtgcccctggcccagggcgcgggcgcggacggcggctatgactggctgcccggcgcttccggcgtggtgtactacagccgcggggaactgggcatcgcccgcgcggacgcggccacgaattcgctgctcacaaaggttgctcctttcccctgccccgagagcaatccgtgtccggcctcggtggccgtggcgcgccatgcgccccgcgccgctgtgtttcttttcaacgacagaaacggggatcgcgcctgggacgccggcgacgccgcggccctgtgggcgttcgacacggacaccggagacatcgtgcacacggaacagcgcgcctggtttctgaaccccgaggaactgcgcgcgggcctgcgcccgcgcggcatcgcctggcggccggacggcggcgcaatctgcttcaccggccgcgacgaaaccggattctatctcatgttccactggttcaccggcgaagcgccacccaccctgctgcgcatgcagggccgccccgaactgccccgttggtccccggacggccaggccgtggctttcgtgctggtgcggcaggactccagctccgcgacaggaaccatgtccgagctgcggttgttgcgattcagcgataacggcgcgcccggcgcggcccggtaatccccgccgcaccctccctccgcgtttacaaatttttccgcacgggatagcatattagtgttttatgggaccgcgatgcggcccgcaccggttttccagggagaatgccatgaccgcaccagtcagatattttgcgctcctgatccttgtcgcgctggcagggcgcggaaccgccgcggccgcgccctgcgcgcattgcgtggattacacgccgggctatatcgttctgcccgccgcaaccgcggacaaccagggcctgctcctggccgcgggcatgctcgcggatgccatgggcgaactctacgccaccgcgccggccattattccggaccgggatttcaccatgccgcacgacgggcgaggcgtggtggtcgtgggcgcagccaacaagctggtcaaggattacgacctcggcgtttatatggaaaaacgcgccttgcccccggaaagccacggcattgcaaccgtggacataccgggcggcagcccagccctgctcgtgtacggtgcggacattcgcggcgagatgttcggcctcgcttacctggcagagcgcctgcgcctggccccgcgccgcgtgctcggcatcaaggaggtgcgcgaaccgcatttcccaatccgcatcatgagcggcgaccccgtggaaaccgcggtgcggttcggctacaacactgtgttcacgccccacagccacaacaatgtggccctgctcgaagactatgacaaagatatgttcttccagcacgacaagcagcgcggctacctcatggagcgccgcgcgcagttcgcggacgccctggcgcggcagcaggcgctgaacatagactccatctccagcggcgacgaattcgaattccacaaggccgtgctcaagcgcccctgggccgcggaaatgctccgcggcggctccgggtcctggctctgtttctgcaatcccaggctctgggacctgtacgcggccaagtacagggaaatcctcggaggattcaaggatctggattacatcatgctccgcctcggcgaaaactacgcgggcggcgattacttcggcaatgtccccgccacaaaggagttctggaaacaatgtcccgcctgcatgggcgagggatatgcggaccgcatcgcgacgctcatcaaccgcacgcaaaaaatcgtgtccggcgatcacaagcgcatgtacatccaccgcacttgggacaccaacagcgacaccttccacaccagcccggacatgtaccgcgagatcctttccaaagttcagagcaaggaaaatctgtatttttccgtgaaatacacaaagaccgacttctggatgtacaacgaattcaatgaaaccatcggacaggacggcgcgccgcagattgtggaatttcagtgcgcgcgcgagtacgagggcaagggcgcatttccgaactacatcggcgcgcacgctgccgggggataccggcacgcggccgcgcgcggcgccgcgggcgcatggaactggcaccacggcggcggctgggacggcccctaccccaaaaccgatctgtggaaccaggccaacatctacgccgccgcgcacctggcctggaatccggacctggaccccggagacctggcccgcgaatggggcgcgcttaccttcggcgccgaggatgcggacaaaatcgcaaaactgctggccatgtcagccgaggccgtgcgcaagctcatttatttcgaggcatacgcacaggccaagggcgacccctggatgcccaacgaaaactgggtgcgcgacgatgtcatcaaaggcagcggccccctgcgcagaatctacacggccgcctcggcgagcgtggatcacatggtgcgtgaaaaggaagacgccgtgttgctgatccaggacatgctcggcatcgccaatgatttgtccgcgcccgcggatctgcgccagtccgcaatccagtccgtggagtacgaactggccctggcgcgggttctgcgcagctatgcggccgcatatctatactactgccgctggaaggaaagcggcgccgaaacggaccgcgctaaagcctttgcatacgcaaaccagtgggaacgcgactgggacacttatacgcgcgccattcccggactcaaatggagcgcgactttgtaccgcgacgacggcatggtggaaaccatgcgcgaagttctcgcggatttgcagccgcaccgctgacggctcccgttttaattcgcaaaatcaggaaatattgcggaacagcgacgacgccagggtgatctggtttgcgccgcgcgccgcgctgcggtgcagcgccgccgtggccgcgctgatcaatccggccatgtcgtccgcgtcggacgggaatccggccaccccgatgctgatgttgaagtggaagctgtgttcggttccgaactgcagggccgtgattttgtcccgaaggcgcaccgcgggcaccacggacttgcgcggctcggtgtccggaagcagaaacgcaaacccgttgttctggaaccgcgccaccaggtccgtgtcgcgcatggctttgatcacctgccgcgcgatgcgccccagcgccaagtccctttcggccactccgaactttttctcgtaaacctccagatcgtccaccgtgagaatgcacaggctgaagatgtacttctgccgcaacccgcgcttgacttccttgtcaatgcggtcccggaaatagcggaagttgttcagcccggtgacttcgtccaccaccgagcttttttcgtatttgttctcgatggcggacagggcgcgctcgagatagcgttcgcgttcctgcagcgccgtgaggcgcaggcgcagagactggatgttctgcccggccatagcgaaatatgcgggccacagcacggcgaacccatacgcaaaccagaaggccacggaatagaatcccgggcggccggacaggtgttccaggtaccagtggaaaagcatgagcgccacggcgctgaacagggccacggcgcggcccgagaacagggccatggccgcagtctgcggcagcagcagaaacgccacagggctggcgttgcccccgttatgccaggcaatccagcccagcagcgcaatgtccgcgcattgtgcgatgaacgaaagtccgcgcccgaacaagctcaacagcgccgccgacgaaagcgcggcccacacaatgccataaatggccagggacatggcttcccctggcgccgcaagccaccccgcgcccacagccacggccacgcacgccagcatgatcccgcgcaatgttatatacatgatttcttcattgctgcgttggcccatggcggcacatcctgatatgttttcggaacagttctgtgatgagtatacccgatccgcgccatgacaggcaatccatgcaaatcaaagtttttatgagccttggcgcagacaagaattctcggccgtggcacttttcccccgcggttgtgtttagtatgtcaagagaaccgatctatgctgcaactccggcaacgcgccggataccgggggaggctatcatgaaaactgaacgcatgctcaaaaaaatcatggcggcgtcgggcgcgctccttgccctggacgcgctctggctcggcgtcgtgatgaaggattattaccgggaaaagctcgccggactggcgcgcggcgacggcggcgccatcgagccggactggactgccgcggctctggtttatgtgcttctgatcactgggattctggcttttgcggcgcgcggcgacggcggtcccgcagcagggcgcgttggacgcgcggctgcgcggggcgcgctgttcggactggtttcctatggcatttacgatcttacgaacatggccacgctcaagggctggacttggtccctgtccgccacggacatggcctggggcgcattcctgtgcgccgtgtcagccgccgcagccgccgcggccgcaaaataaattccggagggaatcccatgaagctgaactatatcgtgattccgttgattgctgcgggcgtgtccgccgtggggggaagtttcacatcatcgggcatggactggtaccgcaccatcaacctgccgccgtggacgccccccggatcgatcatcggcgtgatctggaccgtgatctacatcctcaccgcggcatccgccatcatcgtgtggaacacatggcccaggccggccgcgttccgcgcgatcatcgccctgttcgcggtcaatgcgtttctgaacgcgacatggagcttcgttttcttcgcccgtggcatgatctctgcggctttcgtccacgcgctggcgctcgaagccacggtcatcgccctgttgcttctgatccggcccatatcaaaaactgcggccctgctcctcgcgccctatgccgcttggaccgcattcgcttccttcctcaccctcaccatagcgcgcctgaatgccgcgtaaatactgccgccgatttgtaaaccgcggacttccgcggccgttgcttcgcgcatgtaaagagccgcccccttcatggaagcggctcttgtggtgtcgctcatgtaaacgcgcttgcgtgaacgcctggcgcgcatccgggccggtcagccgccgcgcgagtaggtcagatccacgatgtcctcgctcacgcattcggacaggtccttcgcgcttgccgggcacatgaagatattgccgtggctgtctttgcgccagttgatgctctctttgcggccgttgaactcatacacttcgtcgtggcttttcatcatggtcgtgcacctctttcgtcgaattggtttatggtgtgtttcggactgttcgcaacctcgtcagttcatcgaactgtaccagtataaccccgcacttcaaagcagggtttccgggttcgaggaaaaaattgcgggattttccggcaggtcacattttggaatagatggagtcgggcagatgccgcaggacggttgccacgagccgccacttgggggggatgtaagcgatggatttgccgcgctcgatggcgtcggcgatgtggcgcgcggccacgggcgcgggcgtgagccagaacatgcccttctgcccctttgtaaggggcgtatccacaaaccccggccgcaggtccgtaacgctgatgggcagtttgcgctggcgcgcgttcaggcgcaggcattccagataattgctcacaaacgcttttgtggcgggataggccgggttgccggggatgccgcgcagcgcggccacggacgacagacccgcgagccgcccgcgcccctgccccacaaagtgccggaacgccaccccggccatggccgcaaacccggtcacattcaaatcaatggtggccttctccggcgcccacgccagatcccggttcggcaggcccgtgcccgcgttgatcaccgccgtgtgcatgccgcccatgtcctcgatcagcgactcaaacgcggccatggcctcgtccgtccgcgtgatgtccatgaccttgacgaacgccggcccgggcagctccgcgcgcagcgcttcgagccggtccccgctgcgcgcggccaaacccacggcgtaaccccgggcgctgaactcccgcgccagctccgcgccgatcccctggctggctccgataatgatagcctgcggtttgttttcgctcatgcgcagattataccccacagacccgggattaacggagagcgggagagaatttgcacgacaggcaggatgcgcatgagatgaatagcggagatgaaaagcaattcattccagaaacagaatcggcggggatcccgctcaagcattcagcattgctgctttaatttatcaaaaagagcggcgcagccgcgccatcctgcctatcttgcccatcctgccaaaatctctcgcccctccgctccggagcaatcattcccgccccgtgccgtgcaaatcgctataatgtgttcggtatgatacacttgcgcgacatcacattcggttatggcggccgggaactcatgtccgggctgtgcctgcacatcaagccccaggaccgcatcgggcttgtgggtccgaacggcgcgggcaaaaccacactgctgcgcatcatcctgggcgacatccgcgatttctccggaaccgtgtcccggcgcaagggcgtgaccgtggcgctcctgccacaggagggcatctacgactccggacgcacggtcatggaagcggccctcgaaaccttcgccccgctcctggcgctggaacgggaaatcgaagatttgaacaccaccgccgccgaggaacaggatgcggcgcggcgcgacgaactgctggagcgccagggcgctgcgcgcctcgatttcgagtcccgcggcgggttcaccttccgcgcgcgcacggcacaggtgctcacgggcctcgggttcagcgaagcggacctgcggcgcgacatgggcacattcagcggcggatggcagatgcgcgtggccctggcacgcctcctgctgcaggaacccgatgtcctgcttttggacgaacccaccaaccacctggacctgccggcgctcctgtggctcgaggagtttctccagacctaccccggcgccgtgctcgtcattagccacgaccgcgcgttcctggaccgcgccgtgcgccgcatcgcggaactgtcccagaaacagctcgccctgtacaccggcgggtattctgactacgaggtcgagaaacagaagcggctcgaaatcctcgccaaccgtatcgagaaccaggagcgcgagatccgccagaccgagcgcttcatcgagcgctttcgctataaagcaaccaaggcgcgccaggtgcagtcccgcatcaaggccctcgaaaaaatggagcgcctggaaatgccggaccaggagcgcaccctgaatttttcgttccaggtgcagaaacccagcggcaaggaagtgatccggctttcgggcgtaaacaaatcctacggggacaaccgcgtgctgcgggatgtgaagctggccctgaaccgcggcgaccgcatggccatcatcggcgccaacggcctgggcaaaaccaccctcatgcgcgtgctggccggccgcacggacttcaccggcgaacgcaaggccggccacaacaccgagatcggctacttctcgcaggaccagttcgagctgctgaacccggaccgcaccgttctggaggaagccgcatccggcggcgcggccgcgggcacggccctgcgctcactgctcggcgtgttcctgttcagcggagacgatgtggacaaacccgtgcgcgtgttgagcggcggcgagaaaagccgcctgctgttcgcccgcatgatggccagccccgccaacttcctcatcctcgacgaaccgaccaaccacctcgacccgcccagccaggccatgctcgcccgcgtgctcaactcctacaacggcaccctctgcatcgtgtcccacaaccggtggttcatcaaccaggtggccaaccgcatcgtggaaatgacccccgaaggcctcgatgaatacctgggcgattacgacgactacaaataccagaagaagatgcgcgaacaggccgcgcagcagaaccgcggccccgaagcggacgccgatgagccgcccgcgccctcactctcggaccgccgcgcacagcgccaggagcgcgcccgtttcgtgcaggaacgctcccgcgccctcacccccatccgcaacgccatcgccggcgccgaatcccgcattgaccaactcgaaacccgcatcgcggaaatcgagtcccagctcgccgaccccgccagctacaacgacaccaggctcatgaaatccctgcccgcggaactcaagcagcgccaggccgaactcgaacaggccctccggcaatgggaagaagccagcgagcaactcgcgctcaaggaaaaggaattcgagtgaccgcgcgcgcttgcgcgcggatctctaaaatgccgacgcattgcatttcccttgccaaaaacattcacagacactgaaatctgcttgaacggcgcaagcgcagcaaaatacagggactgggaacgcggcgtttttccgcgtgcctgtccctgtttttgcggccacgggcaagcctcttgtgggactgaacaaatcgtctctataaagaaagacgccctcctgggagggcagtcggggatgcctggcaagccagacagcgcccgcgagcgaaagctcttgctgtgagttgcagggcaatcgtcgctcaggtacaattgctttatagtaacagaccaaacagcaactgtcaagggggcgtctcatgaaaactgaataccagaaatccggttccgtattgggcctggacatcgggccaacctccgtcggctgggcgttgattgaagagaacgaacagcagccatgcagactgattgacatgggggttcgcatcttcgaggcgggcgtggaaggcgacatcgaatccgggcgcgacgaatcccgcgccgcaaagcgccgtatggcgcgcctgcaccgccgccagctcgaacgcgcttcgcgcaggctcaaagtccttgccgaggaattgcagcgccgcagcctgctccctccgggcgatgtgtccactcccgacgccagaaaacgatttttcgatgaactggacaaactgctcgcccagggcctcgacaaccccgcgctgctgcctttcatcctgcgcgcacgcgcgctccatgaacgactcgatccgcacgaaaccggacgcgcgctctatcacctcgcgcacaagcggggcttcctttccaacagaaaatcacagcccaaagaagatgaagaactcaacaccatcgcccaggccgtgggccaactgcgccaggccatgcaggaaaccggcgcgcaaacgccgggcgaacacttcgcggcccttttgcggaacaacggccgcgtgcgcggccaccacactttccgcaacatgaacgcgcaggaattcgatctgatctgggacacgcagcgcgcgttccacccggatgtcctatcggacgaagcgcgcaaatccatcggcaaaaaaatcttctttcagaggcccctcaaaagcaacaaggggctgaccggccgctgcgaactcgaaggcgcgcgccgcgcgcccctggctctgctcgtatcgcagcgcttccgcatgcttcagaaagtcaacgacctgcgcctggtctctcccgacggactgcagcgggaactcacggcgagcgaacgcgctgaactgctgcgccacctggaattgcagcagaacatgaagttcacggctatccgcaagaaattgaaacttcagggcaagttcaatttcgaaatcggcggcgaggaaagcctgcccggaaaccgcaccgccgcgcgcatggcctcggtgttcggccaacagagatggcagtccatgacccccggagagcaggatctggccgtgcagcatgtgcgctccatccgcaaacccgaggcccttgagcgcgccgccgcggattactggaaactcgaccccaatgccgcgcgggacttcgcgaaaattccgctcgaagaaggccatgtcatgctgtcgcagaaagccatggtcaagctgctgcctctcatggagcgcggcatgccctttgccacggccagaaaagaactctacggcgccgcgccgccgccccgcgcctatgacaagctcccgcccgttcactcgccggaaatgcccgccgtcaccaaccccgcggtgcgccgcgcgctcaccgaaatgcgcaaggtggtcaacgccgtcaccgccaaatacggcaagcccggcctgatccgcatcgaactcgcccgcgacatgaaacggccacgcaaagcccggcagcagatctccaagcgcattcgcgccaacaagaacaagcgcgacgccgccagacagcaactgctcaaagaggcctcgggagcgctcggcagcgcgtgggaaccaaaacggtcagacatcgaaaaatggctcctgcgcgacgaatgcggcggcatctgcccctacaccggaaaacccatcagcttccactcccttttcgtggaacccgagttcgacatcgagcacatcatccccttcagccggtccctcgacaactcgtttctgaacaaaaccctgtgctgcgccaccgagaaccgcatcaaaagcaagcgcacaccctgggaagcctacggcggaacggctcgctgggatgaaatcatcggccgcgtgagaaaattcaccggcgacgcgaatgtcgccaaactgcaacggttccagatccgcgacgcggacaaggaaattgacggcttcgcgtcccgcgaactcaacgacacccgttacatctcgcgccttgcggtgcagtacgcgggcctgctctacggcgcgggcgccgatggcgtggacccctccggccgccgccgcgtgcaggcggcccggggccagatcaccgcgcacctgcgcgatgtgtatgaactcaattccttgctcggagacggcggcgaaaaataccgcggcgaccaccgccaccacgccgtggacgccctgtgcgtggccctcaccaccccgcgcgccgtcaaacagttgagcgacgccgccgccgcgggcgaggaccgccgccgcgcctggtacgacacccgcctcatcacagacccctggcccggattcctcgacgacgcgcgcaacgccgtcaacgccatcgtggtttcacactgtcccagccgcaaggtcaacagcgccatgcacgacgaaaccgtgtacagcaaacctcacgccgatcccatgggcagggcatgcgtgcatgtgcgcaaacccctggccgcgctcacggataaaatggtggacaacatcgtggacgatcgcgtgcgcgaaaaagtccggcaggcgctcaatggccgcgcacccaaagacgctttcaaggacagcgcctcactcccgttttttgaaacccgcgaccacagacgcatccccataaaaaccgcgcgcatccgcgtgtaccagtccgtgaattccctgggccggaacgccgccgcgcgcaatgttgtgcccggctccaaccaccatgtcgaaatcttcgccgtggagcaggaaaagggcggcgtgaagtgggaaggccgcatggtcaccaccatcgaggccatggcccgcctgcaccccaaaagcagaatccccgtggtaaaccgcgcgcacgagaacggaggcaaattcctgttctccctgtcgcccggcgacacagtgcgcgtgaccctggacggcgagcaaaagctgttacgattaagaaccatttcgaaaaacaatcagggacgattgagacttgatgccgtttgcatccgcgaggcaagaaagaaggcggaaattatgcaagacaaaaaatggataattttcccgaccttacacgcattggcggacatgcaatttcaaaaagtcaccgtaacgcctctgggcgaggtgtttccctgcaatgactgaccgggtgctggatatttccgaaaccgcggcgcgcctgcacgcgcgcggcagcctgctcgccatcgccagaatggacgcgcccgaaaaaccgccggtgcgcggcgcgcggcggcacgatccggatctgggcgaacccgccgaattcaccatcccgttcgccgagatcgccgcagtcgtggccgcgcacccgcaggtctctttctcgcgcgcagccgtggcaggcctggcgcacgcaggcggcattctggtggtttgcgacgacaagtttcagcccgcggccatgttcctgcccctcacaggacaccacctgcaatccgaacgcttccgcatccaggcccaggcgccaaaacccctgcaaaaacagatctggaaacagatcgtgtgcgccaaaatcacggcgcaggcgcgcgcgctcgaaagcgagtgcggcagcaaaggcaatctggcgcgcctgtgcgagcgcgtgaaatccggcgaccccgagaacatcgagggacaggccgcgcgaatctactggcgcaggattttccatgacgaggcgttcgtgcgcgacccggacggcgaaccgcccaacaacctgctcaactacggctacgccgtgctgcgcgccgtgaccgcgcgcgccatctgcgccgcgggcctgcacccggcgctgggcgtgcatcaccacaaccgctacgacccgttctgtctggcgtccgacctcatggaacccctgcgcccgcttgtggaccgcgccgtgtgcgccctggtccgcgagcgcggcctgaacattgaactggatcgggaaacccgcggcctcatgatcgccgcgctcacgcagaaacttgatttcaacggcgagcggcgctccgtgttcgacattctcaaccgcatggcggccagcctgttccaggctttcgagtccaacaagcccgccatcgcgctgccggatttttagcgcctgcgccgcttgtttacaacgcgagtcattccggccggagcgccggaatccaggggggcggggcgggatgcatgggttgttgaaaaagtccggcggccgtaaaaaacgggtacaggcacgcggaaaaccgccgcgttcccagtccccattttttactgcgttcgcgcctttcgagggagcgcaccggaggtaggggccgcccatgatgcgcagacccgtggcctcgggatacaaaaccatgtggctcttcgccatgttcgatctgcctgtggacacaaaggaagccaagcgcgaatatgtgcgcttccggtccatgcttctggacgaggggttcaccatgatgcagttttccgtgtactcgcgattctgcgcaagcgaggaactctcgaagaaatacataaagaaaatcaagtccgcgctcccgccccaaggcgaggtgcgaatcctctcaatcacggacaggcagttcgggaaaatgcaggttttctacggcaaaaaacgcgcggaaaccgaaaagcctcccgagcagatgatgcttttttagccaaaaaaattcgaaaaagcccccttttgagggggctttttcaacatacattgtacctgagcgacgattccccgcaaaccacagtttgttgctttggcgtttggcatttttaccaattgtacctgagcgacgattccccgcaaaccacagtcaaatctcccgtcacggtgccgccagccaaaattgtacctgagcgacgattccccgcaaaccacagttgttccgtgtcgatgcgcacggccttgagattgtacctgagcgacgattccccgcaaaccacagtatcgttccatctccccagattagattagatattgtacctgagcgacgattccccgcaaaccacagtgaaaaggtgagaggcttgaaaaggcttccaattgtacctgagcgacgattccccgcaaaccacagtgagcgcgcctttaggtaattattccacgcgattgtacctgagcgacgattccccgcaaaccacagttttggcgtagatcgccacaaatttagctataattgtacctgagcgacgattccccgcaaaccacagtcctgtgacgcatttttaagcgctgactgtaattgtacctgagcgacgattccccgcaaaccacagtatgcatgtcccaatacgggcaggcagggtgattgtacctgagcgacgattccccgcaaaccacagtcctgatcggctagatctgatccatgtttcaattgtacctgagcgacgattccccgcaaaccacagttcgttgttctccctatattaggatcgtttgattgtacctgagcgacgattccccgcaaaccacagtagatcaccgagcacgacgggttccggctggattgtacctgagcgacgattccccgcaaaccacagtacaatgtctgcgcgctcgtggtgatctatcattgtacctgagcgacgattccccgcaaaccacagtcgtcgagccgtactgcatagcttgcgtcttattgtacctgagcgacgattccccgcaaaccacagttaattaaaaatctagcgcgcggatccaattattgtacctgagcgacgattccccgcaaaccacagtctttcccaaccgtggccgttccggcatccgattgtacctgagcgacgattccccgcaaaccacagttgaacatcaagtcgtagtaccgggcgcggaattgtacctgagcgacgattccccgcaaaccacagtccgagcggtcagcataggcctgcgcggagattgtacctgagcgacgattccccgcaaaccacagtaacagcggtgagttggagctgttcatgtcgattgtacctgagcgacgattccccgcaaaccacagtaaggccgggatgcgatacgatgttgacccgattgtacctgagcgacgattccccgcaaaccacagtaccttcggaagttcgccttcgagatttcaaattgtacctgagcgacgattccccgcaaaccacagttatttcattaaccttgattgccatgtatggattgt

SEQ ID NO: 1899 - DNA, 6024 bp, synthetic construct
  source 1..6024: mol_type = other DNA
  misc_feature 1..6024: note = Synthetic
aatccaaatacaaatggatttcatcatacaaatatttcaaggaatatgttaagaattcaaatatttcatttgaacaaattaatagaaattttcttgaaggttataaagcatatttactaagcaagatttcaagaaattcggcaagcacttatttttctattctttctcaactttttgaaaaagcaaaaatcgacaaaatcattcagtacaatccaatgtcagatattaggggtataactcaatacggttctttaaaaacttttttaacaatggaagaattgggattattaatccatacttcaaatataggtccatcaggaaaagaatattttcctttggtatcaaaaaaagcatttgtattttcatgtttcactggactgaggtttcaggatgtcaggtcattaaaaggtgatcaaattcaaattgaaggtaaaaatcactatttatattttatttcacaaaaatctaataaggcagacagattaaagttacatccgatagcagtagagcaattatcgaatatcggtacaaccaaattggcatttcctgaattggtatcaaaagatataattaataaacatctaaaaaaatggagtgaaaaagcagggataaaaaagcatgtaacttttcatgtagccaaacatacatttgcaacaatgtcacttaatgctggagtagatatttacaccttaaaagaattgttacatcattccaatatccgtacgactgagatttatgctaaattattatctgaatcaaaagataaagcaatagatatgctaccaaagttttaatttttacaacagttcttaattaacttctttactgttgagtaagcaagtcctgtttcattaacaaggatttgactgattttaattttgcttaatcctgattctgataatgcagaaaatctttttcgaatataaggagtgataattttttctgatgtaaccttaggtatatatatgttcattccccctaataacaccataagctgtttagctaaatccataccacagatttcaccaacatactgaaatccatcaggtaaatccttaatggaaacatgttcaattaatttttcctctttaactcgcattgccttgtcgaataagtgtgaaacgacaattgcaaaatacgaatttctatttaaaggagcaaattaaagattcttttttatattttattttttttcgattttttttattaattttaatataaaaagaatattaaaataaaaaaactccgccgaagcggagatgtttttaaatcttacggcatatagccttattgtgataagattacaggttttgattttcttatcttaagcgaaaataataaatatttttaaaatacaaaaggaaaatttttatgtcaatcattttaggtttagatttaggaccaaattccattggttgggcactcatagatagtgagcaagagaaaatcatttcttctggagtcagaatattccaagaaggtgttaataatttgaataaaggaaaagaagaatcaaaaaatgcaacacgacgtacaaaaagagaaattagagttcaaaatagacgaagaagaattagaagacaaaaactaataccttttttaaaagaactaaatttaatgccaaatgataatgaaactgaatttttcaagattaacccttatgaaataaggaaaaaagctctttatagtcaattaagtaattttgaattaggcagggtattctttcatcttaatcaaagacgtggatttagaagtaacaggaaaactgaagtattagccgaaactgcaaaagatattgagaaagaaaaagaaacaggaaaagtgaaaacttcgataagtaatttagagaaagagattaaggacggtggcttcataacacttggtgaatatcttgcttcattaaatccacatgaaaaaagaatcagagatagatacactaatagggatatgtatttgaatgaattcgatattatttgggaaaaacagagcaaatattatcctgatattttaacccaagagaataaatcaattttacgtgaccaaatcatcttttatcaaagacctttgaaatctcaacgtaataaagttgggaaatgcctttttgaacctaatcatcgcagagcagcaaaaagcaatccaatctttcaggaattccgaatgctacagcaaataaattcgctaacaatatatggtgggaacagaatagaggagcatgagcaaaaacttacatttgaagaaagagagaaattaatcgaatatttgtcagaaaattattcaattaatttggataagccaaaaactttaatagaagtattaggattggataaaagaattaaatataggattaatctcgaatcatatggaaaggtggacggattaaaaacatattgctcaataaaaaaagcattaggaaaggaattattttcaaaatacaatgatttggaattgtataaaatgtgggatgtcctttatttcgcaactgatagagaatggctcaaaacccatgctataaaaaaatggcatttcaatgaagaaactgctgaaaaattttcgagaattaaccttgaagataaatttgggaatttgagtacaaaagcgatgagaaaaatgctcccttatttaagagaaggtaaattataccatgaagcagctgaattagcaggatataaacacagtttttgggataaagaagtggaaatcatggatttattaccggagcctgaacaagttgcaaaccctatagtaatgcaaactctacatcaagtaaaaaaagttgttaatgaattaatagaaacttataaaaaaccggatattataagggttgaacttggtagggacatgaaacaacctttgaaaaaacgtcttgaaattgaaaaaataaacaacgaaattcgcaaaaaaaacaatactataagagatattctgataaaagactttaatatcgaaagaccaacaagagatgatattattaaatataaactttgggaagaatgtaagttcacgtgtccatatacaggtagaagcattagtaaagaacaattattcgattcaaaagaatttgaagttgaacatattattccatatagtcattctttagataattcatttatgaatttaacattatgtgaaaaaagagcaaatgaagaaaaaggaaatatgacaccttacgagtatttcttaactaaaaacattcctgaatccgtaattaagcaaagagttaaacattttccacaacccaaagcaagaaaattttttgcaaaagaaatcgaaatagattttattaatagacaattaaacgatacaagatatgcctcaaaacttgcaaaagattatttaaaacatatcacacccgaagtcacatgttccacaggttcatcaacagctttattgaggtattattggggattgaattcaattttatcaaaatcaaaaggtgataacgaaaccgatgaaataaaaaatagagaagaccaccgccatcatgctattgatgcgatagtcatagcttgtacagaccattcaaaacttcaacggctttctacatatcatggaacagattcaacgaggtataaagatatgaaggaagatgagaagttgaagaagcacttcccttatccttggaaagatttccggaatgatattgtcaatacaatacaaaatataattgtttcccataggttaaatataagagtaagtggagctttgcatgaagagattttatacggtaagctaaaggatgcctttggtaacgaaagaatgagtgaaagtggttatcctgtttttgcagttcgaaaaacattgaaaagattaacacaagcagaaattcataaaatcattgaccccgaagttaaggcaacaatcattgaaagattagaagaattaggaatcgatgtcagtgaaaagaaattcaacatccccaaaaatgcttttgccgaaccaatatatcttaccgggaaaaagactggtataaaaactcaaatcaaatctgttagagttgaaagagttacaaatgctgcttttaatataagaggatataatctttgggttgaaccaggaaataatcatcatattattatttttagtgaaaacgggaaagtttgcggaaaagtcgtgacactatttgaagcttatcaaagacgctccaaaaaattaccaataattgataaaaatttaggtcccgataaagagttcttatattcacttcgtataaatgatttggttataatgggtgatattcccaacggattcgaaactttagaccaatcaacttatcacttaatttttgataaggtttatcgtgttcgatcgatagaccgaaataatataatagattttagaaaacattttatttcaattttagagactttagataaaaatggtaaaaaagtatatccaggtcggttatttgctgtaccaagtacattgaattgcaaaaaaattgtaattagtccgataggtattattgaattctcaaatgattaaaaaaataatttatattggttcaccctcttatttgagcgtgaaatatgagcaattactcatcaaaaacaatgacagtggtgaagttaattccataccaatcgaagatatgggctatcttgagttggatagccctcaaattacaataacaaatatttgcatgcaatcattacttgcaaagaatgtggcattagtatcctgcaatagttcacatataccagaaggaatttttctgcctttggcaggcaattcacttcaatccaagagaatgcaagctcaagtcaattgttcccttccaactaaaaagaatctttggaaacaattgattcaatacaaaattaaaaatcaacacaaacttttaaaccgaaatggcgaacatcccgagactttaaaaaaaatgattgataaagtaaaaagtggtgatgctgacaatatggaagcacgtgcatcgcaatactattggaaaaatttatttcctatcgctaaattcaaacgttcgagatttggtgattatccaaacaatttactcaattacggttatatggtgctaagggcaataactgcccgtgcggtcgtttcttctggtttacatccatcagtcggtttgcatcacaaaaaccagtacaatcctttttgcctggcagacgatgtgatggagccatttcgtccggctgttgaccaaatagttttgaaatactatttaaataatcctgcttgtgagactttaacaaaaaaggaaaaagcaataatgttgtatatccctcattgcgatattgaaacagaaaagaaaacgcaccctttgatgattgcagtacaaaaaatgtgttcgtctattgttgatatttttgaagatgaaaagaaggaactaccctatcccgaattatgtctgacagagtaagtgcatatcgtatcatgtgggtttttactcttttcgacttgcctgttcaaacaaaaaaagataggtatgaatattcgagatttaagaaatttctcgcaaaagaaggttttgagatgtttcaattttcagtttatattcgacactgtgccagttttgaatctgcagaagtttatgaaatgaagattgggaaaaatcttccagagaaagggacagttacaactttcacattaaccgacaaacaatttggaagaataaaacattattttggacaaagcagagctgacttaccagaaataccacaacaacttcagatgttttaaaaaaaacaccgaaatcaacaaagatttcggtgttattttgttttttaaaattacgcaataagctataaataacttattacaggcaacttagctaaagcgtaatttaaaagaactttacctgtaatcaaaccacaacattatcggtggtgggctttcaatcaatgaaaatttaaaagaactttacctgtaatcaaaccacaactatcctattgcaatattagttgtaggatggaaatttaaaagaactttacctgtaatcaaaccacaacggtatggcggttctggtaattggagtgataattttaaaaaaaatttacttttataaaa

SEQ ID NO: 1900 - DNA, 23246 bp, synthetic construct
  misc_feature 1..23246: note = Synthetic
  source 1..23246: mol_type = other DNA
gttgagtggcaccaggaatattaatcgctaaagtgccaagaggctgttccatatagttcatgagaaatatctttcgtggttgtctctgttcaaaaaagtttttaatgaaaagaatgtctttaatagatacataataagtacatcttttaaagaaggcaataataaatatgtaaataatatacattatttattgccaattattttttaaaaaacttcaagatgtttcatagcctaatttttgcagggttttgaaaatttaagatccccttaaagagggtttttacttcccgtgcgcaatttaaggctatttcgcatatagggcgtttctggtgcggttttcctctttaaagaatggccccttttataaggggagatttcttgccatgtcttggggggagtgttttagagggttaattttacaggaaaatatgagaaaggcttgatttttttttaaaaatttatcataccctttaaaggccttaagagggttttttacttcccttgcgcaatttaaggctatttcgcacatagggcgtttctggtgcagttttccttgtttgtaacccgtttataataaagagaacttcgttccggccctatggaagagtaaccagaaaaggacaataaaatggcaatgccagattttactttacgccaacttcttgaagctggtgtacattttggccatcacacccgtcgttggaaccctcgtatggcaccttacttgtttggtgtccgcaatcaggttcatattatcgatcttcagcaaaccgttccccttcttgaccgtgccttgcaggctattcgtagcagtgttgccggtggtgggcgtgtgttgtttgttggcaccaagcgtgcggcttcagaatatattgccgaggctgcacagcgttgtggccagtattatgtcaaccaccgctggttggggggaatgcttacaaactggaaaaccattacaggttccatcaagcgcctgcgccagattgaggaaaccctggagagcgatacccaagggttaaccaaaaaggaaattcttgatctaacccgtgaacgcgataaattgcagcgctctttagggggaattaaggatatgggcggtcttccagatattctctttattattgacacgaataaggaaaagctcgctgttagtgaagccaataagctggggattcctgttgtagccgtgttggacagcaactccgatccaacaggcatcacctatccgattcccggcaatgacgatgccattcgtgctattatgacctattgtgatttggttgctggctctgttctggatggattatcagcggagatgagtgctactggcagagatattggagcgatggaagaaattcctgtagagattatggcagaagaaaattccgccattgccgcttctactcaggagcagccttcagcagaataaggggtggtttttataggttgagcggttttttaaacgctcaacgataaaggataaaaacagcactctctagacgcgccctgataagagggcgcgcatttacttggaatttgggagaaatcgttatggcagaaattacagcagctttagtgaaagaactgcgggagcgttctggcgctggaatgatggattgcaaaaaggcattggctgaaactgcaggcaatattgaggaagcgattgactggttgcggaaaaaaggcttagctgctgcagctaaaaaatctggcagggtcgcagctgaaggcctcattggtattgcctcagcagcaaacagtgcggcgatggtagaagtgaatgctgaaacagatttcgtggccagaaatgaaacctttcagcagtttgtacaagacgttgcccatgtggctttaaaggctggggaagatgtagaagccattaaggccacaaaaatggccgatggtaaaacagttgaagaaacgctaacccagctgattgccaccattggcgagaatatgagtatccgccgtgcaagtgttttaaaggtttcttctggggtggtggcaagctatgttcactctgctcttaagtctggtttgggtcgtattggggtgttggtggctgttgaagcgccttcagagagcgaggctgtaacccttcttggccgtcaggttgggatgcatgtagcagcaacacggcctatctctcttgatacggatagtgttgatcaagaagcgattgagcgtgagcgcgccgttttggttgagcaggccaaggcttctggtaaacctgatgccattattgaaaaaatggtggatgggcgtatccgtaaattttacgaagaggtggtattgctggaacaagtctgggttcatgatggggaaagcaaagtcaaggatgttgtcaaaaaagctggggcgacccttaaaggctttacccgctttcagctgggggaaggcatagagaaggaagaaagcgactttgctgaggaagtggctaaggccgcagggcagtaaattccctgttggccattgggggaataggtaagggggcggtgcagtggaatggaaagcaccagccctaatcctatcggcttttccctatggggaaaatagcttagttgccaaggttcttacacgcgagcatggtgtgagcagtggcttggttaaagggggggcctcacgtcggcaatccgctttatggcaaccaggaaatatcgctatgttgcgctggtatgccaaactgcctgggcagttggggtcttttcaaggagagttacaagaggctcttgctgcaagggttatggtctcagggtttcatctttccttattaacggcaagttgtgccctggtcagccaagcctggccggaatatgatccgatgcccgttgtgtttgatagaacgttagagctggtggaaaaaattgccacttctgcccaaaaaggggagcaaggagaagttcagaggtattttttactctggggcaagctgctgctagatcagttgggatatgggctagacttggaaacttgtgctcttaccggtgaaaatacagggttgaagtgggtttccccccgtacggggcgggccgtaaccgatgaggccgcccagccctggaaaaagcatcttcttcccttgccgcaatgcctggttaagccatcggctccttttttgccagaggattggttgaaagggttacagttactgggctatttttttcagaaaaatatttttagcccgtgtaacaagcctcttccggcggcctatgtgcgtttgtatgaacaggcaaagtaggtgtggcaataaccccggtcctgtgggaaaaaaggctgagttattactcttttaagggtgaaattactattcttttctttcttggccttgtctatcaatgcgctctcagcaggagagggctgggtaagagacgtgggaggccgcattgagaagggcccttattgtgttgtggccccattatcttttatgaggtcggctcttacgtttattctgggtctttatttgggcctttatctaggccctcattctgggttttcattttggccttcattttggcgggttttgttaagaaaggccatgagggagatgttgtgattatccctgttatggtatagcttgcttacggttaagataggattactcaacgctaaaggcgatgtagaacggaaatgccaacaaaagacatgatgcgtttttgggttaagaaaatagctttatccggtatggtggtggttctgctggggtgtacagcagccaatcagagaagtggcgaggttgctgaagtccaaagccagtacgggcaggttgttagtatagcccagcagtaccgtgcaggagaatacggccaacctgaacccgattccttaccccggcttaaacgctatcaggctcaggcttatcaggatgttcttgcttttcatgatgaagtggtcaaaaccaagcagatctcacaggaaaagaaaattaaggctcttcgctctatttacgttatgaagtcctatctggcagctttgggggccacttctgcttacgagcaataaatccctctgcattaagtcttattctgtgacaggcccttctcttcatagaggggtattttctcttttgccgctgcgccataaccaataagtttttctcagggcctagtatcccatcaggccaagcgggcatggcctgaccctttggaccagaagtgctggagcgaccagatgggtcaaaagaaacagaatgatcagaaaacctggtgaaagcattcatctttatgacggtcagttgggatagaggctagacttggaattttgtgttcttaccgacgaaaatacagggtgaaggggcttcccccgtgcgggtcgggtcgggagaaactgacttgagaatgcgtggtaaaaacggggttttctttctcacggggtgagctgaatggtcctgggcccgaagcgccatgatgcggtgtggtttcctcccacggggtgagctatggataacaaatagtcttgggataacaaacagtcttgccaacatcctatcctggtttccccccgtacggggggagccgtgactgatgaggctgcccagtcatggaatatgaggggacttccattcaaaaatggttttttcactcacccctaacagcacatggctgttctcttcatcagatcgcctccttgtggggcagagaagagattttcaatcagtccattgtaaatcaggttagagggtttatcattgttgtaaaattaaagttgtaaaattaaaggggggtgttgcagtctttttagactaggccactcttatgggactatgcccctcttatcatggggggcggttatcaggagagggtgttggagaaaatcccctttaaacagggctaggatgttcatcgtctaaagagaatagataaaaaataaaaaagcatcctaacaggttgtagggcttagataaaaattcctacaaaatatcagaagaagtcattcagattgctaacatatcattcctcacaaaggggttttaagaaaaattgtcgatcatctgtcttttgtccaaaggatggaaagtctgtgctgttttttgaaatttctactttgtgaaatttccacgtgaggagaagaacattcaggttctcaccaaagagtccaacgctgattggagaatataggtggcggccagtttatcaacaagttcttctcggcgttggcgtgaaacatccacatcttcaataagcatgcgatttaccgcagccgagctcaatctttcatcccataggcaaaagggaagatgaacggtttgagccagtactgctgcccaatccttaacagcctgggctgcggggccaatagtgccatccatattgaggggaaaaccgattaccatgccaccaagggcttcctggctttgcaaggcttgaatatcttgggcaatctggctgatttttcctcgtttaatggttttatagggggaagccaacatcagggaaagatctgacaaagccaggcctattcgctttttcccagggtcaacccccaataggcgatgatgggcgggaagggtgtgatacagattttgcagggtcaatagcatcccaaatggctttatattacaggtaaaaaaatatatataaggaattatagagattattcacctgtaaagaaagcttgatcatgtcacttgattcaaccaccgttcttcgcatagcccggcttgcccgtattggggttaatgagactgtgctgcaaacccttcccaaggaactcaacagtattctccaatggatagaccagcttaacgaagtagatgttgagggggtagagccaatggtgggcacagagcaggcgggccttcgcctacgagaagataaggtaacggatggggaatgtagggaagaggtaatctcgaatgctcctgatcggatagatgctttttacacagttccaaaggtagttgaataatgctgacagatttaacgttggttgaagcccgtaaggggctggctgaaaagaaattttcttcagcagaacttacaaaggcttatcttgatgccatagaagctcataaccctcgtcttaatgcctatattacggtaacggcggatcaagccctggagcaggctgtaaaggccgatcagcagatcgccaaaggggagggaaaggctttatcgggtattcctctgggaataaaagaccttttctgcacaaaaggcgtgttaacgactgcagcaagccgtattctggaaaattttgtgcccccctatgaaagtactgttactgcgcatcttctgcgagatggtgccgtgtttttgggcaaaaccaaccttgatgaatttgccatgggttcggctaatattacttcagcctttggagcggtagaaaacccctggaagcgtaaaggggatgaagcctttcttgttccgggtggatcatcaggaggatcagcagcagcggttgccgcgcgtatggcgttgggggctacaggaaccgatactgggggttctatccgtcagccggcttctttttgtggtattacaggggtaaaacccacctatgggcggtgtagccggtgggggaccattgcttttgccagctcacttgatcaagctggtcccatggccagaaccattgcggattgtgcggttatgcttggctccatggcgggttttgatcccaaggatagtacttcggttaaccgagaggtgcccgattatcttgccgcctgtggtaaaagtctgaaagggcttaaagtggggatcccggctgaatatcaaattgcagggatgtcagaggaaattctgggcatctggcaaaagggcaaggaatggttgaaggaggcagggtgtgagcttgtggatgtttcgcttcctcataccaaatacggcttggcaacatattatattgtggcccctgctgaatgttcctctaacctggcccgctatgatggggtaagattcggcaggcgggttgaggctacaacactggacgaaatgtatgagcgcacgcgggcagaaggctttggagatgaggttaagcgccggattttgataggaacctatgtgctgtctgctgggtattacgatgcttactaccttaaggcccagaagatccgtaccttaatccgaaatgattttataaaagcttttgaacaggtcgatgtgctgttaacccccacagcccctagtgccgcctttgccaaaggtgaaaaaatggaagaccctgttcagatgtatctgaacgatatttttacagtgccggcttctatggccggtgtgccagccctttcccttcctgttgggctttctcagacaggtttgcctttgggactgcaacttattgggcgccattttgatgaagaaacaatgtttagcgtgggatatggtttagaaaaagctgccgcctttaaggctttaccagcgatttatgcaggggtaaaatcatgagttacgttattgaagggcgtacaggcccatgggaactggtggtaggccttgaggttcatgcccaggtgattagtcaggccaagctattttctggtgcttcagccacttacggagcagaacccaatacccatgtgagcttagtggatgcaggctttcctggtatgcttcccgttctgaatgcagaatgtgtagcccaggctgtgcgtacaggccttggtttgaaggctgaaattaacctgtttagccgttttgaccgtaaaaattatttttatgccgatcttcccacgggttaccagatcagccagtttgcccatcccatagtgggtaaaggggctgtagagattgagctagaggacggaacaacccgcgttattggtattacccgccttcatctagaacaagatgccggtaaatcgcttcatgatcaagacccagtacgctcttttatcgatctgaaccggtcaggggtggccttgatggaaattgtcagcgagcctgatatccgcatgccagaagaggcaggggcttatttgcgcaaattgcggagtattctgcgttatctcggaacgtgtgatggcaatatggaggaaggctccatgcgggcagatgtgaatgtttctgttcgtaaagccggggaggaatttagaacacgctgtgagattaaaaacctcaattctgttcggtatgttatgcaggccatagaagtagaggcccagcgtcaggtagaaatatgggagaatggggggactgttgaacaggaaacccgcctgtttgatcctacccgtggggaaactcgctcgcttcgttctaaggaagatgcccacgattatcgttatttccctgatcctgaccttttgcccctggtgattgagcaagcatgggtggatcagctcaagtcctccttagcggagcttcccgacgataaaagggttcgtttcgaacaggaatatggccttcctcattatgatgcctcagtgttggtggcagaaaaggcaattgccgattactttgaaaaagtggccaaagggcggaatggtcgtctggcagccaactgggttacaggggagttatttgccttgttgaaccgcacaggaaaagatattcacagctcccctgtgagtgcagaagctttaggcgctatgctggatttaatggccgataacaccattaacggcaagattgccaaagacgtgtttgaggaaatggcccaaacgggggaaatgcctgccagtattgtcgagcgtaaaggactaaaacaggttaccgatattggggagatcgaagggattgttgaaaaaatattggcagaaaatgccgataaggttgagcaatataagagtgggaaagacaagttatttgggttttttgtgggccaggtcatgaaggcaatggctggaaaggccaaccctgcgattgtgaatgaagtgatagcaaagaaactaagagcataattttttcaaaaagcacaaagtggttattgactatatgatatttcccacctagaaactaaagggcaaacgccgtgttacacctgcaaagcggaggggtggccgagaggctgaaggcggcggtttgctaaaccgttatacgtggtaacacgtatcgtgggttcgaatcccatcccctccgccaattacctttcataagatattgatttatataaataatttatagttatttctttataacccatcatagaacccatcttaagttttgagatggcctgaataatgtagaattattcagagacaatgataagaaatatttcaaatattgctcgtcagagaatttcaataatattggtttttaatagggaggaattacaagtcttctgcatttttgaagattagggagatctattttaaattaattgagtatgtttacgtgttaagcttgtttgtcatatttttcaaaatatttacatatctggttatttctttatgtaaataagcaaagaaattatatttcgtcctccctaaaaatcagtttgtattttactttgtcttttcttcatagcttcttcttgttgttaagataatctccaacttcttgctaaagattcctccaaataacgtattgtctcatgataaacatctgtcgctcgttcctacaacaaatcttctatctgacggtaactcagagggtaatgaatataatacaaatacatcaccacttattgtattatctcaggtgatttttgaaatattagaaagaatctttaatttttttctttctaacatcagatcatatccacagcataaagttattctgacaaaactgggtgttagccgttatcctgaatgttagaagtgagaactctcattaccatttctgcaacgtgaaaatgcactacaacacctcagctatatgagatgactagagaaatttatgagtatcaggattagtttggcaagactgattgtgatatctgccagttaataaaatcccccctacccaagtctatgaattaaaattcttagacttgggtaggaggtaattcttcgtgaaaaaacacttaccgtggcttcctcacagttctctgattagagtagatatcatatattgtttgttcaatcaatagttttactttatcgtttcattagataaaggaatttaccatgcaaattttagaaaatatcacattaggatttgatttaggaacttccagcatcggctgggctattttaaaaacaaatcaagataaaactgttaatgaaattcttgatgccggcgtttggctttttaacgcgccagaaacggatgataaagaaagacgtattactaatcaaattagaagagaaaagcgactggctagaagaactgtgcgtcgtaaaagacagcgtatgaatgccattcgagaactattgtaccaagctcagcttatttcaacaaatagtaaagaaataatttctacattacaaaaacaaaaaaaaacaaacccctggttactacgcattcaaggtcttgaacggcaattgacgcatgaagagtttgccataactttatatcatatttccaaacatagaggatttaaatccaaccgtaaaggaggtgataaagcaaacgttggggaggataagaaattattgggcgctatggaaaaattagaaaatacacttgagaaaagttttgcatatactcttgctcatggtcttgtaaaaaatccctcttcttccatacgtttacgcaatattgctgaagagtatgggaaaacaccaaaaagaatatggcttgaagatgaaatacatgaaatttttaccaagcaaagagaatatcagccaaatctggcaacttcagaattggaagaaaattatataaaaattgctttctctcagcgagaattacaagattctattgatttaatcggtgcttgtccttttgaacaaggcgaaaaaagagcttcaaaacagtcaccttcttttgaacggtttcgttttttacaatcgttggcccaccttaaaatttattccccaaatcaatcgcaaaaatcgcgcaagcttacaagtgatgaaattgacaaattagatgcacagtttggagtgcgagcaagttttacttataaaaagtttcgagaaatattagatatgccagaggaagattattttgaaggcataagtcgtaaaaacagtgcgggcaaggatgaagaaagctctgatattattacaaaacggtctgcttcagcgtctggcacatcaatatttaaaaaaattctaggcaaactttatgatactgtttcagtagaagagcttgataaagctgcctctattatcagtttttatgaaagtgcttccaaccttgaaaaggcattggaaagtctagctgtttcaacagaagtcaaaggtattttaatacaaagtgtaagggagaataaattttctaaatttaaaggagctgcccatatttctgccaaggcttgccgtgcacttattccttttttaaaacagggaatggtttattcagaagcttgtgaagccgcaggatacgatcatacagccccagacatgtcacccttgattcagttaaaaaaagaaacaaaaaatttatcaacttcccttattcgtagaaaaatttctgaaaaactgactgataaagacagtcatatcataaattctccagttgcatgtaaagctgttatcgaaggcattaaacaatttgttgctatcgttaataaccattcttcactgaatggatgcttgccaggaaaggttcatgtcgaactggccagacaattaggcaaaagcattactgaacgaaataagttagataatgctatcaaagatggaacagctcgaaaacaaaaagaagaagaggagtttcttgaattatttcctgaatatacaccaagtaaaaacgcattgcttctttatgctttggctaaagaacaggaatttaaatgtctctatacaggtgaacctattaatccacgcttactttttgatggaatctcatatcaagtggatcacattttgccatggagccggtttggcgatgatagttatcaaaatttgaccctatgtacagctaacgctaatcaagcaaagaaaaataacacaccgtatgaatggatgacttctggtgaaaaaaatgtgcccgacttcagttattattctgcacgcgttaacttatgttctcaacttagtcgaaaaaagaaacgcaattatttgttgaagaacgcccaagaggtagaagaaacattcagaaaccgtaacttgaacgacacccaatgggccagcaaagtttttttacaatgtctagatttattttatcctgatgaaaattcagttaaaacatcaagaagaatctacgcacgcccaggccaattaacttcaaaaatacgtcaggcatgggacgctgaattatataaaaaagatgagaaagggagacgcttaacagatgatcgtcatcatgctgtggatgccatcgttgttggatgcatttcagaatctttattaaatcgttttacacaagaaaacaaacaagctactgatatgggattaaaaaggccatttaaaactttctttcagccttttgataattttcgacagcaacttgcaaattcatataataaaactgttgtcgctcgtgctgaaatagttaaagtaagcggtcaaaagcatttagataccattcgtgcttttgataagacatcaggcgttgtgtttaaacgattaagcccaactgatttattaataagtataaaggaacaatctgaagttttgggtttggaagaagctctaaaacaaaaaattaaggatcctgaacgcaataaagctattattcaagacttaataaaatggcaggtagataattgtcctaaagataatttacccaaaggaccaaacggtgaccctattcgaaaaataaaagttacaactaaagataaaatagaagtaattgttcgtagtggcagtgctgcacgtggggatatggctcgcgttgatgtttattcaaaagcgagtaaaaaaggaaagaaacaatactatatagtgcccatttacccacatcaaatcaatgaggatcaaccaccccataaagccattacagctcataaacctgaaagtgaatggcctgtcatggataccagttatcatttcgaatttagtctgcacagaagaagctatattaaggtcacaacttctaaaaacgaagtcattgaaggttattatgtagggattcatagattaacaggatcaattaccatttctgatcataaaagttcgggcagcaagcaaactataggctctcgcaatttacttaagattgaaaaatatcagatagatcgattagggaaatatcatttcattaagcaggaaaagcaattatggcatggcaaaatctacacatcagccaaccagcaagaataagcctgaaacataatcagctttgcattgatcaagaacacgagcaaacaacccttcctttggaagatttatgctgtattattttagatacaccacaaattacccttacaggggcggttttatctgctttggctggtgcagggattgttgttatacaatctaataaaaaacatcatcccactatgatttgtctaccctttcatagccattataaacaggcagaaattgcgcatttacagatcaagtgttctgctgctttaaaaaagcgtctctggcaacaaattgttcaatttaaaattgacaaccaaaacagacaccttgcctgcattgcctctccactggcgacgttaagcagaatgacaaaaatgatacgctctggcgatccaaacaatctcgaggctcaagctgctcgtatttactggtctgctctttttaaaaactatcgccggcacgatgagaatgatatccgcaatgccatgctcaattatggttatgccattatcagggcagctttgtcacgatccattgtagcagcaggattattacctgcattaggcctgcatcatgcctctatttccaatggatttaatctttctgacgatttgatagaacctttacgaccagttgttgattcctgtgtttttactattgttaaaaatgcaaaccatacagaacttacattggaaatacggcgcttactggttggtgttatgcaatattccgtaaaaatgggagaaaatattatgggactcttacctgccatagagaaaatggttttctctttggtgcaagctatttctgataatgatcccaaaaaattggaattgcctgtttttatgccttacgaaattgttcctgatgaaatatgaagaggcaaggtttatgtggcttttttgtttttttgacttacccgtaaaaacaaaattacaaagaaaaatggccacaagttttcgaaaccatttaataaatgacggtttcatcatgatccagttttcagtttatgctcgtgtatgtaaaggtgaggatggaaaccaaaaacatgttgatcgcattcgaaaatttttaccaagcgaaggatcaatccgatgtctatcaatcaccgatcgtcaatatggtcgtatgaagattttgcttggattagccaaaaaaaacgagaaaaaaagaggaaaccaactgatattattataatttttttaaaagaaaaatcaaaaaaaacaagaaatatcagttggttacattaggcctaccttagcatatagagaactgtaaggaaaccacggctctctaggtcagggctgttccaaacccatacaccttagcatatagagaactgtaaggaaaccacggcctcttgcaataaatcatcgacagcattccaaccttagcatatagagaactgtaaggaaaccacggcgtattctttaatttgcttaaatgtcataaaaccttagcatatagagaactgtaaggaaaccacggcttctggctccccataggtaaggtaatattaaccttagcatatagagaactgtaaggaaaccacggcaacttcgggaatatgcaccagctcttaaaaaccttagcatatagagaactgtaaggaaaccacggctgctcgtaggtgttccattcttttgtgtttaccttagcatatagagaactgtaaggaaaccacggcttaaatggccgtttttctgaaatacagaccaccttagcatatagagaactgtaaggaaaccacggccctataatctgctcgtatttgtccagaacaaccttagcatatagagaactgtaaggaaaccacggcattcattgagtgaacctttctaggtactattaccttagcatatagagaactgtaaggaaaccacggcctatttctgtgcaatagcctctttcggctcaccttagcatatagagaactgtaaggaaaccacggcccgataaactggttgcaattaaccgtgtcgaccttagcatatagagaactgtaaggaaaccacggcatctacgttttacggtgctcgctattctcaaccttagcatatagagaactgtaaggaaaccacggcttgagagatggcctcggtttcgatcttgtaaaccttagcatatagagaactgtaaggaaaccacggcgttttacctaaagcttcattccactcattaaccttagcatatagagaactgtaaggaaaccacggctcttcccaaaaatcacgggggataggggttaaaccttagcatatagagaactgtaaggaaaccacggcccattttcctgtaactgttcttttacatttaccttagcatatagagaactgtaaggaaaccacggctctagacctaatctgtagctcaaatccagcaccttagcatatagagaactgtaaggaaaccacggcttaaatattttaaaagtggcattaagtcgaaaccttagcatatagagaactgtaaggaaaccacggcttgacaagtgcaagtattgcaacaactataaaccttagcatatagagaactgtaaggaaaccacggctgaaatgtttgtaggggtaggggcctcccgaccttagcatatagagaactgtaaggaaaccacggcccaacaattaatccattagaagtatattggaccttagcatatagagaactgtaaggaaaccacggctatattagaaatattgttgagatgacttcaaccttagcatatagagaactgtaaggaaaccacggccatccatcgatacaaaagaaagatcgatataccttagcatatagagaactgtaaggaaaccacggcatcttctcttctcgcaataaacgggatactaccttagcatatagagaactgtaaggaaaccacggctcttctacttttatgcattcccgtgtagctaccttagcatatagagaactgtaaggaaaccacggcaagctatttctacacgagaagtttggttaaaccttagcatatagagaactgtaaggaaacgagttacctgcttatcggttatctatttttacagaggcttgacggtggtatataccagagaaggtgacattcataccaccacatgcaagattgctttcagcaagaagatatggaccctttttaatcattttaattttacaattattagtattttcttctgtataaggaagcgtttttccgttcatgctattcataacaaaagctagtatgttattgttaagtttaattgttccgctaatctctccggtgttaataacatcattcattccttgccattcagcctcacctgtaattgtgtaagtattttctgaggatttaatagtaattatactgctattgcttccacgatttgttttccatattccattccaatcattgtttgtagcttcctcagcaggtattaactttaaagaatccttggaaagccaaccttgaaacaggtttccttttgcagatacataagaagcacaaacaaatttactattcttttgctctgtaagaagaactgtatctccagataccaaataagattttttttgacattgaacattactgcttgggcatttttgtatttcattttcatcagcaatgaagtgtgtcttagattccaaaacaatagccgttgatatgttatcaaggttagcaacagtattgttaccacagctttgagcttttgcgggaacagctattagaactaaaaaaaatagcgaatataatttgaaatattgtttcataaaatatcctaaaagtaagaaaaaagttatgtttgttgaattaacaataagcttattatatgcaggaaagatcttctacatataataagctacaggtttgtctgttatgtttttatacagatctgtttattaaatcagttaagatttatatttgtttcaagatatctggtatcgtgtttactcttatatacagctcttgatggtttattttttaatattacagacccttacgcaattctggtctgattattatctttgattataaaccaaggcagaagtcatatcaccctgaccacatacagaaccgttttcattataggttgtattattggctggggtataacacccaaggtaggacccagtctttccataggcgctttttttaccattactttcagttcttatgtagccaatattacttccagatgcatcacggagatgagttgtagacattttaaatccttttgacaataacgaattgcttatacataataagcaattaacgtattttgcttattaataataagctaatctgtcaagtgcttaaggctattattaaaggaattgaatatctgttattgttaataacccattgatttgttgtggatttagtggtggtgacactgagtatggctaacaatgctcagtctggtgtggaggggttttgtttacgattgcttagcgctgaattgcgcatcagttttaagcaaaacgctttatcttcgggagaaaggctacgccaaagggttagtaacgtcagttcatcgctttcgtaaacaaattgcccctgataggggccgtctttgttaaagagagagtctgttgtgatgccaaagaaggtacagatgtcgaccatcttgtccatggttggccgtgttgttcccaattcccagtgagcaacggcagcaggcgatactttcattgcttttgccagatctctttggctaagcttaagtcgcatgcgttcagttcgtatgatgtctttgatgtccatatatcctatatgacaaagaacaccttaaggaacacttagtaatttaaacgacaaatatgcttattctttataagcaaatttgtctggtgacgtttgtaaacgaattacaagcttaataacgatcagttcaagggagtatgataatgattgattttggatctttgttgcaggaaaaacagatagaaaatttatactctgttagaaatgattaattaatactaatattaatcacaaaataaatttcaatatgttggctaattatgcgattttttgaagatggtccagatattccagatgaactgatacagcagcagaaggatgggaggttaatttttctttgtggtgcaggagtgtcaatgcctgcaggtcttcctgactttaaaaaactggtgaagtttatttataaagatttaggagaacacattaatagctctctaaaccgtttagaaaaaacatcttttaataacaatgaatttgatagaactctcttttatctaaagcaacggttagcaggggctaatcaaaaaattgacaatcacattcactatacaaagctgattatagaaagtattgaaaagaattttaaagctaaacttagaaaaaacagaaatttgcgcaatcatgaggttcttctttccctgtcagaagacagttctggagaatgtaggattgttacaacgaattttgatacactctttgaagaagctaaagatggtaaaatagagagtcatgcgggtgcaggaatgcctttgcctggttcacctaaatttaaaggggcaatgcatcttcatggtaggttgaaagatgagagaaatgagctcaaggatacagagcttgtgctattcagttctgattttggagaagcctacgcccgtgctggttgggcaacgcgttttgtatatgaactgatgcaagcctatactgtggtaattatcgggtatagcctgaatgatccacctgtaaggtacttacttgaagccttggctattgatagccagagatttcctttcaagaacaaagtttattttattacttcctctaaaggcggagagagtaatgatgattacaaacggcttgaaagcatgaatattactccaattatttttgatggttgggatttagcatataaaacgctggaagagtggtcttgttacaaaaacaatcctgaaaactgggttaaaaaaaaattagaagaagtaactaaagataaaattccaaactatgatgataacaaaaggaaagaatgggttaagcagattttttctcacaaggaaatcgaaagattactacccagtcatttattttctaaggaatggattgattatcttttttataatgtctttattcccgattactataacataaatattgtaccgtttattatagaaaacagaaataaccctctagttattgatataataaaaaaaattggtttgataaaactcgataaatttctgtctaagtatggtggcgctgatatcttatccgtaatagataatttatttagattaatttataataataatcttgaagaaactcataaaaaagattgggagattattttttataaatatagcttatataaaaaacttcttatacgagacaaatatgaactggttaaaagaataaagaccggtttttactcatgtattgatgttgaacaggtctcattgtggttatatattactgcaatacaattgagtgacgtattagatatcagtaataccataccccttaatcaaatagagatactttctgacacaagcgcaacagaagatcttttctaccagctggatgcacgtttcagagagtatgtatggtatggaaaattaacagataaaacagagatttttctgcattttattaacgagaaagatatagatagccaaaactgtttatattggatcctcataggatgttggaaacagtttgctgttcaaagtcctgaaaaagcaaaacacgatgttcagaagtggctattagaagatgatagattgtattttttagcagcaactcacgctatttcagaaagcaataatctttttacagccaaagaggtttactcagcaattgagcatcgaaaagatgatttctggatttgctcaagatacaaattaatagatgtctttaagaagttctggagtgagttttctgctaaccagaaagatctaataattcatcgcatttgtggttgggaagatgaaaaagattcatactggttcttacgaggttttaagggtcatggtttggaaatgtcgcctgaagggatggagaaatttaaagaaattgaaaacaataatctaggttgggctaaagaggctatgccccaaaattcaggctctatctctgtaaaggtgctgccaacacgaatagcaggtaaaaataaaacagtgttagaatttgttagcactgtcagtgatttaataaaacgcgttgatggaatcaatgacgatgagagatataacaaattaattgatgaagctttagactattttcaggttatcaacgaaagaaaagttataaatggtacagtttttagtctttctctggattttttaaaaaaactgttaaatatctcctgcagaaatgaagaaaaattattgtgcttttttcaaaatataatcgatataaagaaaatgccacttgtgtttcgttgggatgaaggcaagagttttattgagctatggaattctctttccgaaattgtcttcaagaatagggacagatcattagaaaatttaacaataaatactgccttgaatacgttagagggtatgcttgtacaactgctcttttccgtcttgagcacagaacagaaaaagcaattaaatcagggaaagctggcgtgggataaacttaaggatctttttttgaagtgtgttggctttataaaaaagggaagcaacaactcaaaatcaacattatatattttgggtaaagatatgggttacatttattcctttgatcctgtctggtatcaagaaaatattgatgggttgtttttatcttctgagtattatccttaccttcttagggcttatttgacacattatagtataggatctagtgattttttcagcttgttatggggtaggatagatcatgatgtgaatagccttgattttcttgagcataatgaaaaagacaaatatctgtggaaattgctacaggttttaattttttactatgagaaaaaaaatttcaatctggacaatgttttccaaaaagaaattgagggtaaggttcgtgttcttcttaaagccagtgaggtatatagaaaaacatttataagatttatcaataatatgtctgttgttccatcattttcaaatgtcgaacaaagctggaatgatttctataagcccctgttctcattatggcccaaggatgataaatttcaggatggtgtatcatcaggttgcatattaaagattatccttttatcaaggaaaaaatttcttgatgtttacaataccttgagaggtttactgagacctttgcttattttgaatatatatctttctacagttgaggctgagactttcgaatatgcaaaaaaacattatggaaaagaattattggatatttttaatgtagtatatgagaagggggcaatttctatttctcttgatttaaataaattgcttgatgatctgattaaatacaatcccttgttagaggatgagacagattataaacgtttacggaagattataaacggttagaggaaagtattgatagaaaggttacgatatgtaaacttaccgcttaattaccaattaatctgatattggattaaggagatagttgagagatactataaaaataattttcttaattgatgatttaaatatattttttggtaaactgctgctgtttattctactgcagttaactgaaacaatttttataatatttagatttttaatggaatccaacatcctgtttgaacctggtaataaattcttcttctttatctccgcactcaacaccgtcaatattgcgtaaaacattaaaatctgtatcattgagatctgatactacaaagcagtaattggatcttttcgcaagtatacggttaatccaatgaatattcattttaacaattgctgctggatatttcttatcctgaaacattcccattccactattaatagttgaaaatgttatatcatcaattttccactgttctggttgttgcatttcattattggtataatttgaaattataggttgttgtgtacccagcaatatgtccaaatgagaaggaaacgatcgtgtttctggacttgaaaagaaacccttcagatatttctgtaactcattaacagcagagttttcatcaattgaggtggtgggtgatactaatcccaaatatagaaatacaagtatgattggtgtgcagattactagttctataaggctttttttgagagatgggttattactcatggttgagtccagttctaaatgtatgtccagccaataatgcttataataaataagcattattaaaaatataagttttatttctgttagtttatgtctaaaattaaagaaaattagattatttatacgatttaatggagttttagcatttatatattgcttattattaattagcaatatataaaattcctgatatttaaaaagaggaattatcgtatgaaaatacaaaaactccagataggaaaaatagcaggtattgttatcactcttggaataataatggctgagaatatttcacagacgtatgctgctgactcatatatggctcaagcactttgttttaatggaaaaaatctacttcttggacaaaccttgatgttaaggcaaggcggtattcctatagctgaagcaaaaaaacctatttataatatgattaatgccaaccctgattatcagaattttatgatagaatcagtaaactttctctataaaaatccagatgaccttaagaaaagcctacttaatgggaaatggactgaattgtgtattcattacgtacagggctattaatcctggtttgggactgtgtttatagctatcagatcaatgattctatcattattgttagtgtataaaatatagaaccatccacgcgatggcaattttatatcttggttaaaagagtaataaaatatcggaagaaaaattatattatagatatatacactttagtaaatcagcttccattacatatggcatttgatataatggaagcttgaaaatggtatgattgattgtttattctattatcttataagtcattttatt

SEQ ID NO: 1901 - DNA, 23216 bp, synthetic construct
  misc_feature 1..23216: note = Synthetic
  source 1..23216: mol_type = other DNA
cgcatcgccgcggtcggcgccactgccgacatccgcaggctggccggcaagacgacgcaactgatcgacctgcacggccgcaccgtcattcccggcttcaacgacgcccacgcgcacctcggcacctatgcggccgatacggtcttcgtcgacctgggcggcaatttcgatccggcgtggccggacctgaaggccgcgatcgtcaaggccgccgccggtgccccgaagggcgcgctgatcagcgcgaccatcggcacgaccatcctgtatgacccggccatcgaccgggcgtcgctcgatgccgccgtgcccgaccatgcggtcaatctgacgaccttcgacggtcacgcctcgatcctcaacagcgcggccctgacggcactcggcctgaccgacgcgacgcccgatccggccggtggccgctacgaacgcgacgcggccggacacctgaccgggaccctgcgcgaatacgccgccacggtcgatgcgcctcgcctgcagggggccagggtgtccgacgccgatgccttgaaggcactgaaggaccagatcgatgccgcggcgtccttcggcatcaccaccatccaggacatgccgaccgacgcctcggccgcgcgcaccgtggcgctgctggcgcgcatgccgacgccgctgcgcgtgcgggtgacgcgcatgaaccggacgacggcgcaggggcgggacacggacgaggggctcgaagtcccggcgcatccggcgcccctggtcaccgccaccggcaccaagtgggtcttggatggcgtcatcttcgaaggcagcctgacgccgcgggcgcagggcaatgcgctgtcggccaaggcgggcggcccttacagcttcagcggcctgccggccctgttcccgccgtcggaggtcgaggccatgctgcgcgaggccctgcacgacgaccgccagcttcaggtccacgtcttcggcacgccggcggcgaaggagatgctcgacgccatggacgccaccggagggccgaaggtgtgggcgtcgcgccgcgtgcgtttcgagcacggcgacggcctgacgccggacctgatcaaacgcgccagggcgttgggcgtcgtggtgtcgcagcagggcgaccacatggccatcgtcgccatcgagccgaacctgggcgaggcctttcaggcccggctcaaggccgatggcgcccagccgctgaagtcgctgctggcggccggggtgccgctggccctgggatctgatgggccgctcaatccctatatgggcctgatgttcgccaccacccatcccgaccggccggaggaggcgctcacgcgcgaacaggccgtgaccgcctacacgctggggtcggcctatgccgagttcgccgaaaaggacaagggcagcctggcgcccggcaagctggccgacatcgccgtcttgtcgcaggacatcttcaccgtggcgccgcccgatctgatgaacaccaaggcgatgctgacgttggtcggcggcaaggtcgtctatcgtgatgggacgttctgattttcgccgttttggggatgccacggccgccgatcgcgcctatagtgacggccgtcgcattccgcttgggcagggtacagttatggcgagcgtttttcgcgccatccagaacagggtgaaccggagtcatgtcgcgcggtatggcgtggcgctggtcctggtcgccgtcgcctgggcattgcggcggctgatcgggaccgccattcccggcgcgccgtttatcaccttcctgccggcgatcatcgcctgtgcctatctgctgggccgcggtccggccatcgcctgcaccctgctgtcggccgtcgtggcgtggctggccttcatccgtccggcgccgtcgatgacggcgttgtggccctcggcctggcagaccacggcttatatcgccgtcggcgtcgtcatcgtcctgttgctggatcgtctcaagcgcgccgtcatccggctgcaggacgccgaggccgagcgcgaggccctgctgcacgccatggaagaccgcgtgaatgagcgcacgaaggcgctgctggcggcgaacgtccagttgcagcacgaggtggttgagcgggcgaaggccgaggaagccatcgcgcaatatgcccggctggaggccatgggccagttggtcggcggggtttcccacgatttcaacaacttcctgcacatcatcgtcggcaatctcgacatggcgcgacggcgcggccagaggccgggtccggctatgctggtccatgtcgatacggcgctggacgcggcgcgcaaggcgaccctcctgacccagcgcttgctggccttcgcccgcaagcagacgctggagcccggtatcgtcgacatcaacggactgatcgccggcatgaccgaccttttgggccacgcggcgggcagccgtgtcgacctgcggctggacctggcaacgggcttgccgccggcctgggtcgacgccgtgcagctggaaagcgccgtgctgaacctggcggccaatgcccgcgacgccatgccggacggcgggcggctgaccgtgacgacgcgcgcggcggccgatggggcggcgatcgagctggccgtggccgataccggctcaggcatgccgccggccattgccgcgcgcgccttcgagccgttcttcaccaccaaggcgccgggccatggtacgggcctggggctcagccagattcacggcttcatgcagcagtccggcggcgacgtccgactcgagtcgggcgaagggcaggggacgtgcgtaacgctgtgcctgccgcttgtcccggccgccgccgtcgctccgcaggcgcaggcggtcggggccgacgccggttagctttccgaacgatcggaatcttatgtccctggtcaagatcaggcgcgacagcttacgaggcacggcatagaatcgatcacgaaaacctgccttaaccccgccacagattcggcgtacaggcgaaacatgaacaacgaatccggccctgaatccgtcaatgcgcgctttttcgccggctttgggctggcggtggccttttccctggtgatctggggtggggctggtctcggcgtggccacggcccatccgcatttcgcgcgcgccgcctatcacaaggtcaagcccgtcctgcatcaggcgcgcctgttctcggaagtggccatcgaccggcttttcagctaggcgcacgttcacgccctttctttgcgcacgggcaaccaatggtggaaaagcgtgataaaatgacatagtgtcggctttcctgcacgacccggtgggccagcttgcagagcctgttgctgaaaccgctacgcgtagggagttcagtcgatgagtcacacgtcaaaatcgaccttttcggtcatcttcgggcaactcgaactgttgcaggacatggcgatcagggccggcgacacggatctggcggcggacctgaacgtcgccctgaccaaggccctgttccgccatttcgacggcatgattggcatcccgccaggacgatccgatacgaccgcggcgtaggctggagcgcaattcgataaagtggacaccacttttcggataaattgcgcgaccgagcaaagacttagatcgttatgatgtttctacttaacattataacgatctagatatcgtcgagcggcaatgcgtcgccgcagaccgccctcagcttggcgtgcagcgtggcaatcaggaacggcttggtgatcatatcgtccatgccggcgatccggccgagatggcggatgccgtcgatggtgtgtccggtcatgccgatgatcgggacgggcgttgtgtcctcggcggcccgaatggccttggtcgcgtccagcccgtccatctcgggcatttcgatatccatcagaatgacggcgtaacggcccggcgtggccatttccgaggcgatccggccattgccggcgatgtcggcagccagccccatgatttccagcatcgcctcgaccatgaaggacatgttggcgtcgtcatcgacgatgagcgcgcgagccggcgaccgcggcggggggctgaccatgggacactttcagcaagacggctgtttcgcgctatgcgggaatatcagataccatatcgcccataagaaaacagcccgaatccattctgtgcggcctgtggtcaggcggccaggtcccagaagtcgcggcgatggcggaaattggcgtggagccgggcgagataggccgggtgcgtttcgacggcgccgaaatcctcgacccgggcggacaactgctcggcctcggacaggtggtcggcggcgcgcgcatagtcgcgggtgcgcgaattcatcaggatggcgttgatcaggcgccgcagcagaaccacagccgccagcggataacgcgggcccagcttggccgcggccagcagcagccggtcgtcatggtccgggtcgatatgggccgaacggtccagaaccagcgcggcggcgcggtcgaggctgggccagcgcaccaggaagtccagcgcacgatcggtgtcctcggccttcagggcgaaatcgagcgccgcatcctcggcttcgatatcgtcgaagtccggcagccgtttcagatattgcctcagcaggtcgggatcgagcgtgcggtgaaagccggacagccggcaaagttgagcgtcggcggcgcggcccaggccttccagcgcctccgccttcagggcgaagacctcggcggacggcgcggcgcgcgccgggatgtcgtcgagtcgagccagtgcctcggcctggcgcccggcatcgaggaggcgccgggcgatggtcgccgccgtcgccggatcggcgcgcttggcctgcagggcgatataggcgtcgacgtcgcccgaggcgtcggcgatgtcgagcagggcgcgatggacgatgtccgcccgtgtgcggcgcacggcgacgtcgcgttccagccgccggccgcgccgccagcgcgaggtgcggcgcgtccggggcgatgccgggcccacgccttcgcgggcggtgtcctggatcgactggcgcaactgctccaggccgtccggaccgaggcgcggggccatggcaacgatcagcccgtccgcctggccgtagccgttgccgatgacggcggcggtgagatcggcgaccagccgttccccgtcggggcgggcagcggcggcgagatcgcccaacgccgtggcggcgtccttgaaaatatcgagcaccgcgccggacgtgtcgttggtccgttccaggatgctctcggcaaggccgacaaacgtccacatcaattccagcgcctgcgccggatcggcatgggccagcgggtcgacgatcaggcggcgcagggcagcgagttcggcgaccaggcccttcagggtgcgccagccgacgaaggtcttggccgtgcgcagggcggtcagccgcttgccgagatccgccgccagcttgcgcgggctctcggcggcggccagttcgagcctgagccgccgcttggtgccggcgtcgcccgtggccacttcgagcaacagatcggccaggcgttcggcgcccagggccttgagattgtcgtggttcagaacggatttcgacgccatctctcagatgtggcccgcgtccggcaaattcgcaatgggattgttcggtggggctacaggaatcgcctttaccgcataactagcagaaataatacagaaatttatcatataaattttctgtgccccatgccgtgccccagggaaattttctcataccgggttcgattcctgtggataaatattgaagtgaaatcagaaggttgtcgaaatccagattttcaaacacgcaggaatcaaaagcggctacatatcgttttaaatcaatttgttataccggttgaccgccacggcgtgccccttaaaggggcacgaagtattggtgtgctggcgttgttccgggtcaatttgcgctcagaggcataggcgcttcgaaataatcttcggttgcttcaatatcgtcgccttcctctgggatattgctactgtaggcagccttgcccgtcgcccgttcgattagattaagcaggcgcctttgccggtcttccatgaacgcctcaaacttgtcggcacggagaagggcgggatcaatcaagtgggattgaagatagccgtccaacttttcggcggtgattggcggcgtagagctgtttccgctttgcagcttcgccagatactcgcttggcgcaatgccaccaatgatcctattagtgcggtacgacagcggagtcttgttgatgatcgaatcgaacatggcaggtttgatcccctgcgccttgcaccagtcctgtgggaagatatggtgaatatcaacgttttcaccgaaaaacacggtgtggtcgaacttctggcctgaacgaaaatcctgagccccttcttccatcaacagggcgttcatccccttataggccgctgaaagccgcattcgcatggttttcaagcggtcagagcgaaagatggtttcactgactgtcgagggcgcaggaccgccgctcagccagcggggtacttccatgaaatccttggcgatgcgcgtttcgaccgcagaaccataaagctcgccaaacactccgttccaataccactgaaccagctttgcccggttggcttcatgttcccaagcatccccaatgtcggccaggattgccgccagcggcacaatttgcgactgataaggcagatcgaaaatgcgatagatatggagcatgtgcagaaatttggcggcttggatgaagcctcgctctacctgcgcctcatattgcttataggcttccagcggaagatcgagcagtgcttgccggttgccagacaccgctggcagttctttcccttccttgcccgcctgttcggcgatacgccgccggtcgcgagtgaaaaagagagaaatggcttgcaagaaatcggtattgccgacaccggccagaataccggcgtcggaatccgcagggcgtaaggtatcggcgagccgctggtggcgtccctttgtgccctgatcgccgtaccagtccttgcgaagttcatggccagacgcggcatacatagccgtcaccagttcgaatgcatcgagtggcttgcccccagtattcaccttctcgaacaccacacatactgcttccttggaggtcgagcgatcgagtgcgatcaccggcacgcgatacattttgaagttttccagcacgccctttttgaaggcgcggaactgctcgcgcaccgtcgtgtgctcgtcaccagaccagtgatcgttaaacccgtcctgccatgtgtcccaatcgaatacctggctgacgggaaacattagtgctgcatattcgtgcgccggcgtggaaaggtctagtatgacttcgcgtccgaaatccgtgcgttccacgcgatcttcgggcataccaataacggcttcctcacggtccaccgtttcgtcaatcgccttgctaatgtctatgtaaaaccagcgtttgaccctcttcttctttggggtgacggtttctacgaccttgccgcgcaacgttacttgatagagtgaggtcatacgctgctgaccgtcgagcagtagagattgcggcgcagtgtggtgggcatccgccggtgcgccttcgacagggcggggtttgaagttgaccggcccgccggtgtccaaagacataagcgcaccgacggggaaagcgcgtgaaatcgaggcgatcaggctcttgatgcgatcttcgtcccaaacccagcttcgctgaaaatccggtaactggatgatgccccgatggcactcgtcaagcacacggtgaaggtcgataggattagtctggaaggaggtcccagccatgctctgtatttccttattcgatatgcgaaatctctgagtcggatcgaaaactcttttgcggtgcaaacgcatttgggaagccggggccaaccacagtttttttcttcgagcatcgccacggcttccttttacctcgcgtaacgaactcctcaacagccaatcatcaaatgagtttggtactgcgccacaaggcggaggaaccatataccgtttgccagatatctcgccaaggcactcgacttgcaacctatgcttttgcgagccaacgcccggtttcattgtgccaaaatgagacgttgcgtaattgttcgcttaagattcggacggcttggggacgtgcatcgtgggcaaactctatttcggcgacaatctcgatatcttgcgcgatcacgtcgcggatgaaagtgttgatcttgtctatttggacccgccctttaattccaaggcccaatacaatgttcttttcaaatctcccgccgggatcggttcagacgcgcaactagaagcttttcgggactcgtggcgctggggagacgcagcggaatctgcatttactgacgtcattcgatccggtgccggtgcggcccgcattttgagtgcactccgatcgtcaatgggcgagaacgacatgatggcgtatttagccatgatgtccgtcaggcttatcgaactgcatcgcgtattgaggccgaccggttcaatgtatttgcactgcgatccaacagcgagtcattatttgaaagcgttgctggacgcgatttttggtttccaaagctttacgaatgaaatcatctggaagcgtacaagttccaagagcgatcattcgcaaggggccaagcggttcccacgcgtccacgatagtatcctattttttcggaaaacgcccggatcaaccttttctccagtttttatgccgttggcggacgactacgccgattcaaagtacccttacgttgatgcggacgggcgtcgctacggtttgtgggatatgaccggccccggaggcgccgcgaaaggcaatccgtattatgaagtgatgggcgtctcgcggtactggcgttactcgcgggaacgcatggagcggatgatcgcgaatggacttgtgatccagaataagccaggaagcgttccgcgcgaaaagcgttatctcgaccgtagcgccggcatcgcaattggcgatgtatggaccgacatcccgcctatcaactcgcaagcgcgagagaggctcggttatccaacacagaagccactaccactcttggagcggcttattcttgccgcctccaatgatggcgatctcgtgcttgatccattctgtggatgcggcaccaccgttcatgccgcagagaaattggcgcgccggtggatcggaatagatgtaactcaccatgccatcacggtaattgaggaacgaatcgcggctgaatttcccaagttgaagcttgaggtcgaaggacgcccgcgcgacttggagagcgcgcgagaccttgcgcgccgcaataaatatcaattccaatggtgggcgaactggctcttcggcgtggaccaatatcgtgagcgccgaaaaggagctgataagggaattgacggggaaattttcttcctcaacggtcctgggggtgttggccggattattatttctgtaaagggcggcgaacacgtcggcgttgaggccgttcgcgatttgcgtggggtgatcgaacgcgaaaaagcagaactcggtgttctcgtcaccctaaccgaccatacgcggccgatgatcgccgaagccgccgccgccggatatgtacaaactgcacatgggcaatttccacggcttcagttggtcgcgattggcgatctcttttcagatgtacgtccgcggttgccggtgagagcaccgttcgagcagcttcgtgcggcgatgccgcgccgcaaaactaaagatgataagcaactaaatttcaccttcgcgttcaatggcggtaaggccgaaacgtcggaaggagatgttgtgatgtttaatcccgcccatcgttcgcgggaagtaggataatgttcgccgacgccccaataaagaatccccccgcccggtttcccgaacgggggttatccttcatggtaaaaccatttaccgtggtttcactaccgatcttccaaggcgtccgtaccatgttgacaatcgccgatcaagggtgcgacctccgttttttctaactatgggcgaatccatgcgcatcgcggaaaatctggtgctgggcgttgatttgggcatagccaccctcggctgggccatcttagattccgtcgataggtgcattgtcgatgcaggcgtatggactttcaattcgccggaaaccgataaagaaaaaacgccgaccaatcagattcgccagcaggcccgctccatgcgacgcgtgattaaacgccgacgccagcgcatgaatcagatacgggagttattggttagccacagcctgctgtcccatgctggcaagggtgttgtcgccgagcagttggcgcaatccaaggcctcgccttggttgcttcgcacggaaggtctgagccgcaaactcgccggcgaagaattggcggcgtgtctctatcatatcggcaaacatcgcgggtttcagtcgaaccgcaaaggcggtgacaacgcggcggccggcgaagaccagaaagcattgaaggcgatggaaggcctcggcaatcagattgctggctaccggacctttggcgaggctctattcaaagatccggaactttcaaaacataagcgtaatacgcccaacaattacggccggacgccccgacgtgactggttacggcacgaggtcgcactgctgttcgatcagcagaggcaattcggttccgacttcgccactcccgaattgcaagcaggtttttccaccctcgcgttcacgcaacggccgttgcaggaccaggcggaccgcgttcgcgattgcccgttcgagcacggagaaaagcgcgcctcgaaacatgcgccatcgttcgagaaattccgcttcctatcgaaactggtccatttgcgcctgtacatgcgtgggatggacgactgggctttgtcgcccgaagatatccagaccctcgaagccaagttcggatcggtggtcaaattcacgtacaaaaccgtgcgcgatatcttggaccttgaccccaatgtgcgttttcgcagcgtcgccaaggaagacgagagcaatgacatcgccacgcgcaaatccggcagcgcggtaggtacgcgtgcattgagattggccctggggccgtggtttgatcgtttgagttccgagcagctcgacgcagcgatgttcgctatcgcgtttcatgaaatgaatgatagcgtggcgaccgccctgggtaaatttggattgccgcagccggcgctggacaggttaaacgctgccgttgccaacaacgacttcaaggatgtgaaaggtgcagcgcatatctcggcgaaggcgtgtcgggccgttatcctcggactgcgcaccggcgccgtctattccgacgcttgcgaggtggccggatatgaccactccgcgcccgatgcgtcgccattggcgcagctcaagaagcaggccgccgggttgagccccagtgagatacgccggcttttttccgcacttatgtccgaccccaaacagacgctcatcggctccccggtcgcacgcaaagcccttaccgaagcagtcaagcagttcgtggcgctggtcaacgaccaccccgcccttcagggccgtctgcccggaaaggttcatgtcgagcttgcgcgcgacgttgggaaaagcgccaccgagcgcaacgacatcaagaacggtatcgaaaaacgtaatcggacgctcgataaggcggctctcgattttgagacgacatttgggcgggcgcccaggcgtggaactcaagacttattgacgtttgagctggcccaggaacaaggctggaaatgcctctatactggcgaagccatagcgcccacacgcctattcgacggtcaaacctatcaggtcgaccatattctgccgtggagccggttcggcgacgacagttttatcaatctgaccctttgcctggcgcgagcgaaccaagccaagaagcaccgtacaccctatgagtgggcgacttccggcgaagctggcgcccccgatctcgaccttttcctggcccgtgtcgaaacatgcaaagaaatgcgtggccgcaagaagcgcaattacacgctcaaaaatgcggccgaggtcgaagccttattccgtgcccgcaatctcaacgacacgcgatgggcctgcaaactttaccttcagtcgcttcagctcttctattcgtcggacgaagatgcgcgccggctgtatgccaggcccggttccctgacctcaaaggcgcgcaaggcatggggtttggagcgccttaagaaggatgccgacggcaacagggttgaggacgatcgccaccatgcgctcgacgctatcacggtcgcagcgatgtcggagtcgatgttgcaagccctgacgcaagcgcaccagcaggcagaagacataggggcggcccggccgttttcacgatttgatccgccttggccggagtttcgggggcaggctgtcgcagcgcttggcaaaattcttgtcgctcgtgcggaagagcgccgtgtcagtgggcaggctcacttggaaaccgtccgcggcctggatgaagaggccgaggtcgtgttcgagcggctttcgccggaaaaactgctcgaccaggtcaaaaaggacgctgagaagtccggctggcccgcagccctggaaaaacggtttgctcgcccagagcgcagccgcgccatcatcggagcgttgctcgcctggcaggaagccggccggcccgccgacaagccaccgcgtggaccgaccggcgacagaatcgaaaagataaaagtcattgcgccgacggccaggctagcagtcaaagttcgcggcggcacagccgaccgtggggacatggcccgcgtcgatattttttcgcggcccacgcccaaaggcaagaaacaatatttcctggtgccgatttatccgcatcaggtcgcaggtgaaagcacgccgcccaatcgtgcggtccaagcatacgcttcggaaatagaatggcctatcatggatagctcctatcagtttgaatttagcttggtgcaaaaaagttgggtggaagcaattcggtccgatggcacggttatcgaaggctattttcgtggcctcgatagatcaacgggcgctattgctatttctccgcacataacaatgcagcaagtaaccaaaagcatcggggcacgaacattgctcaaccttagcaagtatcaggttagccgtctcggaacgaaacactcgattgccaaggaagcgcgtacatggcgtggagaggtattcatatcgggcaaccagcccgaatagggttgaggaaccagcaattgctggtggcgcaggcggatgccgaaaccaccattccaattgaagatatcgcctacctcgtactcgatactccccagacaacgcttaccggtgcggtcttgacggcgctagccgaggccaatgtcgtcctcatccagtccgacgcccggcaccaccccgcgatgatggcgctgccgttccacggccaccacaaacaagcggaaatcgcccatttgcaaatcgaaacgacggcgccgtttcgtaagcgtacctggcaactcatcgtcaaagcgaagatcgataatcaacgctcgcacctcgcaagcctcgggcgcgatccaggtgtgcttccagccctcatcaccagagtcaaatccggtgaccccgagaatctggaagcccaggccgcgcgcgcctattggtcccgactgtttgaaaactaccggcgcaatgacgaggcggatctgcgcaactccatgctcaattacggttacgcgattgtgcgggcagcgcttgcgcgagccattactgcagcagggctcattcccgccttcggtctccaccatgcgtctgtgacaaacgccttcaatctggctgacgatctcattgagcctttccggccatcggtcgacgctttagccatgtttctgagcgccgccgagggccgcacgtccacggaactgaccctcgatgatcggcgtgcgctcgtcggcgccatgaccgcaccggtgcgcatggagcaggaaaccatgacgttgttggcagcaacggagcagtgcgctttcagcctcgtcagagcaatccgggagaaaaatcccgacgcggttaaactcccggcatttctgccacggcatagcgaaaatgtggctgcatgatctcggaggaagctagattcatgtggcttttctgcttttttgatctacctgtaggtacgaaatctcaacggcgcgcggcgacgcgttttcgcaatcatctgaaaaatgatggcttcattatgcttcagttttcggtctacgcccggctctgccgcggtgaggatggaaatcaaaaacatgtggatagaatccgcagtgccctgccgaaagaaggctcgattcgctgcatgaccatcactgaccggcaatatgcccgcatgaagctaatgctcgggaccgccacaaaaaccgaatcgaatgcggggcaacagcttgtacttctctgattttccacgcggtaaacatgaaaaatcagagaaaatacatagctttgttcgatagctagcctaccactggaagatcggtagggaaaccacggcggtcgaagccagcgcccatgaggccaaacaagcctaccactggaagatcggtagggaaaccacggcgccgatgagaacgcgccggactttgtccgtagcctaccactggaagatcggtagggaaaccacggcttgtcgccgcgtacctgccagtctgcgtatagcctaccactggaagatcggtagggaaaccacggccggccatgcaaaccgtcaaatcgaagctgcagcctaccactggaagatcggtagggaaaccacggcccacccggccttggtgacgcgttcgttcaaagcctaccactggaagatcggtagggaaaccacggcgccgttgctgtcgagggcggctgccgtcgcagcctaccactggaagatcggtagggaaaccacggcactttggcggagggtcaggctaatgcccaaagcctaccactggaagatcggtagggaaaccacggctgtggggccgcctacagtacaattgccggaagcctaccactggaagatcggtagggaaaccacggcctggtcgccaaggcggggatgccgggtttcagcctaccactggaagatcggtagggaaaccacggcgtcgttataggccaggccgtagggcgtatcagcctaccactggaagatcggtagggaaaccacggcgggcgctctctggctcccccaccgcttccgagcctaccactggaagatcggtagggaaaccacggcgagacgggccatctccgcactgagaagcgcagcctaccactggaagatcggtagggaaaccacggccatcgcgccgtgggatcttgaagctccgtgagcctaccactggaagatcggtagggaaaccacggcgagtcggccgcccacaatgccgaagccgcaagcctaccactggaagatcggtagggaaaccacggcggcgccgaaaacaacaacggatgacatcgcagcctaccactggaagatcggtagggaaaccacggctagtcggacgctgttgcattgcagcattttagcctaccactggaagatcggtagggaaaccacggcgtacttcgggttttcgatcaaacggccgggagcctaccactggaagatcggtagggaaaccacggcgtcggcaatgtgttcggtggcgaaggtgcgagcctaccactggaagatcggtagggaaaccacggcggcggaggcctcgtgggcgaggtccctgatagcctaccactggaagatcggtagggaaaccacggcgttgatcaaggtggcgcaccaccacaaggaagcctaccactggaagatcggtagggaaaccacggcgtgtttcttgtcgacctgatcgcaccattcagcctaccactggaagatcggtagggaaaccacggctcggtgaccccgaagagcgaaagcatctgaagcctaccactggaagatcggtagggaaaccacggccgctgtggtcgacatggagagcgcgtggaaagcctaccactggaagatcggtagggaaaccacggcctggggcatgttggtgtcgtcgagcgtcacagcctaccactggaagatcggtagggaaaccacggccgtggatgccctgtctcggaaagcgcaaatagcctaccactggaagatcggtagggaaaccacggcggagtcacgcatgaccaaaggaatagaccaagcctaccactggaagatcggtagggaaaccacggcaagggaaggtcgcatgaactatatcagcaagcctaccactggaagatcggtagggaaaccacggccacgtaccagtggcaaataaacggcgtcagagcctaccactggaagatcggtagggaaaccacggcgcgcgccgcgtcgatggcggtacgcacttgagcctaccactggaagatcggtagggaaaccacggcgtgttccaccgaacaagcgccaggcgcaggagcctaccactggaagatcggtagggaaaccacggctccgtacatgccgcgcacgtcatgccccatagcctaccactggaagatcggtagggaaaccacggcgcgaacaaggagctggatgcgggcggcttcagcctaccactggaagatcggtagggaaaccacggccccgacgcgttcggccaggtcggcatccgtagcctaccactggaagatcggtagggaaaccacggcgatgccggacagcgtgttcagcccgtgcatagcctaccactggaagatcggtagggaaaccacggccacgtgacgcgctgattaatgcgctccgtgagcctaccactggaagatcggtagggaaaccacggcgaaggtgcgcgtcaccttcagcacgcccagagcctaccactggaagatcggtagggaaaccacggcgtcagtctccgccggcacgcttgtgtctacagcctaccactggaagatcggtagggaaaccacggcatatttgatggcggatgccaagttcattaaagcctaccactggaagatcggtagggaaaccacggcctggtcgtcgggcaggcactcggcccagcgagcctaccactggaagatcggtagggaaaccacggccacggcggtaaagccgcgcagttcgtcgatagcctaccactggaagatcggtagggaaaccacggcgtagagctttgcgtcctgcatcaggtacggagcctaccactggaagatcggtagggaaaccacggccgatgacgcgggtggtattgccgggcgttgagcctaccactggaagatcggtagggaaaccacggccgtgccgtcgtcggcgaacttcgacacgaaagcctaccactggaagatcggtagggaaaccacggccgtcgacatgagcggtatgagcgcggaccaagcctaccactggaagatcggtagggaaaccacggcgcaaaagtcaactctatggcgaattgtgttcgtgcttaagccggcaaagtataaaaaatggtgggtcgctaaagcgcttcctggaaaatatcgaattattctctacttaatagcgagctatgcggtagcttgttctgatacagcggtgacttctattcgaagcagcgctatacgctccgataaccatgttagcatctcggagctgatagcgtattcggctgaatacctagcctcgacgtaggccttttgcaattttgcaaaggcttggcgggctggcttcgtgtcatccggccaaacattttttaattgaggaacgaggctttcggcgtgggatcggagcacactgagtctatgagatttagggctataaagtgtaagtgtaaggaggaggcaatgataaagggcctccgcggcctgatgcagcagaaacgcagcttccttatcgaagccttgatctacggcatctttggccagctttaaccggcgatccgcattcggcatccattgcgcgaaatatcctctcgcttctgcctttacttcttcaggcgttcttgcttttggcttagacaggtcgatgccgggggcgtcatacaggatgatcccatcgcgaacgacatcaatgaagaacggacgtcctcggacaagttgatcgttcacctcttctagactatggacaatgaagttcacaggtgttcgcaggtgtcctgtaacggcgtattcacgcaccagatgttcgtccgccttgtcccaataccggtgcaaatccgtgaattgttcgccagataccacaatcaaaaggtcgtagtcggagcggtagccggatgataagtcctcaacccagtcgcctcgggcatatgagccgaagaggatgattttgaggatacggccagccttctttttgtccgacgtggcaagcttcgtcgcgtcatcgaactcgtcgaaaaggatggtgacgacgcgttccaattcgcggcgtttcacatccggaaggtgactgagcgcatcgtcttgcattgtgaatcccgtgccgttgaccgtcatcctaacaccggggagtcacggtggccaagccccaacttatggctgtaaggcgtttcatgtcattggaatcttggagattttggagggatttcggataaagcaagattaaagcagtggcgcctttcgcagccttcggctgtcgtaaggctttgtctgcacatcgttttttgcgaggtgcgcatggcgccatatctggttcggacggcgccatagtggcgctcttgatccagccgcctgattagccatcatcacagttgagtttgatgggacgattacctcatggatcaggaaaaagatttcgcgatcaggctggggcggatcagggcagcgaagggcaaggtcactcccgggcgagcctatgcaaaccgggtgttgaaagcggccaatctggcgcgtggcgggacggcaccggcaggcggtggcagagccaaaacaagcaagtttaccggcagccgtatcggccgtggcgccggtgccggatcggtcttatcgtctcgcgccggcatgtcgcggtttcggcaacggcgcgtcatggtaaaggcaaggatcgtcaaacttgtcggcaaaggtatggccacggctcgcgcccacctgcactatgtgcaacgtgacggcgtcacgcgcgatggccgggccggtgaactttattccgccgagaacgacaaagtcgatgggcgcgcctttctggaccgctcggacggtgaccggcatcagttccgcttcatcgtctcgccggaagagggaactcaatatgacgatctcaaaagcgtcacgcgccgcctgatgacccgtatggaggaagacctcgggacgaagctcgactgggtggcggtcgatcacttcaataccggccatccccatactcatatcctgatacggggccgtgacgaccagggaaaggatctagtcatcgcacgcgactacatcacggatggcgttcgcgaacgggctgccgagatcgtcagtctcgaccttggtccccgaacggaccacgagatagaccggtcgctgcaagcggagatgacgcaagaccggttcacgacgatcgataagtggttggcccagcgcaaaagcgataccgggatcgtcgccgccattgacgacgacggtcgccgtcagtccctgcttgccggccgcctcaaccatcttcaaacccttggcttggcgacgcctgccggtgctgggacatggcaactcgatgccgaggcggaatcgacactccgggcgatgggccggcgcggcgatatcatcaacggtttgagttatgatctgagtcgggccggccaaagccatttgctgcacgacgctatcattcatgatgccggtatatcgggctcggtcgatattgaaggcgaaccccggccactcatcgggcaactgctttggcgcggactgtccgacgaggtggcggacagtcattacgtggtagtgaatgcgacggacggccggatgcacgtcgtggatatcggtgaaggtggtcgcacgccctccattccggaaggtgctgtgatcagcgtcacgtctcgcgagctagcgctcaaacaaacggatgtgcgcatcagcgaggtggcggcgaggaatgacgggcgttattccatagaccggcatctggtcgccgacccgacagccacccatgccttcgcgaccacccatgtccgacgtttggaggcaatccgccgtgccaccggcggcgtggagcgtttggaggacggcacgttccgcgtgggatcgaagtatttgggagcggcagaagcttatgaacgcttgcaagcggatcggcagccggtgaagatcgaagtgttgtcgcttgaaccgccgcaacgccaagcgggcgcccagcgctatacctggcttgaccgcgaactcagccgtgacactccagaatcattgtcgcctaacgggttcgggcggcaagtggcggacgccctcgggcggcggcgccaatggctgatcgagcaaggtttggcgtcaaacgggcctggcggttccttcataatgaacggtgatctcaaaggcgaactgacaaggcgcgaagttgctgaggtgggcgggcgttgggggcaagaccttggcaaacccatggggcaggtattctctttcgaacggattgaaggccaattggcgggcaaagccgacctgggcgacagtagctttgcggtcgtcgaacgcgcccgggatttcgttctcgttccctggcgggatgtgctggaaaatcaaatcggcaagcaactcagcggcattatgcgcgagggagggattgactggaccattggcctcaaacgcggtctcggcattgatatgtaactacacgttcttatcattccgcgacgaacgtattggcagcgacttcaaatgcgctcgaaaggcatttgagtcatttcatagcagccagccggccgcgccgttcaaagtcgctctgtgctgtcgagtttcaatgatcaggccatttggcgatggataaacgcgtcgaattggatcttttgccaagaccgtaccaccgtaggcgccttccgaggtgaagaagcggacttgctttttttccagcaatgcgaagccattttccgccacgataagatcgccgctttcaaaagtgtctatcagggcgtgtagttggtcatctttgagcacataaagtcgtgtcgcagtcagcaaatacagaaatttaccggtgtccactatctgccgtggaattgcgccaatgtcatatacccggatcgcttttccggcatcatcgacataaatcactctgccagaatatccggccaaatatgcgccatttgatgcgctcgcgaaggttgcggcatagatccaatccgaagcgaatttttcgctgacgacaatactgaaactgaatccttgcagagcgccagcaaggtcgagtttcttttcggccgttcctgctctgttggagcttgtgaatgacggaatcgcggagccgtctaaccctgtcagagcttcgacggcggcatttaatgcgaccatcttgtcagccgctccgggatcggatcggtttaagtcggggtgccattggcgtgccaactgacggtatcgcgacttcagatcttcaggcgtaaaaggaaaggataagtccatgaccttcagggcacggtcgacggcggctgatgtgccatacgattgactcggcggggtccgcgaccaaccctccttcatgggcagtttagcgccccaaagaccttttccgtctagggatacgcaccaggcttcatctacgattgtaaagaggtagcgcgtttcgtcgcacgataaggtggtgcaccgtagatggtttttgaattccgagaccccgatgtcaaagcgttttctaatggcgacaacttccggtgcgagcaggaggtttgtttcaaggatcgatttcaaattttcgtcgtaggcgtgcaacacgccatcgcgagatgaagcgatcagccctcggcccagagggtgcaccccaatacggtaaagatcgaactcaaatggtccctgaacggcgacttttccgtctcttccataacgtagcgccgaggcgggagcgggcccaattccttcggccttgcccaagtcatcgatgcaaaacaggccagccccacttggataaaacgcccgatatgcgccgtcaggtcgttcgcctggtggtattttctcgaccgattgaagcgaccagtcagcatccagaacttcaaactgggccttcaccgcgagtttcaccgctcgctccttctgcgcctcttcccatcgatccggtgagcgcggcagcggaacgtaatccagggtgcttatttcaatttcttgaaggggtggcggcttggtgtctgtccgatgggatttgacatcgcgcttttctatcgcttgtggaaaatccggggagcctggcagatgaagtgaataggttttaccaacccgtgtccgcccaagacgaccggccttttccaagtatccgaccagcgtccctaaattcatcccttcattgaggcccatcaggcttttgaggtccgtctgtaggcaaccgggggagttctccaccgcacgcagaatgccagcgatcagttcgatatcttcctgagcttcatgtgcagcctcggcccagggggccaactccggcaggctgcgaacaactcgatccatctcggctaaaccagccttatcgccgaccagggcgagaatgcgagctccgcgttccacggcaggaattgagccaaggtcaaatcgaccataggatcgaactgtgctttgaacgagtgcaggaagataggccacactttcattcacgtatccagctgccgccgaataattgtgttctgatatagcggcctggagctttcccagtgccgcgtagtacgcggttgtctgaatttccacgtctccagattttgccttgctttgcgctcttgcatccgatgccggcgtcgtcgtccgcagttctgcttgcgcgacggttggctctggggatcgcgtgacttccttagaagtcgcctccgatgcgggcattgatggccgatctgcttcggactttttgccactgaatagtttttttaaaaagttcatcatgccgccctcacaatcatgagacgattttatatcgtccgcgtcaactgtcgtgcaaccggtgacctagcgacgctagtcatcggtacaaaggataggagggcgtagaaaagtgctataggcccaccggcgatgccggggcatcatgtcgcaatctctttgaaggagagcgccatgaagccccggcatcacctctatctggatgatgatcttacccaggaat

SEQ ID NO: 1902 - DNA, 14375 bp, synthetic construct
  source 1..14375: mol_type = other DNA
  misc_feature 1..14375: note = Synthetic
atccgctttttcatcaagttgtccatggtacttctgtttaagcagctgaaggtagctgatgaccatgcggagcggttcctgcaggtcgtgggaagccacgtaggcaaattgttccaactccttgttgagagtggtcagatcggccgttcgttcagttactgcacgttcaagctgatcgtggtgagccctgagatcagcttcggcccggtgttttgcttcgacctctgcagagagtcgatcgttgagtccttccaccctttcttttgcctgcttcaggcgctcgatcatccctgtattttcaaatctgagcagcagggatgtcctgttcaccctgtagttgtgcatggatatccgccagagcaggacgccgaacaggaccagcattgttcccatggcacagtggaaagcatctttgatgaggaagaaatggatggccagcggtgtcagggcagggatgctgaaaacggcgtagccttccttgatcatgctgaaggttgaagacgctcccgcggccatgccaccgagaacaaaagcaatgaagacctggtgggcaagggttatttcaccaaaggggaagaaaccgatccacccccaggcgacgccggcgatgaaaaggctgacaatgaacctctttctccaggtttccgcaaaattccagtgctgcttgacgttgcgaaaccacaggaccagtcccaatctgagggcggtaacgctcaatagcgttgccccccagagaacgagcagtcggaactccatgacgtccttcatgatgaaaaaaacgatcaccgagttaaaaaaggtggcaatgaatcctatgggggccaaggcataaatctgctttacctgttcagcgagaatctcctcccggtaagggttgtggtcggctgtaagcatttcatccggatgatcttgacctgatgtcatgtgctctctcgggtgacactggaatgcatcatgaagtgattgcttctgccgcaggtagtttcctgaacctctctttatatgctaagctgacaaaactggagcaaaggcaccctaaacacttttacacattattacaggaagaacatgacagaacaaaagcagacggtcgtggttacctgccttgtcaggaattcagcggcagaaattctcctgatccggcattttcgccgaggctgggagcttccccagggcagggtcgaggcaggggaggccctgacagcagcagttcaccgggaggtcctggaggaaaccggaaccctgatcgagctgggacccctggcagcggtgtggacaaaagtctgcgccccaccggcgaccatcttcggctttaccggcatttaccgcagtggagagcttgttcccagcgaggagaccccggaggtccgatggttttcaccgaacgaggcccttgacctggtgacccatcaggtcaatcgcgaccgactgcaaaccttgctctaccattccggcggagtcattcagcgtgcctatcaggcacgccccttcacaattctggaaccaaccgactcggataaacttgcacttgctaaaatactcccagcgcacacttgaccaggctccgataccggtttccagaggcgtgtcgaccaataggacaaaagcgtcgcctatcatctgcttttccccttgattgacgacaggggcaggggatggataattctttgggaaggaaaaggggcagagttctcaaaacgctgcccctcccttttattgcccggaaccgttgccggaactcccggttcctgtaccggtgccaaaggtgccgctgccggttgtgccacctgtaccggtgccaaaagtcccacctgtgccggtatcgctgccgaaagtaccacctgttcccgttcctgtatttccgccgcttccggtgccgaaggtaccgccggtgccggagcctgtggttccgtcagtacctgtgccaaaggaaccggtgccggtagtactgccggcgccgaaacttccaccggtacctgtgcctgttccgagggtgctacctgtaccggtgcccgatgttctccctgtgtcggtgtctgttcctgaactaccacccgttcctgtccccatgcttccgccgctgccgaaagtaccgctggtaccggtccctgtcattccgtctgtccccgttccgaatgtgccaccggggccggtagtgccggtaccagaagttccacctgtaccggtaccgaaggtgctgccggtccccgtgccggtcgtgccgccagtaccggtgccgaaggtactgccaccagtgcctgttccgaaggtcccgccagtaccgcttcctgtcgtgctgccggtaccggcgccgaatgttccacttgtaccggtatcaccgaagcttccgctcgtacctgtaccgccgccactgccggtccccaagcttcctcccgtacctgttccggcgccgaagcctcctgttccggtgccgccggtcccgaaactgcctcctgagccagtaccggtagatcctcctgtgcctgagccgaagcctccggtggaaaacccccctgtgccgcttcccatgccgcctatgcctgttccggcgctgccgggcgagcctgagccgaagccgccactgctgccactgctgcttccagcctgtgcaagcaggaccttactgtcagagttgcagctcaccggctggcagaatctgcatacgccaaagctgtcaacgaaaccagggcggctgcggtcaatatcaagcgccttacggtcaccatagttttacctccttcagtagtagtcgccatctcacataaagtttaacccgtccatgatcttattcaaagaatctaatcttgaaaaaatccgcatacacagacccacaggaaacttttgctgcttgaccgtttaccatgattgggtactctttaaagattaaagacaatcaattcggcggcggtgggatcatctacggtctggtgctcccgatgccatatggagattcggggtaccaagcaggcaacttcagcccaggcagtatttccgggactttcagcgtcaggtattttttctgatcaaggaattgaaggggcagcgggtggcgctggctgccccggccgattcatgacgggttcagggggtttgcatcaggcggtagataatggcggcaatgagagtcagaatgatcatgacgacgaaaacgttgaggaagctctcctggtgaatccggtcgatggggcctccagtcggtggcggatgcgccttgcgatggctgggagtgggcagcgttgccgctaccatcagggcgacgagaactccgacaacgatgaaaacggtgaaggacacaccccacattgccggtcccaccggttggatccatagccccccggcccaggtggcgagaaagatgatgaagaaaaggccgatcaggtcggcataggcaaattgcttgaatcctctgccaggatgagtgtgagaataaaggcgatgatgagcgcgagaccgattcctgcgaagaacataaatacctccttctgccggaaaaaaggctgcaaaagtgctctcactttgattttagcagcgacgggcggcaagtcaaggcgatgcctggcggtgcggcctgtgagggctccggatgaattacccggccagtcatgaaccgggcgcagcatttgaaaggtgtcgagtcagcggtataattggccttgttactcttcttccgccgaggcgcctatgtcctaccagccaatagaaaactacggcatgatcggcaacatgcgcacggtcgcactggttggcatcaacggctccatcgactggtactgccatccccacttcgattctcccagcatcttcggtgcactgctggacgacaactgcggggggcgtttccgcatttcccccgttgccgaaagagtgaaatataagcaattttactggccctccaccaatatccttattacccgttttctcatgaccgacggcatcgccgagatcgaggacttcatgcccgttgggccggcccttgattccccatggtaccactacatctatcgccgggtgcgctgcgtcaggggggcgatgcgcttttcggtcctctgctgtccggctttcgattatgggagaaagccccatcaggtggccattgaacctaatggagccatcttcagggcggatgattccagctttgccctttcgacagaggtgccgctccgggtggatgagaaggggggcgtgggccggcgagtttcagttgcaagagggggaatcgcgggtttttctcttcaagaacgtggacgcggtgcagtgcccctgcccgccgccggagcaggaggctgaggaacttttccagagtacggtgaaatactggcagaaatggctttcctcctgcacctaccatggccgctggcgggaacaggtgcagcggtcggccctggcgctgaaactgttgacctttgagccgaccggggccatcatcgctgcccccaccaccagtctgcccgaggtgataggaggaagccgcaactgggattaccgctatacctggctcagggatgccgcctttaccgtctatggctttctgcgcatcggcttcgtcgccgaggcagcagcattcgtcgactggctggagagttgcgccgcccagcatttcgtgccgggacaatcactgccggtagtcctgaccgttggtggcgactgcctgccaccagagcagaccctggaccactgggagggctaccggcagtcgggtccggtcaggatcggcaatgcggcagtttcccagtttcagagcgacatccacggcgaagtgatggatgccctgtacctgtacaacaagtatgtcagtcccatctcctacgatgtctgggtgaagatccgcgagcggctcaactggatctgcgacaactggcgccggcccgatgaagggatctgggagatgcgcaacaggcgggaacacttcatctattccaaggtcatgaactgggtcgccttgatcggggcctacgactggcggaaaagcggtcattccccgcccagcgtaaaaagtggctggaggaacgggaccgcatttacgaagaggtgatgagccaggggtggaatgtgaagcgacgggcttttacccagttttacggcagcgacgatctggatgcctcgctgttgatcatgccgctggtgttttttctggctcccaccgatccccgcatgctgggcaccattgaagctatactggagtatcctaagcatggcggccttgccagcgacagcctggtctaccgctatcccccggagagccgcattgacggttttccgggggaagaggggaccttcaacatgtgctcattctggctggtggaggctctgacccgggccggacgggcccatccggacaaactgaatcaggcgagacttttgttcgagcgcatgctcggctatgccaaccatctgggcctttatggggagcagaccggctcccagggggaggccctcggcaattttccccaggccttcacccatcttgccttgatcagtgcggcctttaacctggatcgcaccttgagcagcagattctgagatgatgaaagcctgtttcctttttacaaccacttgaattttcccattttatggagtactgctaaactggcgaggtagatatgcagagacgtctgcagcagaggaaccgctccgcatccgcgacatgaacatcgatgatttccccgaggttttccacatcggcgaggaggtttttaccgccgagtattcccaaagcctctaccgcacctgggacgagtacgaaatcaccaccctcttcaattccgactcggaactctgcctggttgccgaggtgggtgacaggatttgcggttttgccctggggaccacggtaaagaagcatcactctccgtggaaatacggctacctggtctggctcggggtgagcaggaacatccagaaaggaagggtcggcaccagcctctttgccgaaatgaagcggcggatgaaggaccagggggtgcgcatgctccttatcgatacttcggccgacaacctgccggcaatccgtttcttcgagaagcacggcttttccgatatacaggagcatgtctacatgtccctcaacctgacccgcaaggcgaaaaggaagccgggaaaaaaaacatgaccgaccgcactcagcgagtatggcaggctatcgacccggggcggctgcgccggaccttcatcgagatggtgaatatctattccccgtccggcaaggaagaagacatccagctttatctggaaggcttttctccacggccggttttgccgtccgccgccaggaggttgacgaggatcgttacaacctctgtctcaccatgggaaccggtgaacctcaactctacctggtggcccatgtggatacggtgccggcctgggatctggaggactttggcgccagagaagagggtaggataatttacggcctggggagcgccgacatgaaggggggctgcgccgccatgatcgaggcatggttggctatggccagtgccctgaaacctgaggagcgtccgcccgtcgggctgctcctgacggtgggcgaggaggagaatggagacggcagcgccgcttttctggaaaactaccatccaccatgggcagtgatcggcgagccgacaggccttatcgcctgctttgcccattacgggtatatggaggcgggctttgtcacccgtggcgtgcgcagccattcctctctgccggagctggggcacaatgcgtggaatccatgctgcgcgttctgatgcacctgggaagagatcccctttttgaccgcgcccaatcggatatcgtatattcaattcgagaaatgagctcctcacgtgccggctttgtcgtgccggaccgttgcgagacctggatcgacctgcacctaccgcctgcccagaacccggtggtggttcaggaggcgatccgtcgcattgccgcaggcgccgagctggcaattccagggcttgacctggatgttacctttgattttgcctcggccggttatgccctggacatgaacagccacctggcgaaaacactggagaacatctacccggagctcggcttgaaattgcgcctggatgcttttcgctcccattccgacggcaacctcttttttgccgcaggcgccaaaccgctcatcctcggccccggcgccctggagaccgcccacacctcggacgaacaggtgatattcgatgaagttgcagccgccgccaggatctatgccgctctctgtatcggcgccggttgatccgaccggacattaccaacaggaaagggggttccatgaacatcagaaagaagattcttgactatgagttcgaagaggtgctggatgtgaagacccgcgagctgattcgcatcggctgtgcggtggcggtggggtgtcggacttgattgaagaaacacttcgcggtcgcgaaggaagcaggagcaacgcgggctgaactgaaagaagccattgcctatggcatcatcgccccctccgggcgggcgaagaattttgcatgtccatggcggaggaactggagctgtaattgtcgccgaattttgccgtttttaccgagcagctgttcaagaagagaccgaccaaacgggtatccatccgccgcaacgtcctgaacctttccctgccggtgcttctttcctccctcttccagcgtttggtctccattgtggatatcttcatagtcggcgggctgggggctgccgccattgccgcaacggggctcggccagctgctgatcttcgttgtcatgaccgtattctgggggctcgccaccggcgccaccgtggtaatcgcccatttgtgggggggaggccgccgtgccgaggccaggcgggctgcctttgccgcctgcctcgcctgtgccggcatggcgatcgtcgcctcgttcctcggctggtatttcggcgaagaactggccagattcctcggggccaaggaagatgtcctgaactttgccgccggttacgtgaagctggtctttctctacttcgccttcaccgccgggctgaatatcctttccgctatcatgcacggcgccggcaacaccaggacccccatggagggtatcatcctcgtcaacatcctccatgtcctcattgcctatccgctggtttatggtaaattcggctttccgcagctgggagtaaccggcgctgcttacgccatcaatatctctgagctgtgtggttttctctacctcctggtccaggccttgcgcaagaactacatcaagatcggcaagccggatcttcccctgttccgcagggtctggcaggtgggctacccggtggcgctggagaggattgcccagcagtccggacagctcttctattccaagttcatcatcagttacggcaccgccgcctatgctgcccaccagatcggcctttccatcgaatcgctctccttcatgccgggggcggggatgggcatcgccgcatcgacactgatggggcaggcactgcgcccgcaagatcagcagggcacggatcagccataatgaagccttgcgcctggccattattgtcatggcttcatggctccctgttctttttcatgccccatctgctcatcggcctctttaccaatgacccggaggtaatcgagaagggctgtgtctttctccggctggtagccttcgcccaggtgccgctcgccatttctttcgtctacgccggaagcctgcgcggtaccggcgatacccactatgtcttcctcgtcactctcattgccatgtgggggatcagggtcctcttatcgtacatagccgccgttccgctccacctttccctttatatggtctggggggtctttctcctggactggctgttccgcgcaaccgcctttgcctggcgctataagcagcgcgacctgcaccagatcgtactttgatggtccaccgaaaatagaactattccataccgagtgatttacaaagaattcttgatggggaaaaagcggggaaggacgccgtcggcaatgtgctgaattcacgctgtggttcttgaacgctacgggcactaggaacccactgcggtagctgtcctttgggcgtaccaacttaattttgcaaaggaatacttcgcttgacgaagcatgttgataggagtatgtaattaaagttattcaattttacgtgagagggactgatgaatgcggactgatggctgatagagtccctttttcaaaatgataggctgctctgcgggagaccttaatctgttttagcgaaaggaaaaataaaacgccccgctttgcaacgaggcgttttggacgggcgctctcagggagcgtagccggcgcaacggaagttccgttcttattgttgtaaaaaggaacaaccgtttcctaagtacactgaggattatttaaccttgtaatgacattttgtcaaggaggaattatggacaagtgtaagtatattctggggctggacattgggacaaactcaataggttgggcactattaaaggctgaaaaacaaggagtgaggctggtgccggttgggattgagcgcgctggcgttcgaatattcgaagcaggggttgcagggagcattgagcaagggcggacagaatcacatgcacagtcaaggcgtgaggcacgtatgctgcgacgcggagtctttcgcgatggtcaacggctcaggcgtgcattccgcctgcttcagaaggcgaaactgttgcccggcgatccgaattgtccttccgagcgggatcgaataatcaagaaacttgatgccgaattgcgcgagaagtgggaaccaaagctcatagacgaagagatggatacggcgctggtcaaagttgctgtgcaccataatctaccgtattttctccgggcgcgggggctggatgaaaaacttgaaccatacgaaattggccgtgcttctatcagcttgcccagcggcgtgggttcaagagcgctagaaagaatatcaaaggaaaagatgacggtgaaaatgatccgaatacgatagaaaaggcagccaaaggattgcaggaggagatgaccaaggtgaatgcccgcaccatgggcgagtactttgctagatacaatccttttgatgattcaggccagaaaatcaggagtctctacaccttgcgcgccatgtacgagcaggaatttgaattgctttgggtggcacaggcaaagcattacccggatatccttacccattcgtttcgacaaaccctgctttacgattcttatggtgttttctggcaacgccccctcaagtcccaggaccatcttgtcggcgactgcaccttggaggcaggagaaaagcgagctccctgggtattgctggatgcccagcggttccgttacctgcagaagctgaacgacaccaaagttattccacctgatggcggcacaccgcatgcgctttcgccagagcaacatgcgcttctagctgcagagctggatcgggaagcggctttgaccatgaccagggccaaggaactgctcggactgtccaaccgctaccggttcaatatgggtgaagggggtgaaactcgtttcgtcggcaaccggacagcagcgaggtttagtgaaattttgggcgaccgctggccgcagttaccttccgaccagcaggcacgtttggttgctgattatctgaaatctaaagatttgccaagtcccatgcaacggtcgattactgaacatggcctagatgataaaacagcgaagaagctggctgcaatcaagctggagctgggttattgtaatttttcacgcaaggcactgaagaaactgttgccgcatctgcgggaaggtttcaatcttcacgattcgattgtaaatgcctgctacgaaaggccgcgaccagcgccgctcgatctgctgccgcctctcatggacaacgaaaaaattacttacccgccgctcttgcaggcatatggcgcgctccgcaaagacatccgcaacccggttgtacagcgggcattgacggagcttcgcaaggtgatcaacgccattgtcagacgctacggaaaaccgtcagttgtgcggatcgaactcgcgagagacatgaaaaagaacgacgaacagcggcgtgaaatctggaagcgcaaccgggagcaggaatcgcgtcgcgacaaggcggccgccgaactgctgaaggagtgtaacattgccaacccgacccggagcgacattgaaaaagtgctgctatggcaggagtgtgggggggcgacggcgctttgcccgtacacaggcaagccgatgacgcttaccgagctgttcggcacgcaccccaagttcgacattgagcatatcattccgttcagcatcagccttgacgactcgttccttaacaagaccctctgcgacgctgactataaccgtcgtgtcaaggcaaacaaaattccgttccagctgccgagcgttgacgaaatgattgcccgtattgaacgctggccgaagagtgatacccgcgagttgaaacttgaacggttcaagatggaagatacggccgacattgaaggtttcatcaattcccagttgaacgacacccgctacgccagccgtctggcaatggattacgtcagcatgctctacggtggcaaggtggatgctaccgggcgaacctgcgtgcaggtgggcaaggggcagataacccaccacatccgcaatgtctggcgtctcaacacaatcctgaatgatggcggacagaagagccgcgacgatcaccgccaccacgcagttgacgctgtcgctatcgcccttaccgaaccgaagaccatcaagaacctgagtgacattgccaaacgggccaaggatcgaggtgaacgctggtttggccgggaaaagccgctttttccgtggcagagtttcatgcatgatgttgttgcgtcgattcatggtatgaccgtctcacatcgggtatctcacaaggtgaatacggcctttcacgaacagaccatctacagccggcaaaaggatcatgacgggaagaagtgcgtccatatccgtcggacgcttggcggcaacctgcggaagtcagatttgctcaatatcgtggatgatcgaatccggcaaatcgtgtttgagaagattcgatcgctgggtcataatcctgataagatcgacgatgcaaagctgcaaaagatgttcggaacttctgaaacgctacctgtgcttcagagcaaggatggccgcagcattccggtaaagaaggttcgggtccgcaaaacagagtcaatcattaccgttggcaacaatgggcgagagagaaacgtgtcacccggctcgaacagtcacattgaggtgttcgaggtaactgataagaagggcaaggtcaaatgggacgggtggacggtgaacagctttgaggcgttgcagcgtcagaagagcaaacaaccggtggtgaaccggatcggcaaggatgaaacctggaaattcaagatgtcgttggcaggtggagacattatcgaactgaagtctgacgagaacaagcgggatctttatgtggtgaaagtggttacagtcactcgggttggcgggaaagaatatgcaaggattcaatactctgccatcaacgatgcttcaaagaaccccaaaaatgaatctagtcttcttaatccactttataacgagctacaatgccgaaaggtattcataactcccctcggtgacattcattgcgctaatgactgacgacaagatcattgatattgcggattcagttgtcagtctcaatgtccgtcttgccaatctggtcatagactgtggcgatgaaatcggtaagaccatggtgccgcttaacgaagtggcggcgctggttttgtctaatccccatgtcataatgaccaatgccgctattgccgggattgcagcgagcggagggatcgttgttgtgacagacagcaaatttcagcctgccggaatgctgctgccgctggattcccattatacccagggtgagcggtttcgtatgcaggcagcggttgcactgccggtgcaaaagcgcatctggcagcagattgtccggtcaaagattcaggctcaggcggcggtgctcaagcggctgacaaatcacgacggtggcctgccccatctctcgtcgcgcgtgacatccggcgatacgggtaaccatgaagcccaggcagcgcagcgctattggccggccgttttcaataatcctcattttcggcgcaatcgagaagcgccggatcagaacagactgcttaactacggctatgccattttgcgggcattgacggcccgtaccatctgtggcgttgggctgcatcccactttaggggtgcatcaccataatcgctatgatccattcgctcttgccagcgatcttatggaaccgttccggcctctggttgatgaagcagtggcgaggatcgtttttgagcaaggggatggggtgcctttgggaaaggatgtgaagaaatcgcttatttccggcatcaccggtttgatagaggtggatggcgaaacaaggacgatcttcagtatcctggcaaaatctgcgtcgtcactggtagcggtatatagcggagaaaagaaaaagcttttctgccggagtggtaaatgatggcgcgacgttataatcgcgaagtctcggggtatgaatccatgtggcttatggctatgttcgatctgccggtattgacaaaagcggaacggcgggctgctgcacagtttcgcaagatgctcatcaaacgcggctttatgatgctccaactttcggtctatgccagattttgcaatagtgaggaagcaagcggcattcaccgaaagtatgtgagccttgcactaccgcccaagggcgaggtgagactaatatccattactgatcgacagtttgcaaaaatggaggtctactttgggaaaaaacgacgtgagccggaaccagagccggaacaaattcttctgttttgaccggcttgaaaagtttagacctcccgaactttcagctagttacgagaggcctgagtgtacttaggaaacggttcttcttcaacaacaacgcgaagcggcagcggcgagcctttcagggagtgtacttaggaaacggttcttcttcaacaacaacataccgtctgcatcataggtgatagcccgcagtgtacttaggaaacggttcttcttcaacaacaacgaaggttcagcgtgagaaccagccggaagaagtgtacttaggaaacggttcttcttcaacaacaacttattccctcaccctggccctctcccacagagtgtacttaggaaacggttcttcttcaacaacaacggagggaaacagcctccgcgcctcttgtgcagtgtacttaggaaacggttcttcttcaacaacaactcgtatttgcagcagcagcagcagcagagtgtacttaggaaacggttcttcttcaacaacaac

SEQ ID NO: 1903 - DNA, 5824 bp, synthetic construct
  source 1..5824: mol_type = other DNA
  misc_feature 1..5824: note = Synthetic
gatactgcctgttgcaagaaggctgtctgtgagccgtatgcgggaaatccgcacgtacggtttgacgagggggagcaggtgactgctccctactcaaccaccttcgcgtgtaactgctttttctaggttgatttttaagattgatgaaaatcaaaggcaaccacccctaacccctccttaaaaggaaggagggggataaatgcaaaaaaaacgaaaccggacaacgctggaaacagaccgcctgtagcgtttttttggggatgcatttccaaaacgacctattgtgtcacagtgctgtggtaggatggagccatgcagagaatcgttgttatcgataccgaaactaccggcctttcagtcaaaaacggtggccgcgtgattgaggtcggcgcagttgccctggagaacggtaggatcacggctgaactgtcaaccctgatcaacaccggcacaccaatcagctacggtgcctggcgggtacatggcatctcagagcagatgctgtcaggcaagccaaaaccggcagaagtctggccctggcttttggagtttgtgggcagcagcccgctggtggcccacaacgccgcctttgacaagtcttatgtgcagtacgaactggggctgctgggcttcgtactactcaaccagtggcactgcaccgtacagctggcccgcaggaaactgcctcgcctgcacaaccaccggctcgaaacggtttacaagggattgtttggcaggctgccggaagatgtgcagcaacaccgtgcgcttgatgatgcccggatggcagcgcgggtttgggtggaactacagcagaaaaactgaaaccctggacgctggttggggagggtaggggagtagggtggcggaaaagctgaggggtggtatagtagggaaagaaaataaaacgccccgctttacagcgaggcgttttggacgggcgctctcagggagcgtagccggcgcaacggaagttccattcttattgtcgtaaaagaacaaccgtttcccaagtacacgttctttaaataaccgtatgattcaatcttgtcaaggggggataaatggcaaacgaaaacaaaaaattcattcttggtctagacattggaacaaactcaattggatgggccttactaagagctgagaaacagggagagcggctggtgccggttggtatcgagcgaaccggtgtcaggattttcgaggcaggtgtttctggaaatatagagcaggggcgtaccgagtcccatgccaaggcccgccgtgaggcaaggatgctgcggcgcggcgtattccgtgatgctcagcggcttaagcgtgctttccgtatgcttcaaaaggcaggactgttgccgggtgatccacacagacctgcggagagagaccggatcatcaaaaaacttgacgctgaactgcgtacaacctgggagaaaaaacttacagccgaagggatggacgcggctgcagtcaagatcgcggttcaccataaccttccgtattttctccgggcgcgggggctggacgaaaaactcgaaccatacgaagtcggtcgcgctttctatcagcttgctcaacgccggggattcaaaagcgcccgtaaaaatatcaaaagcaaagatgaagcagacagtgatccgaacatgattgaaaaagctgccaagggactgcaggcagagatggcaaaggtaaatgcccggacaatgggtgagtattttgccaggtacaacccctttgaatcgtatgacctgaaaattcgaggactttacacgcttcgtgcgatgtacgagcaggagtttggacttctctggaatgctcaagctgcgtatcatccggaaatcttgaccccggcatttcggcaggaacttctctatgatgtttatggcgtgttctggcaacgatcactcaaggatcaatctcatttagttggcgaatgcaatctggagacgggagagaagaggaccccgtgggcactgctggatgcccaacggttccggtatcggcagaagctgaacgacaccagaatcattccgcccgatggtggtgaatcgtatcgaatgtctccggaacagtacgacatccttgccggggagttggagcgggaggctgccctgacaatgaccaaggccaaggagttgctggggttgaccacccgttatcggttcaacctgggtgagggtggagaaacccgctttgtcggcaaccggacggcggcgaaatttatcgaggtgttgggagatcgctggctgcagttatcgtcagaacagcaaaaccgtttggttgcggattatctgaaatcgaaagacgaaccgaatcccatgcagcggtcgattgaggaacttagccttgatgataagcaggccagaaaacttgcgtcgatcaaattggaaccgggctactgcaacttctcccgcaaggcactggagaaactgctgccgcatctgcaggagggcttcaatcttcacgattcgatcgtgcatgcttgctatgaaaaaccgcaacctgcgccgctcgatcttctgccgtcgctcatggataacgcgaaaatcacctatccgcctttgctgcgggcatacggggcactccgtcaggacatccgcaacccagtggtacaacgctcgttgaccgaattgcgtaaggtggtgaacgccattatccggaaatacggtaaaccggcagtggtgcggattgagcttgcccgtgacatgaagaagaacgacgagcagcggcgagagatctggaagcgcaatcgcgacgtcgagtcgcgccgcaccaaggcggcagcagaactgttgaaagagtgcaatattaccgatccgacccgcagcgacgttgaaaaggttctgctctggcaggaatgcggcggcccgacagcgctctgcccttacaccggtaaaccgatggctctgtctgatctgttcggcactcatccgaagttcgacatcgagcacatcattcctttcagcatcagcctcgacgattctttcctgaacaaaactctctgcgatgccgacttcaaccgccgggtcaagcagaacaagattcctgggcaattaccgggggtcggggagatgatcgagagaatcgaacgctggccgaagagcgatacccgtgacctaaaactggaacggttcaaaatgacggatatggctgatattgatggcttcctgaattcgcaactgaacgacacccgatacgccagtcggctggcaatggattacgtcggcatgctctatggcggcaaagtggatggcgctggacgcactcgtgtgcaggtgggaaagggtcaggtaacgcatcacatcaggaatgtctggcggctcaatacaattctgaacgatggaggacagaagagccgtgacgatcatcggcaccatgccgtggatgccgttgccattgccctcaccgagccgaagactattaagagccttactgatattgcaaagagggccagagaacggggtgagcgttactttggccgcgaaaaacctcttttcccgtggcaaagcttcatgcacgatgtcacagcatcaattcgccgactcacggtgtcccaccgggtttcacataaagtaaacacggcctttcatgagcagaccatctacagtcgtgaaaaggagtatgacggtaagaagtgtgtacatatccgccgtacactgggtgggaatcttcggaagtccgatttgccgaatattgtggatgaacgggtaaaagaggcggtatttgcgcgtttacggcaacatggtttcgacccggagaagatcgacgattccaaactccagaaaatcttcggaacgtcggaaaacctgccaatgcttaccactcgcaccggtcgacacatacccatcaagaaggttcgagtccgtaaaatggaaacggttatgactgttggcagcaatggcaaagaaagaaatgtttcccccggttccaacagtcatattgaagtgtttgaggtgactgacaagaagggcaaggttaaatgggacggttggaccgtgaacagctttgaggcgttgcagcggcagaagaataagcaaccagttgttaatcgggttggcaaggataaagactggagattcaagatgtcgttggctggtggggatgttattgagttgcagactactgagaataagcgggagttatttgtcatcaaagtgatttccgtggccagagttaatggtaaggagtatccgagaattatgtatactccgattaatgtagcgaaaccggttaagcaggagtcaagcctacttgacccgttaagaaaacagcttaaatgtcggaaggttgccatcagtccgcttggtgagatccacgacgccaatgactgatgacaagatcatcgatatttctgattccgtggtgagtctgaatgttcgcctcgccaatctggtgatagattgcggagaagaaaggggcaaaaccttggtgccgctgaatgaggtggcggcggtggtcctatctcatcagcatgttagcatgacgaacgcagcactggccgggattgccgccaatggtggtatcgtcgtcgttaccgacagcaagtttcagccagcaggcatgctgttgcctcttgatgttcattatgcccagggcgagcggttccgcatgcaggctgctgttgctcagccggtgcagaagcgcctctggcaacagacggtcagatcaaaaatcgcggctcaagcgacagttctcaagcgccttacagcacatgatggtgggttgccgcatcttgctagccgggttgtttcgggagatacgaggaatcatgaggcccaggcggcccagcgctactggccattggtgttcgataatccccatttccgacgcaaccgggaagctgaagatcagaaccgcctgctcaattatggctatgccgttttgcgcgcactgaccgcccgcgcaatctgtagcgttggcctccatcctgccttggggattcatcaccacaatcgctatgacccctttgctttggcaagcgacctgatggaaccgttccggccattggtggatgaaactgttgccaagatcgtcttcgagcaaggggaaaatgttgtcttggggagagacgtgaagcggactatcattagtggaatcaccggcttgattgaagttaatggagagaggagaacaatattcagcgtgttggcaaaggcggcgtcttcattggccgcagtgtatgcgggtgagcggaaaaaaatgcttctgccggagtggtgatttgtggcgaggcgctacaatcgtgaagtttcagggtatgaatccatgtggctgttggcaatgttcgatctgcccgtcttgaccaaggcggagagacgggcagcaacacaatttcgccagatgcttctgaagcgaggattcatgatgttgcagctttcggtctatgccagattctgcaacagcgaggagtcaagcggcatccatcgtaagtacgtgaatcttgccctgccaccaaaaggtgaggtccggttgatatctatcacggatcgacagttcgcaaaaatggaggtttttttggggaaaaaaaggcatgaaccagaacctgaacccgaacaaattctactcttttgacaggttttagagagtaaggcctccagaactttcaggtagttgctggaggcctagtgtacttgggaaacggttcttcttcaacgacaactgcgccgttggtgtcgccatcagcttgactagtgtacttgggaaacggttcttcttcaacgacaacgctgcatgtctgctggttcaatactcttctcagtgtacttgggaaacggttcttcttcaacgacaacggcgttggtggtgtcaagattatactggttagtgt

SEQ ID NO: 1904 - DNA, 23516 bp, synthetic construct
  misc_feature 1..23516: note = Synthetic
  source 1..23516: mol_type = other DNA
cttggaatcggacgtccatccacatacgccacgattatcgacactattcagactcgcggctacgttgaaaagggcgacagcgaaggtcagccacgagatgtgattgtcctgaactataatggcgaggaagttagtcgaagtattgtccaggaaaaaactggttcgacacgcggcaagcttattccaacgccgagcggcgaactgattgccgatttcctgacggaccactttacacaaattgtcgattacgattttaccgccaacgtcgagacggaatttgacaaaattgccggtgctaatctggaaaaaagcgcaatgttgcacggattttacacgcctttccataaattaatcgagcaatctggcgggattgaccgaagtaaggtcggcgctaatcgtgaagtgggaattgacccgaagacgaataagccgattattgcgcgatttgggcggtttggtccaatgctgcagctgggcgaaactgacggcgacgaaaagccgcgttttgcgccgctaccaaagggtgagaaaattgagacagttaccctggagcaagcactggagatgttcaaattgccacgcgtcgttggtcaaacagaggacggtcaagacatcaaagcaaatattgggcgattcggtccatacattcaagtcggtaaattgttcgtttccattaagccagaagacccgcacagcattactttagaaaaggcgcgtgaactttacgccgccaaattagaagccgaagccgctaagaatatcgccgaattcccagatggaattaaggttctcaatggacgattcggtccgtatatcaccaacggcaccaaaaatgtcaaaacccctaaagatacagatccgaaaactattacccacgaaaaagccttggaactattaagtgccacaacagcgaaaccaactcgcaaacgcgtagttaaaaaagccaccaaaacatccgctaaaaagaaatagcgtttttatactatccaataattccggataataaaaactcttcatataatctattgcaaaaaacgtaaaataaatgctataatttatatcagcaattatggcatttacttattgacttttgtcaaatgcaattgtataattaaaaacatattttcaatcaatataacctgtggtgaggcagagaggatgtttctagcaacatgagcgagacagcaaaaaccgagcaaagcgccaaattaaattctgtcgtcgatactattatttctaagattccgcaagagcgcgaaaaggagattatttctcggcgatttggtttgtatgaccgaaaagaaacattagagttaattggcgatatgttcggcattactcgcgagcgcgttcgtcagctagaaaaagcaatcttaacgcgtctacgtgcagctgtcgccgagggagaacttccttcggttattgctatggaaaaagagatcacttcgagtttgtctgagatgggacgagttgcgcgcatgcaggatttggcgtcgcatttcctcggtaaagaagctactgcaattgaccgcgctcgtgtggcgttcatttctgagctggcagaaaacatcacgattgttacagagaatgacgattattaccaagcggcagcaattgacactctcggcaacgaaaagcaaattagagcacgagtcgaagaagttgtaaagaccatcaaaaaacacggtgagcccgttactgcggaagaattgcacaaaaaattggactatgaacatccttcaaatattgcggccttggctactgttagtaaaaaattggctagcttaaacgatcagtggggactagccaaatggccagcggtcaacccaaagaacatccgcgataaaatctacgttgttctggacaccaacggctcgccgatgcatttttccgacatcgccaagggaattcgggacagcgaatttaaccgccgaagcgtcacaacccaagcaatccacaacgaacttattaaagacaagcgctttgttctaatcggccgcggtatttacgcgcttgccagctggggctacagccgcggaactgtagcagatatcattaccgatattttgaagaattccgaaactccgcttcaccgcgatgaaatcgtccgtcaagtcctcgacaaacgacaagtcaaggagactactattctattaaaccttcaatcaaagccgcaattcaaacgcgtcgctaaagccacatacgtttttgaagaagccgcttaagctaagttgcaaacttctttcagaggtgagataatttacacataatgcagattatttcttggatcatcggtacgttattgcaatggtatgtttggataccaatcgtggcagtcctgatgtttttgacgtggcggaattatcggaagatagaagattttaccccagttgagagcgtgcttttggttctggaaatcccacgcacaaatgacaagcaagaacttgccgccgaacagttattcgcttcactacacggaattcttcgcgacaataaagaattgcgattatctggcggacaccaagagcacatcagctttgaaatcgcctcagtcaatgggcaaattcgcttttacgtttgggtgccaaaaaccctgcagagctttgtcgagggacagatttattctcaatacccaaccgttcaaattcaccaagccgacgaagattataccgagcacgagcgcgaccacgaagttgcttactcgacagaattgacattaaccaccgatgaatttctcccgattcgcactttccaaaacttcgaagtcgacccgctggcgggcattacgggcacgttggcaaaattagaaaccaccggtgaagaattgtggattcaggtgctggtcagaccaatcccagatgactggcaaaacgccgcagatcgatatatcaatagtataaaaaacggacgaatgttctccttgccaggattcggcggcagtatgcagtggctaatcggtgtacttggcgcattatggcaaccaccagagcagggagtcgggcaatcaaccaaaatcgagctgtcagaccgcgataaaactcgcatttctgaagcagagaaaaaggcgaccaagctcggatatgaagtaaaaattcgcttggtttatatgggcgaaagtcagacgaatgccaagcttcgtatgcaggcgcttgtcggtacgtttaagcagttcaactcaactaatctcaacggatttcgcgccgtcaagggtgtgtttggcaaagaatttattgataaatatcgcaagcgttcgttcatcggcgacggttttatcttaaatatagaagaattggcgtcagtttttcacttgccacacaccaacgttgaaacgccaaatatagtttgggcaagctccaaaaccgcagaaccgccgtccaaattgccagtcttaaccggcgaagacgtcaacgatgaccaaatttctgcctttggcgtcaccaacttccgcggcatcagccaccaattcggtatgttgcgctatgaccgctcacgccacgtttacataatcgggcaaacgggtgccggaaaaagtggactattagagctcttcgccttaagcgacattttccataatcaaggatatgccatcatcgacccgcacggcgacttcgcaatcaacaacatgaaatttatccccggcagccgattgaacgacgtgatctatttcaacccagccgacaccgcatatcctctgggattcaacccactggaagtcacaaatccgaaccaaaaaaccaacatctcatcagaaatcatcggcgttttgaagcgtattttcggcgattcgtggggaccgcgacttgagtatattttgcggtatacaattctagctttgctggatcgaccagaagcgacgatgcttgacattactcgtatgctaacagataaggaattccgaaaagaaacgctgacttattgccaagacaccgtggttttgcaattctggaatgttgaatttgccagctggaatgacaagtttgtcgccgaggcaattgcgccagtcttaaataaagtcggggctttcaccgccaatccaatcatccgcaatattatcggacagccaaaatccacgttcaatattcgccagattatggacgagggaaagattctaatcgtcaatctgtccaagggtcttatcggtgaagataatgccgccatcctcggttcgtttttggtcacaaaaatccagcttgccgccatgtctcgaagcgacattcctgacgtccgtgaccgccgcccattctatctttacgtcgacgagttccagaacttcgccactgattcgtttgcgactattctatccgaggctcgaaaatatggccttaacttgaccgttgccaaccagtacatttcccagatgagcgacacggttcgcgatgcggttttcggaaacgtcggcaccatgatttctttccgagtttctgctgacgatgcaccgattcttgccaagcaattcgagccgaacttcgaggcaatcgacctgcttcaaatgcacaatcgtaattttgttgtcaatatggttatcggtggcgaaaaaactccggcgttttctgcccgcacattggaacttccgccaagccaagccgacaacacgccgcacattattgaacattcgcgtcgcatgtattcgcgaaacagggaagatgttgagaaggaaattgacgccgcgataaaacctgttcgcaaccagaaaaagcaaccagccaaacctcaaccgcagcctgcaaacaacgctccagcggtcaatagccaaccggaaaagcagcaacccgcggcaaacgatggcgaagttgttctgcaaattcgcggcaactataacgtagtcacagaaaccgcgatcaatacagttacaccgctagattcagctacgccaaaaagacgacgccgccgacgaaaaaagaacactacctccgcttaaaaactattcgtatcgccactgacgcatatcggaattgtaaacgtcggtaattcgcggagaaaccaacgtggaagtctgtccagacggcaccgatacggcgttttgtttggtcaggaaggtgagcagtttctggttttgatatcgtaggtttttcggcaatggctgactagccacgacctcagcttgcggcgtagacatcacaaaaccccactcgccaaacgaaggcacattgaccgaaaacgctgtcacatatcgctctggatgagatgacttgacggtgtttgccaccatataaaaagcatgcggagagaaaaatgaagacgtcgcttgcgtcaccataaccccacgctccgttaaaatattaccgatttgacgatataattgttcggaatacaacttggctaatttttcattcgacggatccaccagatcaatcaacacaacatcatatttatccttggtagagaaggcgaattggaaagcatcttgattgacaatagaaacacgcgaatcatgcagagagcgctgatttatatcggtgagaagatgattagttttcgccagattagtcatcacctcatcgatatcgaccaacgtaatatgctcaacgctgggatatttcaaaacatcccgagccagtaagccgtcgccgccacccataatcagcacacgcttcgggttagcgactgaagacagagcggaagcggacagcgtttcgtgataacgcgcttcgtcaaggctggaaaactgcagattgcgattcaaaaacaacctcgtatcattcttatatctagtcaggacaattttctgatacggcgtctgctgctgccacatcaccggatctttatacgtccgtttgtcaattccgtgctcaatttccgtcgcaaaaatgaaaaatcccaccagcaacattgttgcaataacgctaattgtcatcacaattttcgacgctttcatttgcttaagaatcagaaccgcaacgccaatattcaaagccgccaccaggtacgcgctgcgcatcaaaccaagatacggaagcataacgagcgggaataatagcgacgcaattaacgccccaaaataatcgagcgccaaaatcttactaaataatttcaccgaagacttgcgaccgaactcctgaaacatcttcattaaaagcggaatttccagcccgatacaaataccaattgccagacttatgacggcaaaaattagccaatgcgaacgcgtaaaaacgaatcccaaatacatcagcatcaccgaatttccgccaattagccccagaataatttcgtttgttgcgaagctggtcgctggatgaagcttgatgtaattgaccagcaatgagccgattcccatgccaaacagcgtcacgccagttgccagactaaagctcaaaatcgaatcgcccaccagatatgacgcagctgcgcctaaaatcagctcgtaaataattccgccaattgctactaaaattgccgctgcaaatagagcaatttgctcccgttttttcgtacttgatcgtgacattataactccttttatttaccaagcccgccgctactgccgccgtaaacgctgcgcgatccgccgtgacctccgccattactgccgtcggaattattgtcaaagatgaacgcaaacaaaataatagcgataaatatggcaatggctataatcgtcgtccagtcaatcggcttaatggtcctgccgaacatttccttttgatctttgtcactcaattgaaccttgcgataggcgtcatattcgcgattgttatacttctcaatcgtgatcaactgacggtttttcggcgcgctagtatccttcaaagtagcgtacgccatcagttctttcgggaaaacttgatacgtgtttttgcccttgatattcataatttcaccaattccaacctcgtcaaccaccacaatgtgatccttgccatcctgctcagaaacggtgaatgattgaccttttttcaattgcgttggatcaattgcctgggtgaaacgaatcggctcatacagagaaacggtttgatcgctgtgatcatattccacccagctatcataatcagccagcccagtaatctcccactcttcccagtagtaaaatcgcttgtctttcttatcccattcgcgaaaaagcaaacagccaacaactcgcagattcgtcttcttgccggtcaaaatctggttaattttaagtcgcgccttggttcgtttcatattacaatgccatttctttcataattatgttttttgcgcccagcagccgtgcaatcagctcttttatttgttgcaatttatcatcatccagcattttacaagttgtcatcgctatatacgccacgccgctttctggccacgtatgaatagcgatgtgcgactccgacaaaagcagggcggcgctgattccttgtggagaaaattgatgcatcaccgattccaaagagtgcaagcccgccaattccgtaacatttcttaacattttctgcagctcatccgcgtcattaagtaaagcagaatcaacttcgctcacctttatggttatagattggaccgcggcatacatattatagtaattatatcatctctagggcgccaggggtaaaggtaaaacgcgactcttagggaatatcggtatttagattattagggaattataaccaaataatacagaaaaaatccccgaatcccattaccgggatttaagtggggattcttctagttccactatagcaaacaatcctcaaaatgccaacgatcaaatagcctgtaaatttcttagaagacagataatagggcgggatactctctatgagggcaacataagaaaaacccctgtgtcgccaggggaacttatcgaacctggttataacacagaggcttctgatcgcaatatagcacgagaagcccaaaatatcaacgatgagaatgatcacgccacaataagaaaatcccccatggagccagcagggatgaacccgtcaactgagttacaccatctaggggattctcgtgtggatagtgtaacaaataatacaacaggactcaatactctttatgaaggtaacgtgcgaagccaagaaaaaagccgcccaggcgaccttaatggtgcgccccgtggacaagccgaacggggactgggcgacttttctaatgaaaatatagcacgagaagttcagaatgtcaatgaggtagataaattaggcaatgtgttagcttatgatatttcaggcataagaaaatcgactgggcgcggactcgaaggttccgctattagcgcagatgcgcttgaccagtcgattgacaattctagtatagcaaaagatcctcaagatgtcaatagcgataaattccagcaccctcttcaagaaactattaacgaaatggaagccaaccctaagcctagaatgactagggaattaagagaggctatagacgagtttatatatgagaatatagaccacaacctattcaacaacaacgctatcgtgtaggcgcaatctgtcgagatggctggcaatcacatgctactggaagaggagcttgctcacaccacggtggagtaagtgaatggctgtatgaataattacctgaaagacgcattgtctatgatattgatacttgcgctaatgggaggaatatatgctcttggagtatacgcatataggcattacttcattaatcctaccaacaataactcaagtcataccaggagcaattcatcgtatgaagataaatctgatgaagatgatgtatattacgaaaattgtactgaagcccgtgaaaacggagctcagtcaatccgtgagggtgaacctggttatcgtgaagagctagacagagacggtgacggtatagcttgtgaaccatggcatggtaggtagttgacaaactacccctgttatgctacaatgcaaccatgaaaaaagccgtaatcgtcactgctgttttactgctcatagcaggtgctggtggtagcttatggcttaaaagacgcttagataatcaaatagcattagcggcaactcaagaacaacaagaagagcagccgaagcaacacaaaccagcatttgataaatacgacaacggtcccgcagatcctcaagaaatcctagaattagtgaatcaggaacgggcaagaattggcgtagcaccattggtaatggacgagaatgttcagaagagcgcgcaactcaaggcagacgacatggaagctaagggctacaggcagcatgatatacctggattaggtgatatgtacacgcaagaaatgtattatctgatatatcagcaggctaaatgtactatgagcggcgaaaattggactgcgggagcaaacattagtagtcgtggcgcctttaactggtggatgaattcagagtctcaccgtaaagcaatacaagatcctaagtatacaaaaattggaataggcgtaggtccaaaaagccaagtagccgtccaacacttctgtggatttaactaataactagcatatagcacaaaccccaaatctccttattaataaggagattttttcttatgcaaggaaatgaatcatatcgtcagtaccttcaatatcacgcaaacaatcacccgtcagcaaccaaacgagcagaagcacaagccctactaaatgttactggagatgacggcggacttaacggctacttcctaataggcaatggtactaacaataaaggtcaaactgtcggagaacaaaagtctaatggctacactgcgtcatccctcaaccgttcagtaaatccgtggtggatgaattcatatgccagttggcagaatacgaccaaaataatacttgcgcaataatattaagtgaggtacactgtagttacagtcccttaagtaaggattgtatcaatatctaaattgttctaggtttctataataatctggcggtaaaaatccgctgtaaagtatatgaaatactggagcaaagcactaatccgctcacttgttgggcggattatcttttttatgagtaaagtatttacgctttcaaatattctattttggttgtataattgcattaaattatctcacaaaaaggaccatcatgactcaaaaatattcatattcaccaaaaaaatattcactaggcctagacatcgggacatcctcaatcggctgggcggtattggacttagataaagagcgcatccatgatttaggggtgcgcatttttgaaaaaccagaacatccgaaaagcggagattcgcttgccaaacctcgccgcgacgcacggtcagctcgccgccgcttaaaacgacgacgccaacgcttaaacaacttgaagcaattctttattgaccaaaatattctcaccagagatcgaatcgaagaagtattaagtgacaaatccaaatttaacaaattagacgtatattccctgcgttcaaaagcactcaccgaggaattatccccggaagagctgttcaaggtcatgtaccaaatcgccaaacgacgtggatttaagtcgaatcgtaaagtcgaggaagagtcggaaaaagaaggtggccgcgtatcaaaagccttgaaaactaatgaaaagttcctcgccgagaacggatataaaactgtcggcgaagctctaagtcgcgatgaaaactttgcgtcgcataaacgtaataagcgcgatgattacactaatagtttttctcgcagtgattttttgcacgaattagaaaagattattgaggtccagaaaagatatgccttaaaaaacgtttccgatacagcgatcaatgaaatgctttacggtttggacgatgacaaaaatgtcgtaaacgtatcagcaattatgtaccagcgcccatttatgactgaagagctgattgaaaaaatggtcgggaactgtactttcgaggaaaatgaaaaacgagcaccgagagctagctacagcttcgaaatttttcgcttggcaagcgacttatcacatctggtgttcatacctcgcgacgccagcaagcgccaggcaaagcgagaaaatctagagataaggttatcttcagagcagataaataaagttatcgaagccgccaaaaatcaaaaaagcctaacatataaaaaagtgcgtagcattgcgggaattagcgaagattacgttccaaaatatacacacggaaagaaaaaggacggcgatgaattcggagagggaaatgcattcggcggcttaaaggcctaccatgatattaaaacagcactgaaaaatctaccagaagattgggcaaaaattgacaacgaatcaacaatcaatcaaatcgcttatattctcactacacaaaaatctgacgaaggaattaaagccgaattaaatgcattgccaatttctgatgacgccaaaaacgcaattatcaaaattaaagctactaattttgggtcattctgccatctgtcgataaaagctttgcaaaaaatcacaccgcatattcttaatggtatgacttatgataaagcctgtgaagccgctggttacgacttcaagaaacaatcagctagcctagaacaaatcaccaatcccgtcgtaaaacgtgccatatcacaaacgctgaaggtcgttcgcgccattgaacgcaaatatggtaaaccttatttcattaaagttgaaactgctcgcgacttagcgaaagacctcgaagagcgtaagaaaattaaaaaagaaaatgaagagaatcaaggatataacgaagacattaaatctataatcgctgatggatatgaagcatcgccaaaaactaaaggcggcaagcaacttctcagccacctaaaagaacttagcgtaccactgaataaaaacgccgattttaacggtcagcaaattattaaggttaagctctatcgcgaacaaaatggtatttgtccatattctggaaaaccaatcgattttgacacaatgttacaagatgataatgcatatcagatagaccacatcgtaccattttcacgctctaataatgacgggataactaataaagtactagtactgacagaggaaaaccagaaaaagagcaataaaactccatttgaatattttggtgcagatgaaaaccgctggaaggagttcgtcgccagagtagagtcgatatataagacacgcgatattaaaacagatgataaggccacaaatgccatcaattacaaatataatggctatgcaatgaagaagaagcaaaatctgcttctacaggattataaaaatgatagctggaatgtacgagccttaaacgatactagatatatcacacgatttattcagaactatttacgccaaaatgttgactttgcaggagataaaggaaaacagcacgtaatcgcaccaaatggaacaacgacagcatatctgcgcaagcgttggggtctggctaaagatcgtagcgaggacgttctacatcacgccaaagatgcggcagttgtagcagcaattagcccaaagattatctatcaagcaaatctcttctcgaaagaacaggagatgaaactgtatttgaataacgctaaaacaattgataaaaaacaacaaattttattacaatctaccgacgagaacactggcgaaattactgatgaagcgacatttacccaaacgcaaaaagacctcgcacaagccgaatatttcaagctgcgtagcgataaagagactaaaaatcgctttccagacccatggacagattttagtaaagaaataaggaaacgcagcctcaacaccgatatcaccacactacaaaatgaactacgcggacttgataattacgacgaagacttccgtctaagcgtaaagccaatctttgtttcacgagagattagacacaagatacgaggagaagcacacgagtcaaaattgcgatctaaccgaaatcgtaatggacaaaacctcatacgagttcctctaactgagctcaccctacaaagactagaaaattctcttgcaaaagaagagtttgatagccagaaaaataaaaatggatctagtctatacgaaaaactactagctcgacttaatgagtgtaacggagatgcaaaaaaggcttttaatcctccatttaagctgtataaaggccccaaacaggacaaaaatggtaatcctatctcacctgtagccgcagttaaagtctatgacaagaggggtgtggtttctgttggtcgtaaggcaaatgcaccagtcgcccttgctgagatggttcgtattcgcgtatacaaaaaagatgaccaaatatatatgatacccgactatcgcataaacatactagaaaataaagagccgatggaactcctaaaaccattcaatggagtatcaaaaattgacaatagttttaattttatcggttatttgtacaagggggatttaataacaatacaaaaagacgaccaaactttcgttggatattttgtccaatttgaaggcgacaatcgtataaccatcaagagccacttagccgcagacagttctaggaattcaaaatctacagtaaaacgagaatcgctgtctggcattaattatctaaagatacataaagtagatgtactgggagacgtgcattttagcaagggtgtcgtatggcctggcgcatcgtagctatcgaaaatcctgcgcggcttagcgtgcgtggtaatcaactagtaatcgcacaggagatagaatctactcttccaattgaagatattgacgccttaattttagacaattacggatcaactatcacgacaaatttgctgacagcactagctacaaaaggaacaaccactgtaatatgcgacgaaaagcatttacccgccagtgtgcttttgccatattcacagcattcacgtcaagccaaagtttcgcgtcaacaattgtccatgagtcagcccttaaaaaagcaactatggcaacaaattattatcagtaaaatcacaaatcaagcagatgtcttacaggatcgcgggctagacgattctactttgcggtctttagctaacgatgttaaatcgggcgacaccagcaatcgcgagtcaattgccgccagaatatattttgaccaaatactgggcgacgccacacgccgcaagccgatctggcacaatgctgcattaaactatggctacgctatggtgcgaagtcacattgccagacatattgctgctcgcggactagttgcctcgcaggggctatttcaccacaatgagctcaatagtttcaatctagccgacgacttaatcgaaccttatcgcgctgtcgttgatatgcacattttagagaacgtcgcgccacaccacaccggagacccggattccagcctcaccaagcacgacagacaactcgctattgacatattaaattattatgttataatgaacggtaagaagtttaccgtgagacattcggttgagcgaacagttgagagctttattgaatgtatagagacaaaggaggcagataagcttcttctaccaaaaatcgtcctccagtgaaaaggatgtcatacaaacttatgagggtcgcagtattttttgatttgccgaccaataccaaaacagagcgcaaggccgccacacagttccgtaaattcttattggacgatggttttgacatgctccagtacagtatatatacgcgactatgtccaaatcgtgacgttgcagaaaaacatatgatgcgaattaagagacacgctccggacagcggttcagtgcgattactttatttaacagagcatcaatttacacacatgcacgttattgttggcgaaaaaactactcaagaaaagtccgttccagctgggcaattagcatttttctaaccaaaaatccccctcgtaacagagggggatttaaggaagtattatatcaatatctaaattgttagggaactataacaggaatgacatatggatcgcagcctgcctaattatatcaatatctaaattgttagggaactataacgccgtccgcaagtatgcttgccgagttattattatatcaatatctaaattgttagggaactataacggtctgaacggttacatctcaaacgctcgcattatatcaatatctaaattgttagggaactataacaatatagaagggctgaagaaagttcttgagattatatcaatatctaaattgttagggaactataactaagtctatctgtattcgcatatataccctattatatcaatatctaaattgttagggaactataacggctatgatagcacatatagtaaataatagattatatcaatatctaaattgttagggaactataacgatcgtaccaagcagcgaaacactggacgcattatatcaatatctaaattgttagggaactataacccatagcggtgttcaatcatcacattaccaattatatcaatatctaaattgttagggaactataaccggcttgaatggatacatctcaaacgcccgattatatcaatatctaaattgttagggaactataacaagaagatagtagtgttaaacttctgtaagattatatcaatatctaaattgttagggaactataactctcactaagtatattactaaagatatgctattatatcaatatctaaattgttagggaactataacataaaaaatgatgatgttattcgctttattattatatcaatatctaaattgttagggaactataacgcaagtctattaatactgaatctagttattattatatcaatatctaaattgttagggaactataacaattggttgtaatgctgggagtgtggtgcaattatatcaatatctaaattgttagggaactataacaatgatttacgcaataacggggcttgcaagattatatcaatatctaaattgttagggaactataacagtttacatctttgtagtcctatgtttattattatatcaatatctaaattgttagggaactataacataaaatgttagttactagcgataggtttattatatcaatatctaaattgttagggaactataacttgatgctcacgataaaacctcaaaattatattatatcaatatctaaattgttagggaactataacccatcaatccatttttgaccagtgtcctgtattatatcaatatctaaattgttagggaactataactcccacgcctgcatgtagacgacctacgacattatatcaatatctaaattgttagggaactataactatgaaaaaatttgtgccagaatttggaaaattatatcaatatctaaattgttagggaactataacatttcttttttaataagaataaagatgttgattatatcaatatctaaattgttagggaactataactttacggtctatctgcttttctgattttgtattatatcaatatctaaattgttagggaactataacggttttcagcaaagtgttggtagtgtggcaattatatcaatatctaaattgttagggaactataacatgctggacaaataactaagactttgcgtgattatatcaatatctaaattgttagggaactataacttcttgcgtttttgcttatcgtaacaatcaattatatcaatatctaaattgttagggaactataacatgacgcacctcaatccagcggcggtgtgtattatatcaatatctaaattgttagggaactataacacattgagaacaactattatcgaaagaattattatatcaatatctaaattgttagggaactataacgcggtaattggcttggacttggcgttcacgattatatcaatatctaaattgttagggaactataacaataatagagcattaaaagaatacctacagattatatcaatatctaaattgttagggaactataactaagcctgacgaatgctgttcgttacccacattatatcaatatctaaattgttagggaactataacactgaagttgaaaacaactggtaaaatggtattatatcaatatctaaattgttagggaactataacatgacgccacatctgtttttgtgaacgccaattatatcaatatctaaattgttagggaactataacgattttcaggcacagatgatttatcatcagattatatcaatatctaaattgttagggaactataacatcaactctgtgccgtcgttgccaatagctattatatcaatatctaaattgttagggaactataacaataatagagcgctgaaagaatacctacagattatatcaatatctaaattgttagggaactataacgtcggtatgtataaacttttaaattgttaaattatatcaatatctaaattgttagggaactataactaaaggcagtattaacaacagccgtttattgattttttatggcggcagtagtaatatttacgcagaagtaggtagcgccacccgtattgaatgggaaaagcggacctacttcttttttatgatgaatgaatatttaaaagcccgaaagcgcgacttttctattttcgcttagtcttttttattgatattgaccagcaaaattattatgattatcagtagcaatactgatattaacaattcccccatcgtaaatgagtgaaaaataattccattatcaagtattttagttccgtttgccatattatcctcctgccttcattttagcataatattttacgcgttcatttatgtattttagcttatcaaatgtataaattattgcgaagtcgcagaacaccataacaatatagccaactaagtatattgcggaatctagcaaatagcgacaagaggaggcttgagcagtcgcttaaaaagtagtatgatatctggacagttgctgtgatttgcagctgtcattgtatgaagacacctcattttcgaggtgtcttttttacggcttcgaaaaaaataataaatacgctccaaatacaagcttaattgccgagtcaatatatgctatcacctctaatggaatatcagtaaaaatataccctacaaaaacattaatggcgcaaataaaacctagatatatcattgtttttccatgcacaaaataatacgggaaaaaatgtagtgcggttgccatcagcgctcccagccaaatcaatctccaattttcagtcgcaaagaatggtccgcccagcaaagccattaagataaataataaaataacggcatataaagatactttcttttgaaattcgctcgaagggccatcagacagcctattcaacacctttttattcatgttgattgagaaaaaactaataacatatccaatactaaatatttgcatatttattatttgctttcctcccattaaagtagctattgaaataatcgccgctattacaattagccacaatccacacgctctcttataattgaattctaacttttcatctttattataatttaaaaaagccataaatatctccgataaaattatcactcttattatatcaccgcaacgataaagcctaaaaatcgtaagcatttattatcaacatatgataaactaatcttatggaagtgcttatatttatagtagtagccgcaattatttttctggcaatcaaggcaaggcaggggatcgacggcgacacaagcccgattaaaactccaataaagaaagaatatgtatacatcaaaaaatcttgcgcaatgacgccaagtgaattatcattttacaaaacactacacgaagcggtaaacggatgtgtaattatacctcaggctcatttaagtatgtttttggatcacgagataaaagggcaaagttggaaagcagctttcgcgaaaataaacggcaaatctgtagattttctaatttgcaccaatgatatgaaacctctcatagctattgagcttgacgacaatactcacaatcagcccgatcgaaaaatgcgcgatgattttgtcaattcgatcatggccaacactaatatgcccctactgcgatttaaggcaggcgaatggaacagtgaaataattaaacacagaatcgcccaagctctttcgcaaaactagcaattaaagaacaatagaacaaaatacgaactaattattagtaatttttaagcatacataaggccgagtcggctgattatttatattgataaattttgcgcaatacaagcataaattataaaattataaatccgagccagcgcaagcaatcgctaatatacaacataaaacacaccaagccagaaaatagggcggtttataaaacaataaacgacaagtagattgatttggtgaaaatgagataaatttatcgcgaagaaagacgatggaatagtcgtgttttagatatagttttaatgtcgcacaatgtaccttttacgcaataataaataccacacaaagatgaatatgtatatgtctatatatattcgctaacaccttataaaacgaactttttctggtaattcggctaggggattctctattatatacaacctcataaaacatactgtcttttataaaaatatacaccaacaaaatacgaacttaaaaaatatttttaattccagcactatacatactggagtgctacattgatatttttacatcaatataaactctgagtatgcgtgccgtaagctcgttaagttttccacaatgcatttttatattatttgacatttttatatttttattgccctactcccctagcttatcattttgcgattatttgacttttgcatatttttatattgttatatatattttctacgccctacagtaatagaacaaaaagagaacttactctatccagaagagaagttgaccgcccctacttatagaacgacctttgatctaccctaacgtctatataccctggcttcgcgccattgttatccaaataactcaaagtagctatcgcctgtttaacctgagcttgagcagacctatccaccgtcatacgaatctgagtctccctgccctcgaccttaaaccagacttggcgtacagtattagccggcagaataacctctgaaacattcattttatgttgcgaaaattcagacacagcttgaccaaggaaactcaagaattgacgattaataactccttgaccacctctagtcggcaggccactctcatcgcgaacagcaaccgtaggcgcagcaaaataattctgctcaaaagtaacgccgctatcatcaacaaaataaatcttatccccagaagaccactgagccaccggctgcctaaacgtcaatttaacggctgatcgcgctagaaaatctccctccacgcgaatgttttttacctcaggagctttctgtaaaaagaattgctttaggtcattattattgaggaaaaatcggaatctctccgctggatgagcgctgtaatattcattaagaacgctcacgtatttattagcgttgctggaactttttgcgtcgggagtttggattgaaatattgattgtcaattgaaacaaaaggaatatcacaacgagcagacttaccgcagtcgcaaacattttccgcattacacggcgacgttttttcaccaattcatgcgtctcgagtctctcagaagtctccaaaggagaggatgtttggcggctattaagcgtcctgtttcgacgatacgattgggagggcaaatcctcgtaattctcagttcgacgacgcgccgcgatttctcgacgacttagattctcgtccgattttttcttagagaaggggagtttcactttcgcctaccctgccttcgcaccgtagtaataataatcttcgccatatctttagccgcgtttggcttggcaaatttaccaaagttatcacccagacctttaagaattttcttagattttaatacgccaattatttttcgtgccaagatttgattgtccttatccagttcatcttcggaaactatcaacgccgctaatgcgtcctggtaaactttagcgtttttcaattgatgcccgcctgtcaaatgaccgttagggatgatgattgtcggtttatgtagcgccgccaattccagaagagtggtcgcccctgccctggtcacgactatatccgccgccgccaaaacttccgccattccgttgtgaacaaacgcctgcaatcgccagccctcccgttcgtcggtttgcttgaggatttcttcatattgctgatttcccgatatcaaaaacaccgaagcttcagaaagcaggttttccctaattgctacaatcgcggagttaattcgcccggctccgagtccaccgccagtaataacaaccagcggtttattaacattaaagcctaatttttccttcaattctttcctctcagcctcagaatatggatggaattctggcgcaactggaatgccaacatatgaagctttttccggtggataattgtaatattcaagcggcgcgcccgtgccgatagcttttgcgaatggactcagcaagcgattcgtcaaacctggatgcgcgtcagaatcatgcaaaaccaacggtattcttaatagccgagccgcatagccaactggcaaacaaacatatccacccttaataaaaataacatctggacgccacttcataagcttaaacaaactctggaaaaatccaaccaccaccttaaaaccgtcgcgcaaatttgggaatagaattgacggatgtagatgaaacgagatactttttccgtgatatcgacgcaattttccagcaataatcaaatcgaccggaatattctcatcgaacttagcaaaaatcccgcgcgcgctggcgccaaattttttatcgcaccaaaaatgaagctcgtgatcaccagttttctgtaattctctaaatacggctaccactggcgtaacgtgtccgcctgagccgccgccgaccgctaagatcttggccactttcaccctcctctaatgctttatgtgacgtatatttggaaatttggaaaactaaacccagcgctgccgcgataaacaacatgcttgtgccaccataacttaataacggcaatggaattccagtaagcggcgccagccctgtcattgcggcaatattcagtatcacgtgagaggaaatccagccaaagattcccgccacaattagccgcaatgtcacgttcggaagcctcgcggctacgtgcaaaatcgacaataataaagctgtaaatagcgccaatatagccattaagccaacaaaaccaaacgtttcccccatgacagcaaaaatagagtcgttagtcgcctctggaagatatcctgtcgcctgaacactcttgccaattccaagccccagaagcccgccagaaccaatcgcaatcctggcctgttgaatgtgataattcttgttctcctgactgctcgtccctttgtgactatcgccctgcacaaaagtcatcacgcgctcaattcggtgcggcgatgtaaaaatcatcaccaaaccacaaagtgcaacaatcgccagaatcttcttgaaaatcttccaatcaattccagccactaaaatcattgataagataatcgctatcaacgaaattcccgttcctaagtctttttgcaaaaacacaatcatcagcagtgacaagccggaaataatgcccagcggaatgatagtttcctggacgtcgtttaattttccctgttgcgaccgccgccctaaaaatcccgccaaaaataatagcacgccatatttgagcaattctgacggctggaaacttcccagcactcccaattggaaccatcgatacgcaccgttggtttcttgcgcaaatgacaaatgaagtaccgcgcccgagagaaatagtaaaatacataacgcaaatccagcgtaaagaatgtattttgatctctcgccaataaaccatttgtacggcgtcaagtaaaacgcagaaaaagccacgatggcaataaatacgctcgtcagctgcttgccaaagaaatacgtatcactataactcgtgccgtaagcataattcatcacattagcgcgttgcggccccagcgcatacataacaatcagcccaagcagcagtaaaagccccatataaagtacaatctggtacatcggtcgatggcttcgaaccggctgagtaatagattgacgagttttggcgaccgaattacgcaatatgacctccagcgagcgccagcatcacgccaataaatgccatcacgcagccaatgacccagaagcgcatcgtcactttagtttccggccaaccaatcgcctccaagtgatgatgaatcggcgcagataagaaaatctttctcttaaacagcttcttactgacgatttgagtcaagctcgatcccgcctcgattacaaatagtaaaccaatcacgggaagtaggagcaaagagtcggtcagcattgccacaacgcccaaacacgcgccgtaagcaaaacttccaacatcacccataaagaatcgagctgggtaaatattgaaccacaaataactcaagagcactccgacaaccgtaaagcagaatcccgccaatatgacatgttgttgcaataaggcaatcacaccaaacgccccaaagctaataccgagcagcccgcccgccagcccgtccattccgtcagaaatattaacagcgttgccggtagctaccactgcaaacgcgaacaacggaact

SEQ ID NO: 1905 - DNA, 23480 bp, synthetic construct
  source 1..23480: mol_type = other DNA
  misc_feature 1..23480: note = Synthetic
ttcgagtttgtctgagatgggacgagttgcgcggatgcaggatttggcgtcgcatttcctcggtaaagaagctactacaattgaccgcgctcgtgtggcgtttatttctgagctggcagaaaacatcacgattgttacagagaatgacgattattaccaggcggcagcaattgacactctcggcaatgaaaagcaaattagagcacgagtcgaagaagttgtcaaaacaatcaaaaagcatggcgaacctattactgcggaagaattgcacaaaaaattagactatgagcacccttcaaatattgcagccttggctactgttagcaaaaaattagccagcttgaatgatcaatggggactagccaaatggccagccgtcaacccaaagaacattcgcgataaaatctacgtcgttctggacacaaatggctcaccgatgcatttttccgacatcgctaagggaattcgggacagcgaatttaaccgccgaagcgttacaacgcaggcaattcacaatgaacttattaaagacaagcgctttgttctaatcggccgcggtatttacgcgcttgccagctggggctacagtcgcggaaccgtagcagatatcattaccgatattttgaagaattccgaaactccgcttcatcgcgacgaaatcgttcgtcaagtcctcgacaaacgacaagtcaaggaaaccaccattctattaaaccttcaatcaaagccacaattcaaacgcgtcgctaaagccacatacgtttttgaagaagccgcttaagctaagttgcaaacttctttcagaggtgagataatttacacataatgcagattatttcttggatcatcggtacgttattacaatggtacgtttggatgccaatcgtggcagtcctgatgtttttgacgtggcggaattatcggaagatagaagatttcaccccagttgagagtgtacttttggttctggaaatcccacgcaccaatgacaagcaagaacttgccgccgagcagttattcgcttcactacacggaattcttcgcgacaataaagagttgcgattatctggcggacaccaagagcatattagcttcgaaatcgcctcagtcaatgggcaaattcgcttttacgtttgggtgccaaaaaccttacagagctttgtcgagggacagatttattctcaatatccaaccgttcaaattcaccaagccgacgaagattacaccgagcacgagcgcgaccacgaagttgcttactcgacagaattgacattaaccaccgacgaatttctcccgattcgcaccttccaaaacttcgaagtcgacccgctggctggcattacgggcacgttggcaaaattagaaaccaccggtgaagaattgtggattcaggtgctagtcagaccaatcccagatgactggcaaaatgccgcagatcgatatatcaatagtataaaaaacggacgaatgttctccttgccaggattcggcggcagtatacagtggctaatcggtgtgcttggcgcattatggcagccaccagagcagggagttgggcaatcagccaaaatcgagctatcagaccgcgataaaactcgcatttctgaagcagaaaaaaaggcgaccaagctcggatatgaagtaaaaattcgcttggtttatatgggtgaaagtcagacaaacgccaagcttcgcatgcaggcgctcgtcggtacgtttaagcagtttaactcaacaaatctcaatggatttcgtaccgtcaagggtgtgtttggtaaagaatttattgataaatatcgcaagcgttcgttcatcggcgatggttttatcttaaatatagaagaattggcgtcagtttttcacttgccacacaccaacgttgaaacgccaaatatagtttgggcaagctccaaaaccgcagaaccgccgtccaaattgccagtcttaaccggcgaagacgtcaacgatgaccaaatttctgcctttggcgtcaccaacttccgcggcatcagccaccaattcggtatgttgcgctatgaccgctcacgccacgtttacataatcgggcaaacgggtgccggaaaaagtggactattagagctcttcgccttaagcgatattttccataatcaaggatatgctatcatcgacccgcacggcgacttcgcaatcaacaacatgaaatttatccccggcagccgattgaacgacgtgatctattttaatccagccgacaccgcgtatcctctgggattcaacccgctggaagtcacgaaccctaatcagaaaaccaacatctcatcagaaatcatcggcgttttgaagcgtattttcggcgattcgtgggggccacggcttgagtatattttgcggtatacaattctggctttgctggaccgaccagaagcgacgatgctcgacattactcgcatgctaacagataaggaattccgaaaagaaacgctgacttattgtcaagacaccgtggttttgcaattctggaatgttgaatttgccagctggaatgataagtttgtcgccgaggcaattgcgccagtcttaaataaagtcggggctttcaccgccaatccaatcatccgcaatattatcggacagccaaaatccacgttcaatattcgccagattatggacgaaggaaagattctaattgtcaatctgtccaaaggtcttattggtgaagataatgccgccatcctcggttcgtttttggtcacaaaaatccagcttgccgccatgtctcgaagcgacattcctgacgtccgtgaccgccgcccattctatctttacgtcgacgagttccagaacttcgccactgattcgttcgcgactattctgtctgaggctcgaaaatatggacttaacttgaccgttgccaaccagtacatttcccagatgagcgacacggttcgcgatgcggttttcggcaacgtcggcactatgatttctttccgagtttctgctgacgacgcaccgattcttgccaagcaattcgagccgaactttgagtcaatcgatctactccagatgcacaatcgtaattttgttgtcaatatggttatcggcggcgaaaaaactccggcgttttctgcccgcacattggaacttccaccaagccaagccgacaacacgccgcacattattgaacattcgcgtcgcatgtattcacgaaacagggaagatgtcgagaaggaaattgatgccgcaataaagcctgttcgcaaccaaaaaaagcaaccagccaaacctcaaccgcagcccgcaaacaacgctccagtggtcaatagtcaatctgaaaagccgcaacctgcagcaaacgatagtgaagttgttctacaaattcgtggtaacgacagcacgctcacagaaaccgcaattagcacagttacaccgctagcttcagccacgccaaaaagacgacgtcgacgtcgaaaaaagagcactaccgccgcctaaaaactactcatatcgccactggcgcatatcggaattgtaaacgtcggtgattcgcggagaaaccaacgtagaagttggtccagacggcaccgatatggcgttttgcttagtcaggaaagtgagcaatttctggttttggtatctcaggtttttcggcaacggttgactagccacgacctcagcttgcggcgtagacatcacaaaaccccactcgccaaatgacggcacattgaccgaaaacgccgtcacatatcgctctggatgagatgatttgacggtgtttgccaccatataaaaagcatgcggagagaaaaatgatgacgtcgcctgcgtcaccataacgccacgctccgttaaaatattaccgatttgacgatataattgctcggaatacaacttggctaatttttcattcgacggatccaccagatcaatcaacacaacatcatatttatccttggtagagaaggcgaattgaaaagcgtcttgattgacaatggaaacgcgcggatcatgcagagagcgctgatttatatcagtgagaagatgattagttttcgccagattagtcatcacctcatcgatatcaaccaacgtaatatgctcaacgctgggatatttcaaaacatcccgagctagcaaaccatcgccgccgcccataatcagcacacgcttcggattggcgactgaagacagagcggaagtagacaatgtttcgtgataacgcgcttcgtcaaggctggaaaactgcagattgcgattcaaaaacaacctcgtgtcgtttttatatctcgtcaggacaattttctgatacggcgtctgctgctgccacatcacaggatctttatacgttcgcttgtcaattccgtgctcaatttccgtcgcataaataaagaaccccaaaagcaacattgttgcaataacactaattgtcatcacaattttcgacgctttcatttgcttaagaatcagaaccgcaacgccaatgttcaaagccgccaccagatacgcgctacgcattaaaccaagatacggaagcataacgagcgggaataatagcgacgcgattaacgccccaaaataatcgagcgctaaaatcttgctaaataatttcaccgaagatttacgcccgaactcctgaaacatcttcattaaaagcggaatttccagcccgatacaaataccaattgccagacttatgacggcaaaaatcagccaatgcgaacgcgtaaaaacgaatcccaaatacatcagcatcaccgaatttccgccaattagccccagaataatttcgttcgttgcgaagctggtcgctggatgaagcttgatgtaattgaccagcagtgagccaattcccatgccaaataacgtcacgccagttgccagactgaagctcaaaatcgaatcgcccaccagatatgacgcagccgcgcctaaaatcagctcgtaaataattccgccaattgctaccaaaattgccgccgcaaataaagcaatttgctcccgttttttcgtacttgatcgtgacattataactccttttatttaccaagcccgccgctgctgccgccgtaaacactgcgcgatccgccgtgacctccgccgctactactatcagaattgttgtcaaagatgaacgcaaacaaaataatagcgataaatatgacaatgactataatcgtcgtccagtcaatcggtttaatggtcctgccgaacatttccttctgttctttgtcgcttaattgaatcttacggtaagcgtcgtattcgcgattgttatacttctcaatcgtaatcaactgacggtttttcggcgcgccagtatccctcaaagtagcatacgccatcagttctttcgggaaaacttgatacgtatttttacccttgatattcataatttcgccaattccaacctcatcaaccaccacaacgtggtccttgccatcctgttcagaaacggtgaacgattgaccctttttcaattgcgttgggtcaattgcctgagtaaaacgaatcggctcgtacaaagaaacggtttgatcgctgtgatcatactccacccagctatcataatcagccagcccggtaatctcccactcttcccagtagtaaaatcgcttatctttcttatcccattcgcgaaaaagcaaacagccgacaactcgtaaattagttttctttccagtcaatatttggttgattttaagtcgcgccttggttcgtttcatattacaatgccatctctttcataattattttttctgcgtccaacacccgcgcaaccaactcttttatttgttgcaatttgtcgtcatccagcattttacaagttgtcatcgctatatacgccacgccgctttccggccacgtatgaatcgcaatgtgcgactccgacaaaagcagggcagcgctgattccttgcggagaaaattgatgcatcaccgatttcaaagaatgcaagcccgccagctccgtaacatttcttaacattttctgcagctcatccgcgtcattaagtaaagcagaatcaacttcgctcacttttatggttatagattggaccgcggacgcatgcataatgtagtaattatatcacctctagggcgtcaggagtaaaggtaaaacgcggctcttagggaatatcggtatttagattgttggggaactataaccaaataatacagaaaaaatccccgaatcccattaccgggatttaagcggggattcttctggaaacatcccctcagaggatgaacctcttaaagggaggggatattgataactccactatagcaaacaatcctcaagatatcaatgatcaatagcctgtaaatttcttagaagacagacaacagggcgcaatactctttacgaaggtaacgtgcaaagccaagaaaaagccgcccaggcgaccttaatggtgcgccccgtggacaagccgaacggggactgggcgacttttctaatgaaaatatagcacgagaagttcagaatgtcaatgaggtagataaattaggcaatgtgttagcttatgatatttcaggcataagaaaatcgactgggcgcggactcgatggttccgctattagcgcagatgcgcttgaccagtcgattgacaactctagtataccaaacaatcctcaagatgtcaatacagacaaccgttatcagcaccctcttcaagaaactattaacgaaatggaagccaaccctaagcctaggatgactagggagctaagagaggctatagacgagtttatatatgagaatatagaccagaatctattcctagagcatagcacggggattcatggaaatgagggagggcgatctaactagattacataaggtgtttaatgaccctcttaagtcccgtcacgagcgcagattagcccacgacacattcaacaagatattacgccagctaaaagataaaaaactcaccgaattacgtcgtaggctaatccgagccaacattgcagacgatgatggcgccgtagagagaataactgaagagatacacgaatactcacggcgaaagggatataaataattagtaaaatccgaatcgaaattaagccgcttgatttagttatccggcagctttttactttttgatataatcaaggtatgacaagtgagttaaaaatcaaacaaagtgatagcatttttgagtctatcaagcatgaagataagcaaggtgagttctggtatgctagagagctccaaggggttctcgaatatgcaaaatgggattctttcagaaaggtggttgagcgcgctaagattgcactccatacaactggtgtacctgtggaaaaccatttttcccatgtggggaaaatggtttcgataggctatggtaacagcaataatattggtgacattagattgacaagactggcgtgctatcttatcgctcaaaacggtaacccaaccaaaaaacctagagttgcggaagctcagaattattttgcaacacaaacgcgcaaacaagaaattgccgagaagtaccatcaggatatggatagacttgcgcgtcggcgtgaattttctgaatcagacaagaggctatcttctagtataatggaggcgggtattagcccaagagggttagctataataaaaagcgatggcgataagtctttcttcggcggcaaaactaataagcagatgaaaaggaaactaaacactggaagcaagccttgggcaaataaagcccataatgttgtactggccggtaaaacattagcaaacgagatgactgcagccaatatagaaaactacggaatatcatcatacgactctatacttcatgacaataacgataataatgacgcagttagaacgactattcgcaatcagcaaggtatgaacccagaggattttccagcagctgaagatactgaaaaaatacagcgccgcattgaaaaccagagtacacctaaaattgatagccctaacctctagattgtgctataataaccttacaattaagcacgaagtgtgactctaaaaaacgagagcgcgttgtcatccaaaaaagaaggaagcgtgcgtcgcagcgttgtataagtagcaatctgaggtgatcgtttgagataaatacgaagccgcccaagtcagtatggagcgaagaactaggccctcttggtgaccagacaacagacgatagctcttatccaatttaatagtatttttacaatttggagatttggggtttgtggtgtatgctataggtactttagtaagtaaatgggaggctttactaaaatggtatctaaggacaaaatcatcaaaagcactattggtgctgttattggagtaagcgagtgactgtatgagtgattggcacgtgtggcttttctatggcgccgctgcatttatttctgtatattcagtcataacctggaaacaaataatgtggctatatacgctggcatcgccatatggagttgatgataacgatgttgctataaggatgttttcttggagtgctctgcgtcaattggctgctagtaccttttccataccggcattcattttgcttggtcaaaaatgtataagtagtattccaacggagtttgttactgctccatttactttagttattgctacagtaatatatacacttgtatgtagctattcagcaccagaaaaagcattttataggctcaaaaagtatggatacttagcggaggatgcaactggtaatgggagatggatagaatttaccattcgccattttatgcaatatacctatgggatggtcctgtcccttattggcattattgcagtgtctatatttcttctgtatatagcgttattctagcgtgctacacaaaaatgctgcactacaaccctaccatcacctacgccaataccagtataggtgtacttggggtcgagcatggcagctttgtgcggcggtgaactaagccaccaatctatagattgctttgtatctgttccgctatcgttccaagtcaagttttcgctggcgtttgtgcaagcggcaacttgaagtctcctcatttcttctgtaagcggttggttcgtgtctggcatgtagtgtccgcgataattcctggctatcatgtcgtcggctttcatttgagcggtcttagataagtttgggtgcagttttagtggtgcaacgccgactttggctcgttcaatattgacagcgttcaatattgacagctctgtcggcggttctatctttttgctattagataatttgttagtattttgagatgaaggcgattctacaacaggggttgtctttgtcatttctgcattacgttgagtaacaaagaaacaagcagcacctgcaccaacgactactgcgatgctagcaaaaacggcaagaataaattcagttttcttcacgccgacagtataactgaaatcatcagatttgtcaataacactccaagttacaaaaaaggagtgtttttcttatgcaaggaaatgaatcatatcgtcagtaccttcaatatcacgcaaacaatcacccgtcagcaaccaaacgagcagaagcccaagccctactaaatgtcactggagatgacggcgggcttaacggctacttcctaatgggtaacggcactaataatagaggtcaaaccgtcggagagcaaaagtctaatggctacactgcatcatccctcaaccgttcagtaaatccgtggtggatgaattcatatgccagttggcgaaatatgaccaaaataatacttgcgcaataatattaagtgaggtacactgtagttacagtcccttaagtaaggattgtgtcaatatctaagttgttttaggtttctataataatttagcaacttagggcggcgattttggtcgtgcagctacggttgagaattctattgtgaatctaaagcaaagctctaatccgctcacttgttgagcggattatcttttgcactgcggctgagcgccgcacaatttcaattatcactttttagttgtataattatgctaatgatactataaaaaggacttattcatggcagaaaaatcttcatattcaccaaaaaaatattcactaggtttagatatcgggacgtcttcaatcggctgggcagtattggacttagataaagagcgcatccatgatttaggggtgcgcatttttgagcgaccagaagatccacaaaacggagattcgcttgctaaacctcgccgcgatgccaggtcagctcgccgtcgcttaaaacggcgacgtcaacgcttgaataacttgaagcaattctttattgaccaaaatattcttaccagagatcgaatcgaagaagtgttaagtgacaaatccgaatttaacaaattagacgtatatgctctccgttcaaaagcgctcaccgaagaattatctccagaggaactgctcaaggtcatgtatcaaatcgccaaacgacgtggatttaagtcgaatcgtaaagtcgaggaagagtcggaaaaagaaggtggccgtgtgtcaaaagccttgaaaactaatgaaaagttcctcgccgagaatggatataaaactgtcggtgaagctctgagccacgatgaaaactttgcgtcacataaacgcaataagcgtgacgattatactaatagtttttctcgtgatgattttttgcacgaattagaaaagattattgaggtccagaaaagctatgccttaaaaagcgtttccgatacagcgatcaatgaaatgctttacggcttggacgatgacaaaaatgtcgtaaatgtatcagcaattatgtaccagcgcccatttatgactgaagagctgattaaaaaaatggttgggaattgtacctttgaagaaaatgaaaaacgagcaccaagagctagctacagcttcgaaatttttcgcttggcaagcgacttatcgcatctagtattcatacctcgtgacgccagcaagcgccaggcaaagcgagaaaatctagagataagattatcttcagatcagataaataaagttatcgaagccgccaaaaatcaaaaaagcctaacatataaaaaagtgcgtagcattgcgggaattagcgaagattatgttccaaaatatacacacggaaagaaaaaggatggcgatgaattcggagaaggaaatgtattcggtggcttaaaagcatatagcgacattaaagcggcgctgaaaaatctaccagaagattgggcgaaaattgacaacgaaccaacgatcaatcaaatcgcttatattctcactacacaaaaatctgacgaaggaattaaaaccgaattaaatgcattgccaatttccgatgacgctaaaaacgcaattatcaaaattaaagctactaattttgggtcattctgccatctgtcgataaaagctttgcaaaaaatcacaccgcatattcttaatggtatgacttatgataaagcctgtgaagccgctggttatgacttcaagaaacaatcagctagcctagaacaaatcaccaatcctgtcgtaaaacgtgccatatcacaaacactgaaggtcgttcgcgccattgaacgcaaatacggtaaaccttactttattaaagttgaaactgctcgcgacttggcaaaaaacttcaaagagcgcaacgcaattaaaaaagaaaatgaagagaatcaaggatataacgaagacattaaatctataatcgccgacggatatgaagcatcgccaaaaactaaaggtggcaagcaacttctcagccacctaaaagaacttagcgtaccactgaataaaaacgccgattttaatggtcagcaaattattaaggttaagctctatcgcgaacaaaacggtatttgcccatattctggaaaaccaattgattttgacacgatgctacaagacgacaatgcatatcagatagaccacatcgtaccgttttcacgttccaataatgatgggataactaataaagtactggtgctgacagaggaaaaccagaaaaagagcaataaaactccatttgaatattttggcgcagatgaaaaccgctggaaggagttcgtcgccagagtagagtcgatatataagacacgcgatattaaaacggacgataaggccacaaacgccatcaactacaaatataacggctacgcaatgaagaaaaagcaaaatctgcttctgcaggattataaaaatgacagctggaacgtacgagccttaaacgatactagatatatcacacgatttattcagaattatttaagccaaaacgttgactttgcaggagataaaggaaaacagcacgtaatcgcaccaaatggaacaacgacagcatatctacgcaagcgttggggtctggctaaagatcgtagtgaagacgttctgcatcacgccaaggatgcggcggttgtggcggcaattagtccaaagattgtctatcaagcaaatctcttctcgaaagagcaggagatgaaactgtatttgaataacgctaaaacaattgatgaaaaacgacaaattttattacaatctaccgacgagaacactggcgagattactgatgaagcggcatttacccagacacaaaaagacctcgcacaagccgaatatttcaagctgcgtagtgatgaagagaccaaaaatcgctttccaggcccatggacagattttagtaaagaaataaggaaacgcagcctcaacgctgatatcgccacgctacaaaatgaactacgcggacttgataactacgacgaagagtttcgattgagcgtaaaaccaattttcgtctcacgtatgccacgccgtaaagcgactggttcggcacataaagaaacaattcgctcaccaaaagttaaagacggtgaccagagaaccgtacgaatgccgctcaaaaaagttaaacgcaaggatgtcgaaaattccacacttaaagagtcggacaagtggctatacaaaaaattacttgaaagactggacgcttgcgacgataaccctgaaaaagcgttcgccgaacccatatataaaaacgacaagaagactgataaaaacggcaataagctgtctccggtctcaactatcaaagtatattcgacacaaccaagcggattttatatcaacgacgataaagcatttgttaacaacggatctatggtgcgacttgacgtgtaccaaaagccgaacaagaaaggaaagattgaacacttcttcgtgccagtttacgcccaccaagttgggaaaaataggcccgcaccaacaaaaatactaccagcaccaaaaggatttactgatgtagatgaaacatttactaaagtttgctcattgtatccaaatgattatgtaaggtgttatttcggaaatgaaattaaagaagggtattacgtaaaatacggcattaataatggagccatgcaggtgatattccatagctctgtcagcaaggacaaggatcaacttatccagatctcacctcgctccgcgaatctcattgagcgctacgatatctctatcctcggcgataattataggtggctataaatggcctggcgcgtcgtagctatcgaaaatcctgcgcggcttagcgtgcgtgataatcaactagtaattacacaggagatggaatcgactcttccaattgaagatattgacgccttaattttagacaattacggatcaactatcacgacaaatttactgacagcattagctacaaaaggaacaactactataatatgcgacgaaaagcatttgcctgccagcgtacttttaccatattcacagcattcgcgccaagccaaagtttcgcgtcaacaattgtccatgagtcaacccttaaaaaagcagctatggcaacaaattattatcagtaaaatcacaaatcaagcagacgtcttgcgggctcgcgggctagacgatttcactttgcggtctttagctaacgatgttaaatcgggcgacaccagcaatcgcgagtcgattgccgccagaatctattttgaccaaatactgggcgacgccacacgccgcaagccgatctggcataatgccgcactcaattatggttacgcgatggtgcgaagtcacattgccagacatattgctgctcgcggactagttgcctcacaggggctatttcaccacaatgagctcaatagcttcaatctagccgacgacttaatcgagccttatcgcgctgccgttgatatgtacattttagagaacgtcgcgccacaccacaccggagacccggattccagcctcaccaagcacgacagacaactcactattgacatattaaattattatgttatagtgaacggtaagaagtttaccgtgagacattcggttgagcgaacagttgagagctttattgaatgcatagagaaaaaggaggcagataagcttcttctaccaaaaatcgtcctccagtaaaaggaatgtcatacaaacttatgagggtcgcagtattttttgatttgccgaccaataccaaaacagagcgcaaagccgccacacagttccgtaaattcttattggacgacggttttgacatgctccaatacagcatatatacgcggctatgtccaaatcgtgacgttgcagaaaaacatatgatgcgaattaagagacatgctccggacaatggctcggtgcgattgctttatttaacagagcatcaatttacgcacatgcacgttattgttggcgaaaaaaccacccaagaaaagtccgttccagccgggcaattagcatttttctaaccaaaaatccccctcgtaacagagggggatttaaggaagtattatatcaatatctaaattgttagggaactataaccttctcgtggtgttcattggcgtgatttaattatatcaatatctaaattgttagggaactataacccgtcttcctgccacttcacctcgacgtcaattatatcaatatctaaattgttagggaactataactctgtctaactggtagcaccaacgcaccttattatatcaatatctaaattgttagggaactataactataacaacatcgctatcattttcaaggtaattatatcaatatctaaattgttagggaactataacgcaattttggtaatatttggataggcgttattatatcaatatctaaattgttagggaactataactgtgcggtctgtgatttcctgggttgtgttattatatcaatatctaaattgttagggaactataacgccgtatgatttaatcctgcccgcgatattatatcaatatctaaattgttagggaactataacccctgtgttccgataacgtcattcattgcgattatatcaatatctaaattgttagggaactataacgatcccggtcatgttcggggctattcgtatattatatcaatatctaaattgttagggaactataacaggtttggcgttaatgacagcttacgcggcattatatcaatatctaaattgttagggaactataactcaaggcgatattattgatttttcaatgacggttgtagtaatatggcaatgtaagacagcagcgcccctcttatgttagagcaacgcgggctgtcttattttattgtatatttaagcatattgcggaatctaacaaatagtgataaactgcaatcgcatggtttgagcatccatgctctcttcctgccctctgaaaatgggggggcgggttttatttatgtgcggcggacgccatacggtaaattatcattttcaggatagattttacataaaaagtatacaaaatgcctgcaaaatgattacattatgagcgcaacttttgctataatagaagcactcaggcgaggcatatcaacaattagagaatacggcatattataatgaatcgcaaacgcgaaaagataataaaaatataaaacttaacgcctcgcttggtgctagggtcctctaaaaagaaaggaaaggctatgccaatagtaaatcgaattgtaaaaaagaatggcaagattatcaaatctaaggtagaagtacctgcgccattttacagcgtcaggattaagcaggaagtgtatgaacgacttgtaatgcttgctgctgaaaacggtcgtagtgtaactggtgagataaactggagacttgagcaatcgcttaaacagtagtatgataaccgggcagctgttgtgatttgcaactgacattgtatgaagacacctcaaaaacgaggtgtcttttttgataaagcacattttactgacaatcaaaataaggcaggggtatgcccctactgcgatttaaggcaggcgaatggaacagtgaaataattaaacacagaatcacccaagctctttcgcaaaactagcaattaaagaacaatagaacaaaatacgaactaattattagtaatttttaagcatacataaagccgaatcggctgagtatttatattgataaattttgcgcgatacaaacataaattataaatccgagccaatgcagataaaccaatatacaacataaaacacaccaagccgacaaatagggcggtttataaaacaataaacgataagtaggttgatttggtgaaaatgagataaatttatcgcgaagaaagacgatggaatagtcgtgttttagatatagttttaatgtcgcacaatgtaccttttacgcaataataaatgccgtacaaagatggatatacatatgtctatatatattcgctaacaccttaaaaacgaacttttttctggtaattcggctaggggattctcttattatatacaacttcataaaacatactgtcttttataaaaatatacaccaacaaaatacgaacttaaaaaatatttttaattccagcactgcatatactggagtgctacattgatatttttacatcaatataaactctgagtatgcgcgccgtaagctcgttaagttttccacaacgcattttatattatttgacatttttatatttttattgccctactcccctagcttatcattttgcgattatttgacttttgcatatttttatattgttatatatattttctacgccatacagaaatagaacaaaaagagaacttactctatccagaagagaagttgaccgccgccctacttatagaacgacctctgatctaccctgacgtctatataccctggcttcgcgccattgttatccaaataactcaaagtagctatcgcctgtttaacctgagcttgagcagacctatccaccgtcatacgaatctgagtctccctgccctcgaccttaaaccagacttggcgtacagtattagccggcagaataacctctgaaacattcattttatgttgcgaaaattcagacacggcttgaccaaggaagctcaagaattgacgattgataacttcttgaccgcctctagtcggcaggccactctcatcacgaacagcaaccgtaggcgcggcaaaataattttgctcaaaagtaacgccgttatcatcaacaaaataaatcttatctccggaagaccactgagccaccggctgcctaaacgtcaacttaacggctgatcgcgccagaaaatctccctccacgcgaatgttttttacctcaggagctttctgtaaaaagaattgctttaggtcattattattgaggaaaaatcggaatctctccgctggatgagcgctgtaatattcattaagaacgcccacgtatttattggcgttgctggaactttttgcgtcgggagtttggattgaaatattgattgtcaattgaaacaaaaggaatatcacaacaagcagacttaccgcagtcgcaaacattttacgcattacacggcgacgttttttcaccaattcgtgagtctcgagtctctcggaagtctccaaaggagaggatgtttggcggctattaagcgtcctgttccgacgatacgattgagcaggcaaatcctcatagttctcagttcgacgacgcgccgcgatttctcgacgacttagattctcgtccgattttttcttagagaaggggaatttcactttcgcctaccctgtcttcgcactgtagtaagaataatcttcgccatatctttagccgcgtttggcttggcaaatttaccaaagttatcgcccagacctttaagaattttctgagattttaatacgctaattatttttcgtgccaaaatttgattgtccttatctagctcgtcttcggaaactatcaacgctgccaatgcgtcctggtaaactttagcgtttttcaattgatgcccgcccgtcaaatggccgttagggatgatgattgtcggtttatgtaacgccgccaattccagaagagtagtcgcccctgccctggtcacgactatatccgccgccgccaaaacttccgccattccgttgtgaacaaatgcttgcaatcgccagccttctcgctcgtcggtttgcttgagaatttcttcatattgctgatttcccgatatcaaaaacaccgaagcttcagcaagcagattttccctaattgctacaatcgcggaattaattcgcccggctccgagtccaccgccagtaataacaaccagcggtttattgacattaaagcctaatttttccttcaattctttcctctcagcctcagaatatggatggaattctggcgcaactggaatgccaacatatgaagctttctctggcggataattgtaatattcaagcggcgcgcccgtgccaatagcttttgcgaagggactcagtaagcgattcgtcaaacctggatgcgcgtcagaatcatgcaaaaccaacggaattcttaatagccgagccgcataaccaaccggcaaacaaacatacccgcccttaatgaaaataacatctggacgccacttcataagcttaaacaaactctggaaaaatccaaccatcaccttaagaccgtcgcgcaaatttggaaataaaattgacggacgtagatgaaatgagatgctttttccgtgatatcggcgtaattttccagcaacaatcaaatcgactggaatgtcctcgtcgaacttagcaaaaatcctacgtgcgctggcgccaaattttttatcgcaccaaaaacgaagctcgtgattaccagttttctgtaattctctaaatacggctaccactggcgtaacgtgtccgcctgagccgccgccgaccgctaagatcttggccactttcaccctcctctaatgctttatgtgacgtatatttggaaatttggaaaactaaacccagtgctgccgctataaacaacatacttgtaccgccataacttaataatggcaatgggattccagtaagcggcgccaatcctgtcattgcagcaatattcagtatcacgtgagaagcaatccagccaaaaattcccgccacaattagccgcaacgtcacgttcgggagtctcgcagctacgtgcaaaatcgacaataataatgccgtaaatagcgtcaatatagccattaagccgacaaagccaaaagtttcccccatgacggcaaaaattgagtcgttggtcgcctctggaagatatcctgtcgcctgaacgcttttgccaattccaagccccagaagcccgccagaaccaatcgcaatcctggcctgctggatgtgatagttcttgttctcctgactgctcgtccctttgtgactatcaccctgcacgaaagtcatcacgcgctcaattcggtgcggcgatgtaaaaatcatcaccaaaccacaaagcgcaacaatcgccagaatcttcttgaaaatcttccaatcaattccagccaccaaaatcattgataagataatcgctatcaacgaaattcccgttcccaagtctttttgcaaaaacacaatcatcagcagcgataatccggaaataatgcccagcggaatgatagtttcctggatgtcgttcaattttccctgttgcgaccgacgccctaaaaatcccgccaaaaacaaaagcacgccatatttgagcaattccgacggctggaagcttcccagtacgcccaattggaaccatcgatacgcaccgttagtttcttgcgcaaacgacaaatgaagtactgcgcctgagagaaatagtaaaatacatagcgcaaatccagcgtagagaatgtattttgatctctcaccagtaaaccatttgtacggcgtaaaataaaacgcagaaaaagccacggcagcaataagcacactcgtcagctgcttgccaaagaaatacgtatcgctataattcgtgccataagcataattcatcacgttggcgcgttgcggccccagcgcatacataacaatcagcccaagcagcagtaaaagccccatataaagcacaatctgatacatcggtcggtgacttcgaaccggctgagcgatagattgacgagttttggcgaccgaattacgcaatatgacctccagcgagcgccagcatcacgccgataaacgccatcacgcagccaataacccagaagcgcatcgtcactttagtttctggccaaccaatcgcctccaagtgatgatgaatcggcgcagataagaaaatctttctcttaaacagcttcttactgacgatttgagccaagcttgatcccgcctcaattacaaatagcagaccaatcacaggaagcaaaagcaaagaatcggtcagcattgctacaacacctaagctggcgccataagcaaaacttccaacgtcacccatgaagaatcgggctggataaatattgaaccataaatagctcaagagtactccgacaaccgtaaagcaaaatcccgccaacagaacatgttgctgcaataaagcaatcacaccaaacgcaccaaaactagcacttagcaatccgccagccagaccatccattccgtcagagatattaacggcgttaccggtagccaccactgcaaatgcaaacaacggaactatcaaccaaccaatattcacctcgcccacaaacggcacatgaaaactcgccacgcccagtttggcaaagaaaaaccaaccaagcaccacgccaatcaacgtaatcagcgcaaacttcactggactacgaagcccagccgcgccgccacccaagccgcgtagattgatgatatcgtcaatcagcccaacaattccgccaccaaccaacgccgccaaaggaagccaggtctgtgctcggtctaaattgaagaaaatcgtcaccacaaagattgaaattacgccaatcactccagccatcgtcgggatgtttcgccgcaattttgccgcttggaatttggcaaaaaccttcagctttttcccatcagtgctttccgacctttgacgcttccagaagcgatatcgataagcgaaaaacgtataaattggcgttaaaaacatcgctagtaaaaacgcgccgacgctcagtaaaaatacgtgcgtcaattcgttggtcattgtttgtaaagctattcccatatttattcctttggtgctattttcatataatcaatcatccaattggatatatctgtaaaaattggtccggcatggagatctccctgtaagttaatccctcttcccggagccgctacacgtaccattatgacatattcagcgccattttttccaccgccataaccaatatatgtagcaatcgtttccttttgagtgtaagcaccattaatcaccgtttcagaagtaccggtttttccaccaatttcatagccagatttgtcactctttgacaggaatgaagatcgacgcgccgtcgttagcatcgttcgcatctgtgatgacgcgccaccgcttacggtttggcgaataactttattttccgacgatttcagattgccagattcgtcaattgtaccaacgagaacggtcggcttatagtattgaccgccgttaactagcgatgaaaatccagctgcgacctgaatcgtagtcaaattcatactttgcccgtaagtcatagccgaataacgaacctcatttccttcagcactatccggtggataaatataacccgaagcctcgcccagctcaattccagttttggcgccaaagccaaatttatcatgataatattcatacaaagtctgacgagccggcaaattaatctgcaaaccatttcctaattttcgaatcgcagtaatcgtaccaacgttgagcgaattattaaacgcaccttgaatcgtcatcgtgccacccaaacctctcaagacattacacatcgtacgatcagcgactttaatacagtcggtattattatatgtactagacggggtgataacacccttgtcaattgccgtagcgaaactaaaggacttgataatcgatcccggctcaaacggcaccatcgacgcgctatctacaaacaccgacccatttttctgcttagcaaaatccgctggattataagtcggataattcgccattgccaaaacttgaccgtttttcggattcataacaatcacgcttccctcagtagcaccagccgcttcgattcctttttttaatgccaattcagtctggctttgaatattcctatccaccgtcagtgccaaattgtcgccagatttcgcctcgattcgcatattattttttccaaccgtcaaaggtatattcctcacgtcagttacagattgcaatagcccatcccgacccttaagttgcttattcagagaaccttcgacgccatattgaccttcgccagccgcattcacaaatccaagcacgtgcgcgcccaactgaccttcgggataattcctgatcgaactttgctgatacaacacgcccgcaaagtttttctttttcaatttctccgcttgagttctggtaatatttttcgctaaaacttcatagcgcgactttttattattgagccgttcagatacattttccgtcatttcgccgccagcaatttccctcaaactatcaacaagctgattccgctctttatcatcaatcgactgcggatccgcaatcaccgtatagaccgcctgattgagcaccacaggaactggcgtctttccgtccatcatgtaaattttcccgcgctccgcaggaatgacgaattgacgctgctgactcgctcgcgccaactccgtatatttgccatattgcaaaatctgcaattgaaacaatcgcaacacaaaagccgccatcactactagtaaagcgatggccaaccaaccagttcttgaacgaataagccgctgcatattgcttatcctattatatcactattgagcgtaatgtgtttcagttgtcgtcatagctgaagcgacattgctattcttcaccttctctagcgccgtcaagcgtgcattctgaacttccaattctgacttttttgcgcttagttcggtgatttttgtatccagactctgagcttcatagccgtaagccgtaagtctggttgcctgagtaagataaatcaagcccagtactgtaatcatcaatgcaactagcactgtatgagcaacaggaccaagtttgacctgagactgaaaacgtgtagaattctgatttcggcgcaattgaccgtgtgaacgtcgtgaagtgaa

SEQ ID NO: 1906 - DNA, 23471 bp, synthetic construct
  source 1..23471: mol_type = other DNA
  misc_feature 1..23471: note = Synthetic
cctttaagatcccgctcgacaaccaggtcctgatcgccggcaatgacgacgatgacgccggtcaacgaatcttcgccttcgccccgaagaaattcgaggccatgtttggctataattacaagaagcaggctatcgccgacaagaaggtcgagcagatcttgtctcgctaccagcttaacttcccggaaggacaagacctcaataccatggtgtcgggtcatcctaaactaatcaataaactccagaatctagaactcggcaccaagactcaggaagagttagttgattacggcgaagagatggggttggatctgatgaccaccgacgacggcgctattatcatcatggatagccgagatatcgagaccttcgtcggcttacttaatgacgactacatgaccagcgacctaaccgggctaaagtacgagatcaaaggtaagaagctactggaagatcgcccggcagacgaataagctcttaaatcatcaatcaaaaagcccgcccagaagcaagggtgggcatcgcttctgtagcgggctatctgacctctcgacgcaccattccggctactgacaaccagtaagcgcaacccacctcacacttggggctcgccggtcaagagggttagatacgtgccgactagctgtcgccgaagcgatagctaaaagtggagggtagaatacttcgagtctgcacgtagcctaacactaattagtgttatgatagggggtataatgtgctagtcgggcgttagcagtggctatcacccgataacgctgatatagtagcacgctttgtcgtgattgtcaactactttagcaggataatggataacatcaagcaaatactccctcatgacaacgattttctccagcggacgaccgtcattgacaagccggccaagaagctgtggtacatcggcggtatcccaccgctcacaccgaccgtcgccgtcgtcggtagtcgcaaaccgaccagctatggcagagcagtcaacgctcagatcaccggcgagttagctcggcacggagtagtcatcgtcagcggactagccattggtcatgacgggctggctcaccgagcttgtctcgacgccggtggcacgaccgtagccgtcttgggtaatgggctggctcatatctacccgcagaccaatcgcactctagcccaacgcatcgttcaggcaggtggcgccttgatcagtgagtacccgcccgaggcgccagtctttcctcatcagttcttagagcgcaaccgtttgatcagcgctctcgccgatatcgtggtggtgatcgaggcgggcgaacgctccggcacactcaataccgcctcgcacgccttgacccagggtaaagaggtgatggcggtgccaggcaacatcacctcgccgctatcgaccggctgcaatagattgatcgcccaaggtgccggcccagtactcacagcgcaggacatcttagatcgcctgccgctcgctaagacagaggaccgacctgaccatcaggccgagagggcagatcaggttcgcttcgactcgcccgacagtcagaccatctacgacctgatcgttcagggtgaaagcgatggtgaccgcctactaagcaagagcggcctcagcaccagtcagtttagccttgccttaaccatgcttgaactaaacggctacatcgtagcgctaggcaacaacacctggggcaaacgctagccggaagtcgctcaagcttgacgaccgcccagagtaatattacagtaaggttgttgcctcagagtggggtaatctagcgccatgcgctagccaagccgaggggaaaggaggggatgatgaatccccgcaagcctcttaagcccggagatctcctggtagacatccgggtaaatggtcggctcgttgagaaattaaatcacaacgagctagttgcagtattcgctcaaacgagcggataccagctgattgagggtctgcgctaccgctatgtgcgcttcgactggcacagcggagagcacgggcgcagacattctcgatctaagcttgttcatcttgagccgcccaaggtggacaggcaaagggcaattcgcatcaactccgacggagtgatgctattggggtggccggtcatggagaccggccagacaataaagctttccatccggacggatgggatggccatcgttgtcgagtaactacccccaagcccttaaagccccgaccggattcgttcggtcggggtgttttcttattgtgctatacttgaccaaatgaaaacaaccaagatcaagaacctgattatcgtcgagtctcccgccaaggctaagaagatcgagagcttcctcggcagcgactataccgtcatggccagcatcggtcatatccgctccatcgctaagaaagccgccggcggtgtcaagccgattgataccgagcacgacttcgccactatttatgagattgaccccgagaaacgaaaagtggtcaaagagctgaaagacgccgtcaagcaagctgagaccatttggctagcctcagatgaagaccgtgagggagaagcgatcgcttggcatctctgccaggtactagggcttgacccgactaagactaaccgcatcacttaccacgagatcactaaggaggctatcaccgaggcactggctcatccccacacagtggatatgaacctggtctatgcccaacaggcccgccagatcttagatagactggtcggttttgagctgagtccggtagtctggcgtaaagtcccgggcggcaaatcagccgggcgagtccagtcaccggcagtccgcttgctggtcgagcgggagcgagagattgaacaccaccaggctacctccacttataagacaaccggcgtgtttagcgccgacagccagagcttcaaggcgactctcgatactgactttaccgacaaagagcaggccaagcaatttctggccggtctacccggcagcacatacaccgtagccgacatagccaagacgaccggcaccagacgccctttgccgcctttcaccaccagcaccttacagcaggatgccaacaatcgcctcggctacagtgctaaggcgaccatgagcattgcccaggggctgtaccagagcggctatatcacctatatgcgaacggactcggtcaacttgagcaaccaagccctggctcagatgaccgactatattagtaggacctatggcgacagataccatcaattccgcacctttaccactaagactgccggcgcccaggaggcacacgaggctatccgcccgaccgatatagccagggaatccgtaccgggcgacagtcgagcccagaagctttacgacttgattcgtcggcgcactctggctacccagatggctgacgctaagattgatcgaacgaccatcaccatcgacattagccgacaccagcccaagtttaccgccaaaggggaggtgctggtttttgacggcttcttgaaagtctatggtagtagcaaggatgaaatcttgcccgacttagccaccggtcaagctgtaacggcgaacgaaatcgttgcccggcagaccttcagccgaccgccggctcgctacagcgaaggctcgctggttaagaagctggaagagctggagattggtcgcccctctacctatgccaccatcctgagtaacattcagctacggggctatgctaagaagggtgacagcgacggggtggagcgaccggttaacgagctggttctccagggcgaccggctgagcgagcggactgtccacgaaaaaaccggctcgaccaagggcaagctggtaccaaccgatagcggcatcatcctatccgacttcctggttgactattttaacgacatagttgactacgacttcactgccggcatcgagaatgagcttgaccagatagctgaccatcagctggataaagtcaaaatgctccgccggttctacgaccccttccacgacaagatcaaagatagcgataagattgagcgttccagcgtagccggtcaacgactggtcggcaccgaccccaaggacggccagcccatctatgctcgcatgggggcatacggcgctatgcttcagaaaggtgatagctctcaggaagacgccaaagtgacctttgccaatatgcccgagggggcaagcattgccaccgtcaccctagagcaagccgtcaagatgttccagctacctcggaaagtcggcacgacggctgatggtcaagaaatcatcgctaatatcgggcgtttcggtccgtacatcaaggtaggcaaactctttgtcagtatcaagccggagtcaccctttgaaatcagcgaaaccaaggctagagagctataccaagccaaactggaggctgaggcagccaggcacatcgccagctggggcgaggttgaagtcctgaatggtcgctacggaccatatgtcactgacggtactaagaatgccaagatcccgaaagataccgacccgaaatctctgactgaggagcaggctaggcagttactcgccgacgcccccgcccgcccagccaggcgacgaggcagaaggaaaacagcgtaaattacatttgcccgtatcacctttgaggttagttaacactatcttgtcccacagcccatagcaggccgtgtggtcttctcatacaatatagagcccctgtacgagcagtacaggtggtctcctcaggcctggcgacgtagcgagcaccactggcaattgttaacttactgctatatcaacagccttcgtcaaccacactgtactactcgtactaggagtactcatcttagactgaagttgaactaggaaatgagactggggaaattacaggcatattaacaagattaagcctcgtagctcagagcagggcgtatggtctcctcagacctggcgacgtacaatctaccactggcaattgctagcttactgctgtatcaacagtcttcgtcaaccatatgccctgctcttacgcactatcatcctttatcgcactaaagggtgtctttcgtccttcgtctgcgtcagtcatttcctgaagactgtgtgcgcttgaagctcagcagtgcacgagccagccaggcgggtctgaaggaaatgatgacgagacgaagagtgagagattggctaggtagtaggactgaggagaccatacagtctgctctgagtgcctgatagccgcatccaagagcgtctattgtccttcactctattatcatttcctgaagactgtgtgcgcttgaagctcagcagcacacgagccagccaggcgggtctgaaggaaatgataatagagtgaagaatgagaggactagtgagctagtacaagcctaaaacattcgcccgctaaatatgataagataactggtgatgatacagtggctgttcaccttctttacccagtggtacatctggatgcctctcgtcggcatcctcggcatcttgacctggcgcaactatcatagccttaacgaccccggcgatgcctacgactacgtcctcctggctctagaaatccctcgagacaacgacaagaaagagctctctgccgagcagctcttcgcttccttgcacggcatcctccgcgacaagcaggagctccaccgggccaccggcgttcaggagcacctctcgtttgagatcgccagtgtgggcgggcagatccgtttctacgtccgtacccctaaacatctgcagaacttcgtcgaagggcaaatctacgcccaatatccgaccgtccagattcagccggccgaggaagattacgccgacggtatcaatgcccaccgagccacggcggttgatgagctggtcctgaccgacaacgaattcttgcccatccggactttccagacgttcgacgttgacccgttagccggtatcaccgccgccttgactaagctgggtagcaacgatgaggagatctgggtgcagatcctcgtccgacccataccggatagctggcagaaagatagtgccaagtacgtcgctcgttatcgtagcggcttcggctcgtcgctccgctcgggcgctttctactacgtcctccaggcactggaggcgctctggcagccgcctgaagggaacgacaaaaataccgagctatccgaccgtgacaagctgcggattagcgagatggagaagaaatcgcagaagctgggctacaaggtctgcatcaggctagcttacctcggacacgaccaagactcggctcgcatccagatgaatgccgtggcgagcgcctttaagcagtttaactcgaccagtcttaatggcttcaagctggctactcagcctcgctacgatcgggcggcgctcgacctctgcgccaagcgatcttttccggatggcacaggctttatcttaaatatcgaggagctggccagcgtctttcatctaccgcacatgaacgtcgagacgcctagtgtggtctgggctaattctaagaccgctgagccgccgaccaatctgcccgtacttgatggtgacccggtccacgaccgggatatcagcgccttcggactgactaacttccgaggtatgcaaaagcagttcggcatcttgcgagctgaccgaagccgtcatatgtacatcatcgggcagaccggcacggggaaatcgggcttgctggagctgctggccttatcagacatttaccacaatcagggctacgccatcattgacccgcacggtgatttcgccaccgataacctcaagtttatcccgtcctcacgagtcaatgacgtagtctactttaaccccgccgacaccgaccacccgatcggctttaacccgatggaggtctacgacccgaaccagcgcaataatatcagctcagagattatcggcgtgatgaagcggatgttcggcgagagctggggtccacgactggagtacatcttgcgccataccctgctcgctctactggagtaccccgacaccaccatgctggatatcaatcgcatgctaaccgataaagacttccgcagccgagtgctgtctcaggtcaaggataccgtggtgctccaattctggcgagtcgaattcgccggctggaatgagcgctacgtctcggaggcgattgccccggtgctcaataaggtcggtgctttcgttgctaacccggtcatccgcaatatcatcggacagcccaagtccagcttcaatatccgccaaatcatggacgaaggcaagatcctcatcgttaatttgtctaaggggttgatcggtgaagacaacgccgccatcctgggttctttcttagtaactaagatccagctagccgccatgagccgctcggatatccctcggatagaagatcgacgacctttttacctatacgtcgacgaatttcagaacttcgccaccgactctttcgccgtgatcttgtccgaggctcgtaagtacgggctcaacctcaccgtcgccaaccaatatatttcccagatggaagataccgtgcgagacgccgtctttggcaatgtcggcactatggtctcgatgcgagtcagcccggaggatgcaccaatcttagcccagcaattcgcccctaatttcgaagcacaggacatcttgcagatgaataatcgccatctcgtctgcggcatgatgatcaatggcgagaagatgcccgccttctcgggcactaccctcaagctaccggaagcggggaagggctacatcgaccaaatcatcgagcactccagggctaattacacccgtcccaaagctgaggtggaggcagagattgccgagctggtcactccaccgatggggctaatgtccagaaccgcccgagataaggcgaagaaagccctcaaagagcagcaacaagccgccgctcagtcaaccgccaaccagctgaaaaatatcagcagcctgatggcgcagatccgtcagactgcccaagccggcgaccctgacagcatgaagattgagccgactcacgagactagcggcaagagcagcggtaatagcaacggtagtggcggtggcgacaagacccgctccggcggtagccaggcagggcagggtagtcggggcggtcagaatcaaggcaacaagaatcagcctaagaaaaataagaataaaaccaacaagcataatcgtggggcagataaaggcggacaagccgaccggccgattcccgcagcttccgtcagccagccaaactcaccgaccagctatgtcagaccgaatcgcccattacctcagccgcacccaagccagcccgccaagccggataagccggcctcagtagcaccgtccgccacccaagttcacgagatcaggtttcactagagccggtaataaaaatccgacccctcgccttgatggccggggtcgggtaaatggactgccggtggtggataacggcagttcacgggtagctagtgagctggctatttcttcttgccatcgccgatagcgatcttgtgtggctcaggtagcttggccattgggatagtgaccaccagcttgccgtcaaccatatccgccttgatcgcttctcgatcagcccgctcaggcagagtgatggagcgatagaagctgttcgagctctctcgcacgaagtacttcttatccttgtcctcttccttatcatgacgctcggcgctgatcaccagattgtccttgtcgatgctgatatcgacatcttctttatcaaagttgggcatgtgggtctcaaccaccaggttgcccgccttctgatatacatcagtcaccggaatgttgctggtcatagtcggtaacagtaggtcgtcaccgaagaagcggcgctgcaggctatttagctcctcaaatgggtcatcatacttgattaaactgctcatatcatcctcctttttattacgatggtatcaccatctgctagtagtatagctagttggcactcccacgtcaagagtgccagcataagcgtcttagagaagaaatacggggcgatgcgaacatcgcccctaaatagaggaagtggaaagagactacaattcgatgcgatagacatcacctccgatctgcacatgtgcacaagattgattgagcctgcccatgatcttctccacgaaggagaagaatggccttctacaatacgggtcacctccccgcagatgggtctcaagccgcaatgcgacctgagagccacccagtttttcctggcacgtctgatgcaccaggaaaaaggtgatattttcgagcttatggtcaatggattcactacgaatccactgaccaatctcgctcaggtcgacgtccccctcgtaacgagggaaaccgtcacctagatcaattacaacacttgccactatcgctcttcggtacctttttacagacatactaaccacctctctgacagcaccgcagtaccatcaagtccttggtcacagcccgtctgtgacctcgtagggagcaggggcgacctgcgcccggcgagaccacagacatatccatccacttcatcataaagtacaccgcacccacctacagtactactatcatgacacatttgacaggaaagtaaagccggcagcccagctgatgcgttagctagactagctagttatgacaaagcgtgattacgtatctttttgcttaggcagcttagcgttatgcatcctgctgggtactggacaggtccgacagcccagctgatgcgttagctaagctagctgactatgacaaaacatgactgtgcaccttttcgcctggacagcagagcatcatgcatcccgctgggtgctgggcaggccacagcaggataccgataagcacaaaaccaacccgagaagacacttggctattgcaatccggccttgatactctataatgagaatgtacattcatgggagcatgattgtacaactatctgaattgcttaggtttctataataatttagtagaaatactaaagcaaagctctaatccgtctctttatgaggcggattatctttgtctatctatatactaggcaacttaaaagggctataatgacgacatgagatattcgttaggacttgatatcggcacatcgtcagtcggttgggcaatactcgatctagataaagagcgtattcacgatctaggtgtacgtcattttgatgtggctgaaaaaattgagaatcacaaagcagtctctcttgccaagcctcgccgtgatgcacgctcggctcggcgtcgcttaaagcgccgtcgtcaacgcttgaataacttaaagaaattttttgttgaccagaatatcctcaccaaaaatcaagttgaagaagtattagatcctgaatccgattacaacaggctggacgtttatgttctgcgatcaaaagccgtcaccgaggaactatcgcccgaagagttacttaagattctataccaaattgccaagcgacgtggtttcaaatcgaatcgcaaagttgtcgaagaatcagacaaagaagatggtcgtgttacgaaggctctcaaagctaacgagcaatttctgattgaaaataactacacgaccgtcggtgacgcacttagccacgatataaagtatgctgcacacaaacgcaataaacgtaatgactataccaatagttttgcccgtagcgatttcttgtgtgagctagagaatgttattaaagttcagcagcactacgccttaaaaaatatccccgcacaggcgattaatgacttgatctatggcgttagcgacggacaagttactaacataagcgccatcatgtaccagcgtccattcacgactaaagatttgattgaaaagatggttggcgattgcacctttgaaaaaaacgaaaaacgtgcgccgaaagctagctacagctttgaaatgtttcgcctggcaagtgacttggtacacctagctttcattccacgcaatctcagtaaacgccaagcgaggcatgatggcctcgaaataagattgtctccagaacagatcagtaaagttattgatacagctaaagaacaaaagagtttaacctatcggaaggtgcgcagcatagccggaattagtgaggattacgtgccaaaagatactagaggcaagaaaaaggatggtgatgaattcggcgaagacaacacctttggcggtctgaaggcatataatgatgtcagattggcgctgaaagacttaccggaagactgggcaaagattgacaacgaacctacaattaataagattgcctacgtcctcaccacacagaaaaccgacgacggtatccgtgccgaattaagccaattgccaatttccgatcaagccaaagaagctattgtcaaaattaagccaactaatttcaaagcatttggtcatttatcgatcaaagctctacaaaaaatcacgccacatattctcgaaggcatgacctatgacaaagcctgcgagacagctggctacgacttcaaaaagcaatctgccagcctagagcaaatcaccaaccccgtcgtcaagcgcgccataacacaaactctgaaggtcgttcgtgctattgaatgtaaatatggcaaaccttgtttcattaaagttgaaactgcccgtgatttagcaaagagctacaaagatcgtcaaagaatcgaaaaggacaataaagataatcaaggatacaacgaagacattaaatcaatagtcgcagatggatacgaagcgtcaccaaagaccaaaagaggcaagcaactcctcagtcaccttagagaacttaatgtaccattgaataaaaatgccgatcttaatggccaacaaatcattaaggtcaagctctaccgtgaacaaaacggcgtttgcttgtattctggcaaggaaattgatttcgagacgatgctacgtgacgacaatacctatcaagttgatcatattattccattctcaagatctaatgacgacaagatgacaaataaagccttagtgctgacaaaggaaaaccaggacaaaggcgataaaactccttttgaatattttggcgcagacgaaaagcgttggaaagaattcacaactagagttgagtcgctatataaaacacgtgacatcaaaacatccgataaagctaccaacgctactaactataaatataacggctacgccatgaaaaagaaacagaacctattaacccaagcctacaaaaatgaaggctggggcgcaagcgcactaaataacacaagttatatcacaaggtttgtccaaaattatttgcgtcaagaagtatttccaggtgagacgaggcaatgcgtaattgcacccaacggcacgacgacggcatatctgcgcaaacgttgggggctagccaaggatcgcagtgaagacattctacaccacgccaaagacgcagcggttgtggcggcaattgatgcgaagattgtctaccaggctaatctcttctcgaaagagcaggaaatgaagaaataccttgcaaacgcaaatacgattgaagaaaaacggcagatcctgcttgagttgacagaaaaagacaccggcgaaattactgacgaggaagctttttcaaaagcacaaaaagacttggcagaagctgagtatttcaagttgcgtagtgatgaaaagacccaaaatcgttttcctcaaccatggccagattttggcaaagaagtgatgaaacgtactctcaatactgatatcgcaacgctacaaaacgagttgcgtggacttgataattatgatgatgagttcaggctgagcataaaaccaatcttcgtttcacgcatgccacgtcgtaaagctactgcccgagcgcacaaggagaccattttttcgcctaagattgaaaataacgatcagcgcaccgtacgcaagccacttagcgaactaacagccaagcttcttgaaaaatctgttttagttgagtccgacaagcttttatatcatcaactaagggaattgctagataaaacagccacttacgacaaggacggcaagcgaacagatcacccagaaaaggcattttcaaagccagtctacaagggcaatcggaggactgacaaaaatggcaaccaattatcaccagtatcgaccataaaaatatacgctactaagcccgatgatagtggaaaatatattaataatcaatgcggatttgttgataacgacagtatgataagagttgatgtctacatgaaatatgtagacagtagagaatacccattttttgtccccgtatatgcacattctattaaaaaccattccaggaagattagaccagctctcagaggcttctctacaatcgacgaaacattcaagtttgtatgtagtctatatccaaatgattacgtaaaaattaagtttgacgacacagaaaagaacgttgaagggtactacatacaatatggtagctcaaatgcagccatagacatattacctatgcaagcagcaagaaaagatcagcgtattgtctgttcagcaagactggccacaaagatagagcgcctcgacatcaacgtcctgggcgacaactataggtgggattagattagaaactatggggtggcgagtcgtagctatagaaaaccaggctcatctaagcctggagcaggggagtttggtcatcaagggcgataaaagtgctaagctaccgatagaagacatcgatacgctacttatcgatagctacgccgtaaccatgaccgccaacctcctcggcgagctcgccacacacaatgtcacgaccatcatttgcgaccaccagcatacgccctgctcggtaattgagccattatcgcagcactctcgccaagccaaagtatcccgtatgcagctagagatgtctcagccactacgtaagaatctatggcaagcaatcgtcaagcaaaagatcattaaccaagcccaagtcctgaccgcatttacacataccgagcaagccgggcagctcattaagctagccaccgaggttcgcagtggcgacaccactaatcgagagtctatcgctgctcgtatatatttcgacactctgctggcagacgccaccaggcgtcagccgacctggtataattcggcgcttaactattcgtacgccatcgtccgtagtttagttgccagacatatcgccagtcggggactaatcccatcgctaggtctctttcaccatagcgagctaaatagctttaacttagccgatgatctgattgaaccctatagagcaatagttgaccattttgtcctgtcaaaattagctgatcagcacttggacttgagtgacagtagactgaccaaagaagatcggcggctgtcccttgacattctcaatgattatgctattatcaaagataagcagtttacagtgcgagacgccatagacttgaccgtcagcagcctagtgcaggctattggcgacaagtcacccgactcacttcaattgcccaagtttaatcactaagttaatcttaatcatgagctaccgttatatgcgtgtgttagtactatttgatttgcccacaggaacgaaagctgagcgcaagcaagctagtcaattccgcagctttctagttggggacggctttgatatgctacaattcagcgtctacagcaggctgtgtcctaatcgagacgtggctatgaagcatctcgccagagtcaccaagaatacgccggcagataccaaaggctctatccgggcgcttctcgtcaccgagcatcagttcgctactatgttcatcatcctaggcgagaaaactgaccaagaagagctggttaaaaccgatcaattatcatttttctaaactaaaatcccctctgtaacagaggggattttgagtgagcattatacaactatctgaattgttagagaactataactcaattagtctcttataatgcctatgattaattatacaactatctgaattgttagagaactataactttcggactgcacgagctacttcagctgaaattatacaactatctgaattgttagagaactataactcggcactcacgttaaccgactctgcgttaattatacaactatctgaattgttagagaactataacatattattcatgataaagatcttgatgaatattatacaactatctgaattgttagagaactataacacgaagaggtggcacatgccccctcgaggtattatacaactatctgaattgttagagaactataaccatctcgataaccctaataaagttcagtacattatacaactatctgaattgttagagaactataaccgtgggcgtggcggttgcgcttggctagtaattatacaactatctgaattgttagagaactataacgtgttacttatactaggctgacgctgaggcattatacaactatctgaattgttagagaactataaccatcggtgttgagatatctatctctggctgattatacaactatctgaattgttagagaactataacccacgctctgagcagtgtcatcagctatttattatacaactatctgaattgttagagaactataactcagtaccgcacgccgctaacggtgtagtcattatacaactatctgaattgttagagaactataacggacagcacgagctacttcagctgaagagaattatacaactatctgaattgttagagaactataacctgagccctgcccgccgtaaaacgacgtctattatacaactatctgaattgttagagaactataactcggatcggctacttgtaaactagctatgtattatacaactatctgaattgttagagaactataacctcatggacaaggctcaagttatcttcacaattatacaactatctgaattgttagagaactataacgcgcacctaatccctggaaggctaggggtaattatacaactatctgaattgttagagaactataacaactcggtggctgatttattggagaagagcattatacaactatctgaattgttagagaactataacttattacaccgtccagatagctagttgtagattatacaactatctgaattgttagagaactataaccttaggtgcactggcaccgcctgtggcgaaattatacaactatctgaattgttagagaactataacgatggcgatttgatgccgaagaagcccttaattatacaactatctgaattgttagagaactataacctattagaccaagccagccatgggatattcattatacaactatctgaattgttagagaactataactaatgttacaggcgtaaggtactgttgcacattatacaactatctgaattgttagagaactataactcttaaaatgtcatatcatcggcaatgatgattatacaactatctgaattgtcagagaactataactagtcaccttggtgggcttttcgtcagcgcattatacaactatctgaattgtcagagaactataacccagctactctttgaaaaatatctaaaagaattatacaactatctgaattgtcagagaactataacgaaaagtcagcccaccgctgggtgggcaacttttcgttacaaatcctaacggatttgcatccctctaagatcccctcgcatagcgaatttcccgtttcccacacgagcactggcttttgggttggggggatacgacatgcggtaaagaatgcggagtgcaaccaagattttctccttatgcaacatacccgaggcatggcatatcagccacaccgattcacgcaacccaccgcacaaaaaccgctgagaggttactttactcagtcgttacgccgtcaaagtcttcctcattagcctcggctttctggcgtgtcgccctgacgatgccgtctttgtgatgcgccgggctgtagatagtgtacagcttcagcggctcatcaccggtgttgatgacattatgctcagcaccggccggcacaatgatggcgctgccgtcagacacagcatattcgttgccatcgattagcactttgccccgaccagcttcaaagcgaaagaattgatcgttctcgttatgaacttccgagccaatctcaccgccaaccggcaagctcatcagcaccagctgacaatgcttagcagtgtaaagcacttggcgaaagttatcattcgccagcgttaattgctcgatatttgcgctaaatcccttcatattacctcctactagttaccactattattataccagcctctccactaaaaagcggtgccattatctcataattaaagttacccatttgctagtcgttagcccataatttcggttacccccatcctacatcatgaaagaaataagtagagtgggtgtgaaagagataatcaggtttcatgctgtagccgggtcaattggctcataccccagcacacctgaacgcatgctataatctcggaaaggagaaatagtatgtactacggtaataaggctaaagttcatattccgaattggtgggagatccggaagatgtgcaaggggttggagcgacttaagccgcaagttagtatcatgcttgaatgtgtcggatcctttgacggcgtcccaaaaggaaagagatacttggatctctccgcaaatgaagacggaattgacatagagcctcattacttcggggatgactacaaaaaaatgcctccgcaggaagctgctcagcgtcgcacctggaataggattagagatagaggctacaagccggctgatcagccggacgagaccttggctcactttgactggaaggacatctacggcttcagttacgacaagtccactgatgccggcgtctccaatgtcaccactactcagcgaatcaccgctacccgggtagctgttcttggtttgtttgccctggcggcgcccaagaccaagaagcattatgagtattacgataatggcggcaagatagttgctgtgcttcataccacaagaggagatatcaaccttgaggcgaattacgactcttctgaggttattcaatatagagccaaagaatgtcgcaccttcggcaagtacgtcgccaagcacgccaaggccatcccgtcacaagatcagatcagtcataacgtccggctctagctagtaggctgtccaggcagtaaagtctccatgcgacataaggaaagtactatcgccacagcacagctagccacctaaacagccgaggaaacatatcctgacatcaacgcttgtcgccgactaagcttcaattcgattcttgcttctccagtagcagtcgaaaccgtttcttcaagtctacactaatgatagatttgggcggatattacattgcccataaaggcttcagatccttcatatcatgaacttcgtagccgcagtgcagcatcgcttcaatatcgtctctggtttcgcaaatataaagcttgtgacatccatcccaggaggcgaccagcaccttgatctcacttgacggcaagtgttagtgtagtcgccgtccttttgatctttaatcttgtttgttgttttgcctttggtcatgttaccgcttttgttgattgtgcacgacctatcatcaaagagtggtccgtcaaaatgccaaggccatgcaattgaacctctaaaattcatatggtataagcaggcaaaactggggtgcttgtagttcagatagctccagataggcgtcaaggctttaggactaactctaggttgaaagtagttttttaatcttttcccttatattaacatatactgccgtcaacctatctttagcatcctgtgtaagtcttgacgtatgcataactgcattgcgaatcggtgtgaaagccttttcgtcgttagtgagatgatctggatatccgtcaccacttctagggggatctgctatagaggctaggtgcgctaaatcaagatagaacagatcatcatctttactgcgtatgtcaattgctatattaccatttcttttatctttgctctctcgctgcctccatttttgtatctcgcagagaacgtctttcttgatttttgaactcccgtcaagcgcaatagatttatgctttattaatttacggacgagattctctgatataaagcactccgtatatgattgaagattaaatgtagcatcctcctctagctcattgatccatttctgaactctagcggtaggctctgaattatttggcagggccggtttatattcgcttgctgtttcgttatataatttctttgacgcccgcactttttgcgaaaaacgagggttgtcatcgtctccatcttgcttaatctcaatacgccacttatcccactggtcaataatagatttgataacggacttaatgctttctagtagttcaagaaataaggtatcgtcagaaactataccttcacgactgctggtaaatctatctatttcatctccatcaaggtcattataatggatctgtccatacagataactctccggaactctcgcactttgaatatgcttcaatatatctcgttcacgaagtcgaccattgacaaataaatccacaccgaccttctccccggttcctaatatattcagatctctcggtttttcgaccgaagctataaaaccgttaatatttttgttaatagtacgattgtcatttttgatagatctttttaataatgtttggacaaatgaatcatggctgttgttgtttattgaccagacaaattgagttttgtcagttaaatctttgacatctcctaaatttatttcgttgtcattaacataaatcttgaaactctcatcaacaagagaaaaacgaaaatataatgcgatggacttacgtatattatcaagcgtattgactataccatttttgagaccaataaatttaatgagagtcccacgttccatcttatctagtaacttcatgtcttcgtcagaaagttttccaagcttataagactcatggtctttgtcatcctgaatagccttgtctagctcgctattgtctatcactccgccagtagctatttctccggattttttagtcacgataacaatgcaatcggcgcatgaaagtaaagctaatttgccgataccttttctacctatgtaggggcgacctttttgtgaattagacttctttgcacgctttgaatagccaatccttagaaacttattcctaaaatcagacgaagacataccctcgccatcgtcaacaacgatcatctccgacttttctttatctatagttattctgacattatttgcatccgcatcccaagaattagatatggcctcgccgagaatagttataaaatttctataaagatttcttcctagactattaagcaccgccagagatatgttaaaggtaaattgatcgtctcttatattgctcatgactttatattctccaagtgctcattaattgacatgccgatgatcttacccagactaaccggcacagcatttcctatgtgcctgctaattgtgccaattgatattttatcaatatcttcaaagaacttgtaatcccttgggaaagtctgtaagagcgcaccttctctgagagatagagccctgtcttgctcaggatgaccgtagcgaccagttccaaaagagtaaaattgagtcgttatggtgggcgacggcttatcccattccatacgcccgtatacactaccaaatgatctaccggaaatcttcttataacactccggcagaagtgatctgtcccaatctcgccatgtcccaccaggttttgattgcctaattctcttgagatttatctctgtcaatccagcgcttctatggagaggatccttactgtccgtttgaccttgagacagcgcaggtaatgacgataatacgtctctaactgtaagcttcttgcctatagaactttccggtattaactgaatattcccatgtcttgaagctaggagaacgagccgacgacgtttttgcggtagtccatatttactacagtcaactatcttgtaactcgtataataccccaactcatccagattcttcaaaaaatcattaaatacatcatacttgcgaagttccggaacgttttccatagatacaatatccggttttatgtcttcaatatattgtgcaaacgacctcaatagattccagcgaacatccgttttagtatctatactcttgcgatatttattagagtgctgcgaaaatctctgacatggcgcacaacctaccaggattttaatgtccgccttaccaaacatgctatctacatccacactaggcaatcttgatacatcagcttcaataaatctcgtatggttattttcttcataggcatatcggcatgacgcatcattatctataccggcaaccacatctagaccggccttccttagtccacaagtgagcccacctacgccacaaaataagtctacgacggcaaccttgctacccacgcttatagtatagcagccaataatgcttatgcgtaggatacattgcagtatgatttaccacaattttatcatgtagtactttgagctacaatcatcacacaggaacactccgccattcttccatattgttttatttgagttaacgttgccggccgaagcctgtgccggctcggtacttcttcaaagtctttagctttggccacggcagacatcactgctaacacatcatctacctcatcacttcctcaacgcttcgtcgcttggaatatggttgcggtttgccatagccgattcgcagcaggatggtagggtactcgccatccagcctcaggtccttcgccatggcctccgctacttccgcctcctcgttcggttgattgaagtacgagtggacgacacccaggctagtagcagccagcaagaagcgctgtaatgtcctccccaagttgacccattcacgtagagtattgtctctggtagtaaagagaaccaggtgagaggccgagacaagcttgcgacggtcagacttattctgcgacttagcattgatagcacccgacataattagctccgccagccggcggggaacattcggcgcaccaaagacggcgtagctcagcccatccagcgtctgatcctgatgcttcttattaaatctcatccagctctttagctcaatcttaaagttctcgttttgcatttggcggtcatcgccctctaggacacgtcgctcaatggcactaaactgcgtcgtcccacgagcatagtagtggagcagtacgccatcatcgatgtagacagactgtagcttagtcagtgtctcaggtgggatcatctctccgctgtagacactgcggttcgtctgcctcttatctatctgattaaagagcggatccggtgccaatgtcctcctagctagtgagacagtgatgacacccgcatcgctcgtcgcaacgtcaacttcataattattagcatgagctgccaggcaaatattctccgtcgcacagcccagactgatgaataactctcggtgagatgaatctaccgccttcagtgcccggctaaaatccgggtgaatctctaccgccatgcccttccgccggaatagccagggctgggtattgtgccctgatggcgccttgacagcctgctccaccagatgcttgaaatcagcgggggatagctgcgctttgctcgtcatctctgccatagtgctcattataacactaccaccttagccaggttaaaaggcgagtcgtcgcctcatagctctgcttaccaatgacacaatatgcttttacgcatatcatcgctgaaactgagcgccaagacggctctatttccactcccggcgactattaatctcgtgcttctcgaaataggcttccgccagattaacgtcgaaccgattagccagttccatcaggtagttcaggacatcggcgaattcttcccgcaggttgtcgtgattctccggcttggcttcgcccttaaagcccgtctccttacgaatggctttggccagctcaccaatctcctccgagaaaagcaaaaacacctgtgtcactgagtttttatcccagccattctctcgacacgttttatccagatgcccctgcaattcagtcaagctaatagtcgatggatccattgaaagcttcttccttcccattcacagttacatatcaggcaaatccttcaagattctaccttcgaaacaaaaataagccaccccttgatatgcgccactactgttaacttgtcccttttcctcaaaaatctttctcgtcagaggcgacaaaaaccagatctgtccgttatatgcaactttacgttcacctgcgactctagccacgatagtctcgtccttaataaaagttatctcatcgccatcatgaagtccttttctgtaaaagctaaatctatggtcgctctgccttgccttagcaatctcactaaagtctactcctttgtttgtctgagtcggataaacaacctcgccctcaaacgaaagcagtaactgccgaactaggtcatagtcaagagcaaagagctcgctagtaccaacacgatgtttcgcaaatatctcgtgtagcaatgctcctttttcataataatcatccaccttaattgcaa

SEQ ID NO: 1907 - DNA, 23468 bp, synthetic construct
  source 1..23468: mol_type = other DNA
  misc_feature 1..23468: note = Synthetic
catttgcgacacaatcattatgaggtggctgaccaagatttgtgcaacgtgtttttcaaaggcaagatcaagaaagtcggcgtggaatataatttctcgaccgttttctatggctatgatattaaaaaatacattaaagctaatggtttcttgcccgagagcttttacagttacgatgaaatcatggagagttactacgcgccgaagatcattcattcgcagtttggtgtgaatggtaggccgtggcagcagggtaacgataatccagttggttttttgtggcgtaaatatttgaaactaacgccctggaaaaatgctaaaatgccagtagccaagaaggacataaactggcgattgtatgacctattgccgcaatcgataattgtcaatctgtatgcgtgggcggttaatcgtaagtttgcaaagacaaaatagtaaattaattaagttataggataagcattaaaaccgcgacaagaaactatgaatacgtgatgtcacgcgaagttttgctgctcgtgcggcttttttccagctaatctcagtaaacctatcggaaaaattatcgtagacttctttctcttccttgaatcggataccatttttacctttttccttgctggataacgactcggcaaaacggcggtattgaaaagtttctgttgtgtcaaaataaagcgaagcgccatcaataatcatagttaattcgacgatgacgtcttcaaggattttgtattttgtatcaaatgaatatcgtttgagagtatcggttttccaagtgatggatggaaaataaagccaattaccgtggcaaagcgacgcagcaagtttttcgccagatagtataccggattttttaggctgcagtattcttttcactttatcgacaagcggtagatatacgttacttttgtcgtcgattatttgtacgcgaggctgataaaaatctgcttcaccaatgttttttagcgcagtatcaacgtagctaggtaatagtttatcgtcgcagccgacgatcatacaatacggtgcgcttgcgtgttgaatagcgtaattaaagttggcggtgataccaatatttttacggtgtctgatatacgtgatgcgtttatcgtttaactttttgtaataattataggcggttttatctggataatgatcgtcaagaatagtcaaatgccaggctttgctggtttgtgctagcactgaatcgacagtttgctttagtagtgaaaattcaccccagtacggtacgatgatgtcaatactatttttcattcgaaagcctgattgataattcttgatgcaaatcgcgcagtcttcgctcgttttggtcgatacgctggcgctggttgttggcgatgtagaatagcaaaataattgtcgtagtttgcagaatatcaaataagcttaactctgacgaatccagcggcggatggcctattgaaatattatacagaggaaatgacccaatcaggacaaccatgataaccatccagataattaattgatgacgaaagcgcgttacactaactttgcgcagtttgtactgagtgatgatattgatcaatgctgctaaaataatcggcacattgagtagtacgaggataagatatctcattcgaataactccgttaagcgttgcttgaatagtcgtttgatgatattgatggcattccagttgttttgacctttggcgcgggaatagtcggtgtaaattgctttaatcgggtattcagaaataaccatgcctgcttgtttggcacgccaaatcatctctgagcaaaattcgtagccagtcgatttccagtcgaggttatcaattgcccttcgcgagtaaattcgcagaccggattgcgaatcagtaacattaataccaaacagggcataagtgatgaaacttaagcctttatttcccaaaaccttagtcctagacatgccctcgctattgatgagtcggctgccaatgagtaaatctgcgtcagagttgtcgctctgtcgaatgcctgctaagacatcttctggatcgtgctgaccatcagcatccatagtggcggcaatatcatagccgtgttgccgcgcgtaggcaagcccagtcaaggtggcgccgccagctccagaattcaagatatgattaatgacaattgcgccgcctttttgcgcttgttcaagcgtatcgtcttttgatccgtcgttgatgagaactatatcaattgagtagtcttttttggcttttgagaaaacttttttggcttttttaataacatctttgatgacactagattcgttgtaggcgggtatgatgacacaaacttttttcatcggtaattacaatacgttcaagtattctccgtagcctgatttcttgagtgtggcagcgatctcgtcaagttgctggcggttaatccagccgttttggaaagcagttttttctgggctgccgacaatttggccggtacgcgtttggacaacacgaacaaaatcttcggcgtcagttaggctgctgatagtaccagtatctagccaaacatcgccgttatcaagcgtctgaactttgagtttgccgcggcgtaaatattcggcgttaattgaggtaatttctagctcgccgcgggcgcttggctgaacctttttagcgatctcgataacatcattgtcataaaaatatatgccgacaactgcgaaattagattttggctggacgggtttttcttcaatcgagactgcttgattttgatcatcgaattcgacaacgccgtaacgctctgggtcagatactttataagcgaaaacaataccgccatctgggtcggtgcaggcgcgtagcgaatcatcaagagctgcaccataaaaaatattatcaccgagcactaacgctactttgtcgccgccaataaattcttcgccaatgataaaggcctgggctagtccttcgggtttgggctgaacggcatattctagattgataccccactgcgaaccgtcgccaaggagtcgttgaaagccagcttggtcgtctggtgtggtgattatcaaaatatcgcgaatccccgcctgcatcagcgtggtcagcggataataaatcatcggcttatcataaattggcattagctgcttgctaatagccttggtaatcggccacagccgcgtccccgatccacccgctagaattattcctttcataaacctcctgcttttatgatataagtatagcaaacagattagctaattgacaaaagtacaaaagtaagttaaaataaaaggatggcaaatatggagaaattttctaaacctgaggttaaaactcaggatacacaagatgcttatgaaagctatctaaccagagtatcggacaatctatttaccgacccagaccatcctgaaagagagccgaggagccgctcaattgtttatgtaccatatcgcggtttttccgaacagttacagcaggactgccctgaaattacctttacagatcttaatagtccagaggttgctggagctgtgtctgcggctgatgtcatcatcaatattgctcgcggtgaagaggttgttgaagcagaaactggacacccagacaggaatatcaaactaccgccagagtcgttggcaaacactgagatggttggtgatttatatttgcagacgattgaaacgggcaatacagatgtacaagttgttcacactggtaggatgaataataagacgattgctatggcgacagcaatgccaatcttgactgaagctgctggtctgaacgaagaagatgttattcatacgcctgacgcacaaatacgtcggttggtagaaaataatcacattgatattaaagaattaatggattcggtagatactgatccaaaaatgcaagcaatgcaagttggtgtgcgagctctcaggcgaatatatgaggcgcgtggtgttgatccagacaccgccagctcatctgagttgaccaacgcactactggacgaatataagaaatatccgcgtatcagcacctcgacactaatgaaagagcagatgctacagaacgttgctgaaaagttacgaagtgaaggtaagagtgaaaaagaaattaatgaagtagttggaaaactggatgagttcacagatgaggaacccgactcggttgatacggttacgaactttacgaacagtatcccgatgattttgtctgataaactgatcaaaaatggctacaatgccgatgaggttggcgttatgagtaccgaacaaaagatggaattgttggcagacactgaaatgacagcagtgtttgtagctgacattgcacatatgccgcgggtgatgtggttggctgattatctgatgccggataactttaggctggtattcgttgagagtagaacagatttggatgaagatgcactacaaaaatcaatggagcgcgaagagcggtcgcttaatctcactagaaattggttaccaaatcagatgggcactaggaatccagctaaagtcggtgaactagcagataaggcttactggggtaaggatagtataagtaatgaagaaatcaacgctagcattcaacaagcaaagtagataatctaaccgagcagtttatctaatttatctcgccaatcttctggtataaatccggttttttcaatttttgttagatctagagtgctttgcagcggccgctgagcgacacctggcttactggcgaaatattcagcggtagagactggctgtatgtctgaagatgatttacctgatttttcaaagacaatcttggcaatttccgcccagctggtcggttgaccttcatttgtcaaattatacgtgccgtatggtgcggctgtttccagcaaatgcctgataccgcgcgccaaagtatcggtaaaagttaggcggccaatctggtcgttgacgacggaaggtttgatgccacgcgctgctagatcctgcatgatgctgacaaagtttctgccgtcgccgattacccacgaggtgcgaataatgtagtgcttggttgttgtagtggcgactcgatcaccatcagctttagttttgccataaacgttaagtggagaaaaaggttcgtcttcgttgtggattggttgggaaccgtcgaaaacgtagtcagatgagaacgttacaaaaattaagtcgtgctggctagcggctgttgccaagtagcgggtcgcgtcgacgttaactgttttaactaggttataattgctgggattttctgcaccatcaacgtcggtccaggcggcagcgttaataattactttgacattatcccagttaaactcattgattgccttttggttagtgatatcgagttgttcgcgatccagggctagtgcctgagggtaaactttttgtagtgctcggccgacttgcccgttagcaccagtaataactattttcttgtcgtccatcaaacctccacaggaattacattagccagcagcgggtgagcggcgtcttttccagaaatgattgcttgctctttgttaattggccaatcaatgtcaagtgctgtatcaaacaaattgacaaacgtgtacttggcatctggtgaccagtgggcgtcaaccaagtaagtataggcaatgttgtcgtcaagcgcctgatagccattagcgacgccttttggtacgaaaattgccgtgccaggattgatttcgtgcgtgaaaactcgaccgaagctgtcgcctttgcgcaaatcacaccacgcgccgaatacccgaccattggcggtggagataaatttgttccacggctcggcgtggaggccgcgggtagcaccggctttatcgttaaagctgatgttgttttgcacaatgtcaaatgacggcagtcccagtgcttccattttttccttttggtagttttctttgaaccagccgcgattatcaccgtggacaggcattgtgattacaaataatcctgggattggtgactcagtgacggtgagttcgttataatttgatgggtcaaagttcatacttcctcctccaagaactttttaaaacctttcctaatatcatcattgaacacgatatcggggttaattccgtcaagcggcaacgtgactatttcagcagcgtcatcgcctggtttcggttgtgcatcggtatgcaggattgcccagaatagactggtgaggattggtaggtcttcaccctggaaatgatatgttgcaggtactgagcagaagtaagtgagcggactataccattccttcgtcagccctgtttcttcggtgatttcacgatgtgtagcatcctcaatgctttcgcccgcttctaggaaaccaccgatacaatcaatcatacccttaccgggattaatagctcgccgggacaatacgacatgttgtctgtcggatgtcaaaaagaataccccagtagttggcaggggattgttaaaaatactatgctgattatcgcaaacccaaaacccgccagacgttcgattcagtgctgtgccacatcgtcggcaaaagtttatttctcgctgagaatagatatcttttgtagcgatcattctctattgcccctgctttgcatacgctgcttcaacggcttctttttgcgctttccaccagtcttcgtgctcgcggtaccagtcaatagtttgcagtaggccgtcgcgcatgccagtttggttgtcagtgtactgtggctgccagcccagctcacgtcgcagtttgctagagtccatggcatagcgcatgtcgtggccggggcggtcattgacatgctcgtaccaatctttacctttacccatcaactcacaaatcagttcaatcaccatcttgttattaacatggtcgttgtcagcaccgatgatgtaggtctcgcccaactcgcccttttccaggatgagatgaactgccgaattgtgatcatcaacgtgaatccagtcgcggacttgctcgccagtaccgtacagtttgggcttgatgttgctcaaaatgttagtaatttggcgcggaatgaatttctcgatgtgttggtatggaccgtagttgttagaacaattggaaatcgttgctttgatgccgaagctgcgaatccaagcgcgcactagcatgtcgctggaagctttggtactggagtagggactagacggattgtacggggtgtcttcggtgaagcggtttggatcgtcgagctccaaatcgccaaatacttcatcagtcgagatgtgatggaggcgcttgctgtgtttgcggacagcctccaaaatggtgtaggtgccgaccacgttggtctcgacaaacggccatggattgcgtagggaattgtcgttgtgactttcagcggcgaagtgtaccacaatgtcattttcagcgactaatttatccatcaacgcggcatcgcaaatgtcgccttccacgaaattgatctggtcagctactggctgtaaattagcgcgattccccgcataggtgagcttgtcgataacagtaatgtcgtattctggcttgtgtttgacggtataatgcacaaaattcgagccaatgaatcccgcgcctcccgtgactagcatctttgtcatatttatattgtaacaaattaatatattaaaatatatttttagtctgcaaatccattcggattatttgactgccacttccaactatcggcacaagcttgttctatagaataaacagtttgccagtcaagttctttcttggctttacttgcatctgcataagaagcggcaatatcacctggtcttctatctgttatttcataaggtattggctttcctgcagctttactaaatgcatcgattagctccaatactgagacacccttacctgaacacaaattataaattgcaacacctggcttactgtggtttaaggctgctgtatgtcctgatgctaaatccatgacatgtatataatcgcgtacacctgtaccatctggagtatcgtaatcatttccaaatacaccaacctttgcgagtcttcctacggctacttgagtaatgtaaggtaaaagattatttggaatgccatttggatcttcgccaattaaaccagatttgtgtgccccaactggattaaaataacgtagaatagtaacttcaaaatctgggttagctgcggctatatctgttaatatctgctcaatcataaattttgtccacccgtaaggattagtaatgccgacaccagcttgatcagattctgtaattggtaatttttttggtgttccacatactgttgccgagctagagaatactattttattgacatcaaatttactcataacatcaagtaaaactaaacttgattctagattatttgaataatatttaagaggttgttcaacagattcaccaactgctttaagtcctgcaaaatgaattacagcatcaggcttttccttttcaaagattttttctaacttagatctattacgaatatcagcttcgtaaaatggaatttctgttttagtaattttattaagcctattaataacttcctttgatgaatttgagagattatcaacaatgactatatcatttccattctctataagctctattgcagtatgtgaacctatgtatccagttccaccggtaagtaaaatcttcataaaacgaatcctttctataatgtaattgtaactactattatataatgtaaatatgataaccgtaattatagctggtggcgctggtactagactgtggccactttcaacgccaaacaatccgaaacagcttttgactctaactagcgagcgaactatggttcagcaagcttatgatcgtgcctctagactaggggatacggtatatattgttactgaatctagtcatgcagataaactacgcgatcaacttccagaactccctagtgatgcctttttaatagaaccagggcgtcgaggcacggcacattgtattatttttgcacttgattatattgcacgccatcataaagccaatgaacccgttgcttttattcattccgatcataatgttcgtaatattaaaggctttaagcaatctttccaatcggcggctaccatatctcaacagaataattcaatcgcgctagttggcattgaacctactgcaccgtcaactggttttggatatattgaatgtggcgacttaatcgataaaagtaataatgcatatacggtaaaatcatttaaagagaaacctgattacgaaaccgctaaaaaatattttgcttctggtgattatttatggaatggcggatattttgttgggtcagttgatatttttgtaaaacaaatgcaacaatttgcgcccactttgatggaagattacaataaattaagattcttatctcacttcgctagtgaggaatattataaaacatatcttagttttgatgttcaagcaattgatacagtcttgatcgaaaagatgccgaacttatttatgatttcggctagttttgattggatggatattggaaattttaaagatttatatgatgtccttataaaagatgaaaagggtaattattgcaaaggcgaaaatatttatattttagatactgatacagcttatgtccgtaatgaagagccagataagccagtcgcggttattggattagataatattgttgtggttaatacgccgaacggtattttagttgcaagaaaggatatagctgctaaaacaagtgaaattactaagatattgaataaaaaaatttaaattaagatccatattgccatttaaaatgtagcgtgatatatttgaattacagtcccttaagtaaggattgtactaatatctaaattgttttaggtttctataataatttagcaacttagggcgacgattttgatcgtgcagctacggttgagaattctattgtgaatctaaagcaaagctctaatccgctcactagttgggcggattatcttttgtgcgtttcgattcctcttatactttcaatcattatcatttgattatataatatagttaacaacgacattataaaaggggcttctttatggcacaaaaatcttcatattcaccgaaaaaatactcactggggttagacatcggtacgagctcaatcggctgggcggtattagacctagacaaggaacgtattcacgatttgggggtgaggatttttgagcggccagaagatccgcaaaatggcgattcgctggctaaaccgcgacgcgacgcccgatcggctcgccgtcgcctaaaacgtcgtcgccagcgcctcaatcacctcaagcagttctttattgaccaaaatattctcactaaatatcgagtcgaggaagttctagattacaagtctgatttcaacaaattagacgtgtatgatctgcgagcaaaagctctcaccgaggagctatcacccgaagaattgctcaaagttttgtatcaaattaccaaacgacgcggctttaaatcaaaccgcaaggtcgtagaagagtcagacaaagaaggtggtcgtgtcactagcgccctcaaaactaacgagaaattcctcgccgacaacaattatacgaccgtcggcgaagcgctaagtcgtgatgaaaaattcgctttgcataagcgcaataaacgcgacgactataccaatagttttgcgcgcgatgactttttgcgcgaactagaggccattattaaaactcagcaaaattatatcctgaaaaatgtccccgaaccagctattaatgaattgatctacggcattgacgatggacaagtcaccaatgtcagcgccatcatgtaccagcgtccatttatgaccaaagaactaatcgaaaagatggtcggtaagtgtacttttgaagatggtgagaagagagcgccaaaagccagctatagtttcgaagtatttcgcctggcaagcgatttatcgcacctcgttttcattcctcgtgatgccagcaaacgccaagctaagcgcgagaatctagaagtagggctatctccggaacaaattaaacaagttattgagttggccaaaagccaaaagagcttaacatacaaaaaagtacgcagcaccgcaggaattagcgaagattacgtgccaaaagatgtgcgtggcaagaaaaaagatggtgatgaattcggcgaggaaaacgtcttcggtgggctcaaagcctacaatgatattaggcttgcgctaaaagatctactagaagattgggtaaaaattgataatgaatcagcaatcaaccaaatcgcctatatcctcacgacacaaaaagccgacgaaggtattcgtgatgaattaaatctattaccgatttccgacaaagccaaagaggcgattgtcaaaattaagccaactaatttcaaagcatttggtcatttatcgatcaaagctctacaaaaaatcacgccacatattctcgaaggtatgacttacgacaaagcctgcgaggcggccggttacgacttcaaaaagcaatctgccagcctagagcaaattaccaaccctgtcgtcaaacgcgccatcacacagaccctgaaggtcgttcgtgctattgagcgtaaatacggtaagccatatttcatcaaagtcgaaaccgcccgtgatttggcgaaaaattttaaggaccgcaatgcgattaaaaaagaaaacgaagaaaatcaaggatataacgaagacattaaatcaataattacagacgggtacgaggcatcgcctaaaaccaagggcggtaaacagctccttagtcatcttaaagaatttaacgtacgattgaataaaaatgccgattttaatggccagcagattattaaggttaagctctaccgcgagcaaaactgtgtctgtctatattctggaaaacctatcgattttgagacgatgctacatgacgataatgcctatcaggttgaccatattataccgttttcacgttccaataacgatggaatgacaaacaaagttctggtgttaactgaggaaaatcaaaagaaaggtaatcaaacgccatttgaatattttggcgcagacgaaaaactctggaaagagtatgtagctcgagtagggtcaacttatcaaacgcgagaagttaaaaaaggcgacaaagatgctggaattaactacaaatacaacggctacgccatgaaaaagaagcaaaatctattgcttcaagattacaaaaatgacagttggaatgtgcgtgcgctgaatgacactcgatacatcactcgatttatccaaaattatttgcgccagaatgtcgactttgccgaaggtgaagaaaaacagcgcgtcatcgcgccgaatggcacaacaacggcatatttgcgtaaacgctggggattagccaaagatcgcgccgaagatgtgctacatcacgccaaggacgcggcagttgtggcggcaatcgatcagaagattgtcatgcaagctaacttgtacgccaaacaccacgaaatcaaagcactgctcgcggcgaccaaaacaatggaagaaaaaaccgacaagctcactggcgaaatcaccgatgaagacgagttcgacaaagcacagcgacgtaaagccgccatcctcgtattgtcatctaaacatttccctcaaccatgggataactttggcaaggaagttatgaagcgcaccctcaacactgatatcgccacattgcaaaatgagctacgcggacttgataattacgatgaagatttccgcctgagcgtaaaaccgatcttcgtctcaagagagattagacacaaaatacgaggagaagcacatgagtcaaaattgcgatctaaccgaaatcgtaacggacaaaacatcatacgaattccactaactgagctaactctacaaagactagaaaattctcttgtaaaagaagagtttgatagtcagaaaaatagcaatggatctagtttatacgaaaaactactagctcgacttaatgagtgtaacggagattcaaaaaaggcttttaatcctccatttaagctgtacaaaggtccaaaacaggacaaaaatggtaatcccatttcacctgtagccgcagttaaagtctatgacaagaagggcgtggtttctgttggccgtaaggcaaatgcgccagtcgcccttgctgagatggttcgtattcgcgtatataaaaaagataaccaaatatatatgatacccgactatcgcataaacatactagaaaataaagagacaatggaactcctaaaaccgttaaagaaagtatcaaaaatcgacaatagttttaactttatcggttatttgtacaagggcgatctaataacaatacaaaaagacagtcaaacttttgttgggtattttgttcaatttgaaggcgacaatcgcataacaatcaagaaccacttagccgtagacagctctagggattcaaaatctacagtaaaacgagaatcgctgtctggcattaattatctaaagatacataaagtagatgtgttaggagacgtgaattttagcgagggtattgtatggcctggcgcgtcgtagctatcgaaaaccctgccagactcagtctgcgggataatcaattggtaatcgcgcaagatgtcgaagcgacactaccaattgaagacctagacacgcttgtcctggacagttatggcataaccacgaccgcaaacttactaacagcactcgctaccaagagcacaacaactgttatctgcgacgagaaacatctgccagccagcgtgcttttaccgtattcacagcactcgcgccaggctaaagtttcgcgacagcaacttgctatgagccagccgctcaagaagcaattatggcagcacgttgttgaacaaaaaattgtcaatcaggctgacgttttgcggatggttgggctagatgatatgtctatccgcaagcacgcaagcgacgtcaaatcaggcgacaccagcaaccgcgaatcaatcgctgctcgcatttattttgaccagttactcgacgacgccacacgccgcaaaccaatttggcacaatgccgcacttaactatggctacgcgatagtacgcagtcatattgctcggcatatcgctgctcgtgggctagtcgcttcacaggggatttttcaccacaacgagcttaatagttttaatttagctgacgacttgatagagccctatcgtgctgccgttgacttatatgtcctagaaaaagtcgccccacttcatgttggcgaccgtgacgccagtctcaccaaacatgatcgacagcttatcattgacatattaaattattatgttataatgagtgataagaagtttatgataaagcatgcggttgagcgaacagttgagagctttatcgaatgtatcgaggtaaaggaggtgcgtaagcttcttttgccaaaaatcgcctcctaacagggaagggatgtcatataaaatcatgagggtcgcggtatttttcgatttgccgaccaatactaaagctgagcgtagagccgccacgcaatttcgtaaattcttgctagacgatggctttgacatgttgcaatacagtgtttatacgcgattgtgtccgaatcgtgacgttgctgaaaagcatatgatgcgagtccgccgaaacgcacccgacagcggatcggtaagactactttatttgaccgaacatcaattcacgcacatgtacgttatcgttggtgaaaaaactactcaggaaaaggccgttcctgttggtcaactagcatttttctaaccaaaaatccccctcgtaacagagggggatttgaggaagtattataccaatatctaaattgttagggaactataacaatggcggacagcagcttgacagcctatctattataccaatatctaaattgttagggaactataacccggcatcaatcagcttcaagccaacataaattataccaatatctaaattgttagggaactataacatgatcaccgtatcatagttgtcagtgagtattataccaatatctaaattgttagggaactataacacatatttcaaggtgctcacattgccgttgattataccaatatctaaattgttagggaactataacacagaatgcatttggtatgaactttgcattattataccaatatctaaattgttagggaactataactgtccgcgattggataggagtggccaacaaattataccaatatctaaattgttagggaactataactcagtctctggttttactaggtcggtcaacattataccaatatctaaattgttagggaactataacgcgatactaagtttaaatatgagattaagcattataccaatatctaaattgttagggaactataacacccgcgcgctgtagtagtatcaaacataaattataccaatatctaaattgttagggaactataaccggcgcttgtcgccgccacccctgttatttattataccaatatctaaattgttagggaactataacgtggaacaaaaagtactacttcggtacttaattataccaatatctaaattgttagggaactataaccgccattaaacgcgtccgccactacgatatattataccaatatctaaattgttagggaactataacacttttactatatctgaaatgattttcttaattataccaatatctaaattgttagggaactataactccttgggaagaaaacacaaaatttaaataattataccaatatctaaattgttagggaactataacacactgagagtctttattttagattaattatctcgtccattacgatactctataactaagtcaattttctgttcaaaacttaaagctagaatagccttgtctttttcgtttttggtatgtccatctaccatttcaagtaagtcttggtacgcacccttaagaaacttggcagcctgttcctgttcatccatagtcaactcactaactggtttgagtaaaatatccttaatattcatattctctcctcttatatattatatagggaaattaattaaaagtcagatataacgtagattatactaatttaggcaactatcataaaatatattaaatataacttgattttcgtaattcgctcttagttgataaacaaatcactggtctggttgcttaataatacagttggattgttaatagacaactcgctgataattttacaatcactacgactacttaaatagattaacatgagttataaggtagtggctatctttaatttaaataatatacgctatactcataatatgacttgtgatgtctcgtttaagatagcaaagcttgccgagggcaacgaatcctacgctgcctttaaccagcgcattgttaacaccaagatgccggtcatcggtgtgcgtgtgccagatttgcggcggctggcgagggaattagcacctaatatgagtgcagcggatattagcaaattactaacggccaggaacgaatcatttgactacgtgctgctatgcggactattgattacatacgctcggctcgatgatttggtggcgattgatctagccaagcgctacctatcactcgttgactcatgggcgcacattgatacgtttgtcgagaaaaatcggcgctttactggcgaagcgtggtgggattttgtgctgggatgcttacagagtgaagctgagttcacggtgcgctatggcgtggtttctttgatgactaatttcttggatgaagcacatattgatcaagtttttgccgcgctgcgaaaagttataagcgacggatactatgtcaaaatggcgctggcctggctgtatgccacggcggcagtgaatttttttgaaaaaacgctggctgaactggaaaataggcaaattgacgcgtggacgcgcgacaaagcctatcaaaaaatgcgcgaatcgcggcgattcacgcctaggcagcaacagattatagtaaaaaacaagcgagcgagtggttgatggccggggtaatggcgctcttatttattactgctatttttattacttttaaaattttccgcgttcataaattacgagaagccgaaaaatatcataatccaaaattcctcaaacacttgcaaaatattgatgagtttttagcgcaaaccgacggctttgatagttacataaactggaaaaatcgcgacgaaatcctgaaaaaatacgaaaaaactcacaacttctttcagggaaaatctaagtattataaaaaggagccgcgtgttcgccaatttaacggtctttatgaaaactttgccgagttcattaaaagttacaaccagaaatatgtcgccgcgcagaaacaactcaaccgcgagttctttcgcgatattgaaggcaaatcgctggatgatcagcagcaacaagcgatcattaccgatgagtattccaacctaattatcgctggcgctggttctggtaaaacgctgacgattttaggaaaagtaaaatatctgattgagaaaaagaatattgatccagaaaaaatccttctactgtcatttactcgcaagactgtcgaggagttaaaccagcggctgcgtaatttgggtctgaaaacaaaggcgacaacctttcataaactgggatatgactatatcaagcattttcagaagaatccgccggccgtcgctaacgagaatttactgcaccaaactatcaagcaatttttgaaaaatgatattttacatcatgattctgcgcttaaatcattcgtacagtttatggcttgctatctgaatattcccgaggaaaatgacgcgtttgattcgcttggcgagaagcttgatgttaaaaacggcatagattttgagacgttaaagtcgaaatattataccaatacttccggcagccggcggattagtaaaaacaaacttgatatattttctggcgagcgcgttaaaagcgtcgaggagctgatgatcgctaatttcttattcttaaacggcgtgaattatgaatatgaaaaaccgtatccgcacggcgatcatatgtatcggccggatttttatctgacggattatgatatttggctggagcatttcggtatcgataagcatgggcgcgccaaatggctatcggagtttcaggaaaagcagtatataaaaaacatgcataaaaaacgtgtcaagcaccgcttgtgtagaaccaaacttttagagacgtattcgtggtataatcgcgataatattttgctggataaactgcgggaaatgctggagaaatcgggcgttgtttttcagccgctgagcgagcaggagatttatcataaaattatcaagcaggattcgtcatttggcgcggagattattagcttaattactagttttatcaatttgagtaaatcgcgtggtttagcagctggcaggttgcggcaattcattaaaaatagcaaaaccaataataaattcatcagcgcccgccaaaatttgtttttggattttactcttccaattcttgaaaagtacaactcggcgctgtcttcgcgcagtgaaattgattttaacgacatgattaatcaagctgctaatttggtgcagcaaaagggtgttattcaggattacgattatattattatcgatgaatatcaggatatttcggcggctaggtttaagctgattacggaaattcgccagcgctcgggcgcgcggttggtttgcgtcggtgacgattggcagtcgatttatcgatttacgggcagcgatatttcgttatttagcgattttggcaagtttgttggtgagcatgaaaagttattcattgaaagaacttaccgcaactcgcagcaactgattgatatttccgccaaattcatccagcaaaatccgcagcagctggctaagaatcctaaatcttccaagcagctggattgcccggtggaatttgtgctgtacaatcagaatgatgcttttgcggtgctggtcgatcagattcgccaaattgttaccgaatgcggcgcggagcagcaaattttactgttagggcggcatagttttgatctggactatgtgatttgccagagggatgacaagggaaaaattattaaaaaccagttgagggaggaagttgagaaatataatgaagccactggcgcgctgattcttactggctttgaagatgttgatatcaaatttatcaccgtgcataagtccaaggggctggaggcggataatgtgatcgtcctaaatttgaaaaacgacttgtatggcttcccaaataaactaaccgatgatccgattatatcgctgctgctgagcgcgccggaggcttgccgtttcgccgaggaaagacgtttgttttatgtggcacttaccagaacgaggaataaggcctatttattaacaccggaaaacgaatcgctgtttaccaaggagattaaacgatattccaattatctaatccaaggacgttacggcgaatcggaattggttaactgtccgtggtgtaaaaccggcaggctgattatccgccagaatagccaaactggcaagagtttcgttggttgctcgcattatccgcattgcagccagtcgtataataacgtcgaaattttaagtaagccaatcttatgttcgtcatgccgaagcggctttttggtgcgccgccgcggtaagtatggcgaattcttaggctgcacgaattaccccgattgcaagcaaacattagacctgtataaagatttggatgccaaaaataaagtataatgagaatgaatggagggattatggctaaaccaaacattgcgataaaagacattgagtcggcgctgaaatttcggcgggcaatgaaaagttttgatgcgtcaaagaaaattaacgaagaggatattgaactaatcctggaggcaattcgtttgacaccgacatcgtacggttttgagccatttaacgtcatcgtggcgcaagatactgatttccgcaagaaacttgaaaaagccgctggcgttaacgccgctaaattcaccgctagccatttgctaatttttactgccaaaactggcgaagaattgacgcgaaaagacggtcatatcgatcatatgttgcgtgatgttgcatatatgaacgctgttatcagaactggctataaaacgttttggaaaaaatgggcgaagactgattttaagattttcggtgataatgagaagttgcatcagtgggcggcgcgccaggcatatattgctctgggatttgctatgatgacagccgccgagcgagggattgattcgtgcgccatggaaggattctcgattgataaacttgcggaaatattggaagaacttaagttgattgaccgcgagaaagatctgccagtggtaatgctggctctgggctacggcaataaagaaccgcactcgcaaacccgccgagatattaatgaaataatcaaatattgttaatcaattggttttattaagatataattatagaattaaacaagtgctataataaattttatgcaattaaataggcttagtaaattaacaacaggacttgttgctcttgctttgtttggtgtttgttttcaggcgcctatagccgtttttgctgatacgtcgttttcatcttttgctttgattataaaatcttggaaggaaatactctttggtgtagcggcaattattttgatttttataatctggcaaaagaaacttcaatacgaattatataatgataaattaatttgggtttgtttggcggttgcagctttaaatgtatctttattggctatattgccaaataatcagttgtctgaggttgcggcactgattataaatctaagaatttatttagcttttatagtttgttatattttagttaaaatatatccacctgctaaaaaaatattattaaaatccattggcgcgggtgttgctttggtttgtattattgctttgttgcaagctacaattttaccaaaagacatacttaaatcgcttggctattccgatcttacaattaaaccttatttaacagtagatcaaaataataattttgttagaattaatagtaccttgcgcggtccaaatccactaggagcttttgcggtaattgctattaatttaatggttgtattttggcggagatatcaaaaaatcagcaaaccctgcttaattttaggcattgtagttttatgcggcgctcttgtggcgctctggtttagctattcgcgtggcgcttggctagcgatgcttgtatcaattattataattccacttatctatcaagctaaaaatggcacaataaatcatcgcctgttattaatagtgccaatcatgactgtaatattaattacactaatcgggttaaattcacaaagtagttttgtacaaaacgtaattttccataataaccctgaaagctcaagtgtaataaaatcaaatcatggacatatgcaatcaatgactgatggtgtaagtacagtcgtaaatcatccatttggttttggtttgggtagtgttggctcgccttcattactatctggcagtccaaaaattattgaaaatcaatatatttatatggcaattgaaactggtgttcttggtttggttttgcagatgatggtttttggtatagtactctggaaattatattctcaccgagacaatctaagtattggtgtcttagtttctgggattggtatggctataatcggtatgtttttaccagtttgggcggatgatacaattggcataatctggtggagtcttgctggtttaactatcgctacaaataaaaagaaaaataacaaaaaggaactagcaaatgcgtgaaaaaacaacaaagaagcaacgtgaattacttagttatatagaaacttttataaaacagaatgatttttcacccagttaccgcgaaataatgaaagctatgggatataaatcggtctcaacagtggctaatcatatcgataatttaattgaacgtggctatattaaaaaaggcaaaagtggaattagaatgctggaaattgtatctgtctcatctgagctagataaacacaaaaaatggttaaagcgaattttggcaagtaaatgtaaacatcttcgaagtgttaatactagtgaggcaaagcaggatttagttgctattgagcgtgtatcaaaactacttagtcttgaataatattcgtattttttgttattataagcataattgttatgtatccaaataactcgccatatcctccgcaaaatcagccagataatcagccctcacaaggaggctatccacctcaaccaccaggttattctgagtctggttttagtggtggcgatagttctgggcaatttagcgcgccgcagggtaactatacacaaccttattatccgccacagcagtcaagttatcctccccagaatcaacctgctccatatccatatcaacagtctgcgcctggattccagtctaattattcaccgttaccaccagcgtctacttcactaagtagtggtagccgtgttcccgtaccgccaccaagagctaaacgttacgataaattaccgctaccgattagaattgtagattggtttaagaaaaattggtgggcaccagtaattggaatatttatattagttattgcgggcgatattgtctatcaaatggcttaccccgtcgatgctttaccgcctggagtttcaattgatggaattaaagccagtcaatctagtcgagctgaaattattgaaaaactaaatagtgaatatagtaaggttccagttgaaatttattttggtagctctacttctgcttacaaggtatcgccagctaaagaagttggaattattgttgacaataatgatcgtctaaaaaatgctggatatccgctttggttgagacttatccctacgtcgctttggtgggctgcaaacttatctaaaattgatggacctatatataaatacgataaatctacgctcgataaatatactttaaaagagcttggcgcggattgtaaaattcaacctaaaaacgcatctcttaaacttgaggataatcagtttgttgttgttaaagctgtatctggcggaacttgtaatgctactaattttgctgccgaggtgcaaaaggctaggattggtaataatggaaaaattacagtacgttcagatatagaagaagttactgcggatatttcggatgataaagctaaagctttggctgataaacttaataatattttgtctcgcgaatttactataaaagctggtgataatgtcactaaagtttctggcaatacaataaaaggctggctggtatttaaggctattgtgccgaaggaaggcgaaaagggcgattcttcattaaaggctgaagttgagaaggataggcttaatagatatctacaaagtaatgtagctagtagggttgagaaaaaacctggtgtaacaactattacaactaaggattttacattaatatcacaggttaacggtgcttcaggtgttttgattgacatcgatgcaactattgctagtgtagataaaatcttggcgggagaaggtagtgagattattgttagtacaaaaaacgtt

SEQ ID NO: 1908 - DNA, 22262 bp, synthetic construct
  source 1..22262: mol_type = other DNA
  misc_feature 1..22262: note = Synthetic
acgacaatcgcggttattgcaaatcagctgccggatatttaccccgccgccaaccgcgcgcttggcgaaagaatcatcgcgcaaggcggcgcgatcttgtccgagcactgcatcgacgagcctaaaccgtacgtcgtcggcaaatggagctttctcacgcgcaaccgtctagtcagcgggctcgccgacgcaatcctcatcaccgaagcggccgcccgcagcggcacgctcaacaccgccgcacatgcactcgcgcaaggtagggaggttttcgttgcccctggcaacatcaccagcccgatgagcgccggctgcaatgcgttgattcgccagggcgccacgcccgtcactagtcccgacgatattatcgccgttttgctgccgcacgaaaaagcccggcagtccacgctggcgcgcggcgatacgcccgccgaaaccgccatcatcaaacaactcgccgccggcatacgcgacggcgacgaaatccagcgcgcgaccagcttaaacgctgtcgaattcagcaccacgctcacgctccttgaaatcaacggcgtcatccgctcgctcggcgcaaatcagtggacgctgcgctagatatcgctcacgcttgcaaaactgcctctgtttgcgttacagttttgcaatgaaacacgaccgcccaccagaagacaaaccgctcgtcgctacacgcgacatttttacgataccgaacgcaataagcctatgcggcgcggcgctcgcttggaaaggcgccgaaaccgcggaaacgcctaaaggaactgctatgcttatcgctgggcgggggcttgacgcgcttgacggcaaagtggcgcgcgccaccggtcaaacgagcaatttcggcgcattaacagacgctagtcttgataagatcgcaaccgcaaaaattatatacgaactcacgaagaaaggtatcatgccaaaggaaatcgcagccgcgctcgccggcttacaaaccgccaatgcgcttgcaaccaccgcgaccatgctgaaatatcccggcaaatcaatccgcccgacaacatcaggcaaactcgcgatggctggagaaatggcatcaatattcgcttacggtatcggcgccgcagcagaacgaagcggccacgaaacgatcgcggcagtttctcgggctgttggcgggctcgctttcgctgcatcgctgccatgcgcgcttcattcctcatacgcgtacgtgcggcaagctgcccaatagccgcctcaagcaatttggcatttttcgcaatgcactatattatagacagatatgaagaacctcgttatcgtcgagtcgccggcaaaagcaaaaaccattgaaaaatatcttgggcatgattttcatgttttgtcaagcgtaggacacatccgctctattgcaaaaaaaaccaaagacggcacgccgccaattgatgttgcacacgatttcaaaactatatacgaaattgatcccgaaaagaaaaaaattatcaccgagctaaaaaaagccgtcaaggcagtcggcgcagcaaacgtctggctcgctactgatgaagaccgcgaaggggaggcaattgcttggcatttatgcgaagttttaaaccttgaccctgccaccactaagcgcattacctttcacgaaattaccaaaccggcaattgaagcagcaattcagcacccgcgcactgttgatatgaagctcgttgaggcgcagcaggcaaggcagattttagaccgcctcgttggctttgaactaagccctgtcgtctggcaaaaagtcccaggcggtaaatccgccggacgcgtacagagtccggctgtacgcctactggttgagcgcgagcacgaaattgagcagttcgcgggtagttctcagttcaaggtcaccgccgtatttctatacgacgggcaagaagtcaaagccgagcttaagcagcggttcgacaccgaagctgatgcgcgcacttttttagaatcgctcaacaacgcaaaatacattatcgacgatataaaaacgtcgccctcaacccgcaaccccgccgcgccattcaccactagtacattgcagcaagaagccaacgccaaactaggcatgagcagccgcgccactatggcaagcgcgcaaaaattatatcaagaaggacgcatcacatacatgcgcaccgacagcgtaaacctatcaggacaggcaattgccgctagcgccgattacatcaagcggctctacggcattgaatacagccgcgtccgtacattcaaaacgaaatctgccggcgcgcaagaagcccacgaagcgatccgtccaaccgacgtcacgcgcgagtcggtcagcggcaacggctacgaccaaaagctctacgacctcatccgccggcgtacactcgccagccaaatggcatccgccaaaataaagaacacaacggcgacgatccggatcgaacaagcagacaccaagcaagcgatcaatagtactgctaatgtagacaacctcgtttttgaagctaaagggcacaccatcgtcttcgacggcttcttgcgcgtttacggcggcggcaaagacgatgcaatcctaccaacattcaccgctggcgatcttgtgcgcgaatattccatggaggcgcgccaagtctttgcccgtccgcctgcgcgctatactgaaggtacgctcgttaagaaacttgaagagctcggtatcggccgcccaagcacctacgccacgatcatgaatacaatccaaacacgcggttacgctgaacgcggcgaatccgaaggcgagccgcgcgacattatcgtgctgcagcgtattgatgggaatgttgaacgcagcatccagaccgaaaaaaccggctcgacccgaggcaaactcgtaccaacgccagcgggcgaactcattagcggctttcttaccgatcactttaagccagttgttgattacggttttactgccaacgtcgagaaagatttcgatgacatcgcgagcgataaattaacgcgcaacgccatgctgcataacttttacgagccgtttcatgcccgcatcgagcaatcgggcgcaattgaccgcagcaaggttggcgattcgcgcgacatcggtactgacccaaaaaccggcaagccgatcatcgcgcgcttcggacgcttcgggccgatgctccagctcggcagcaccgatagcgacgagaaaccgcacttcgcgccactgccgcgtggtacaaaaatcagcaccgtcacattagagcaagcactcaaagcgttcgagctgccgcggcttgtcggcacgaccgaggacgggcaagatattaacgccaatatcgggcgcttcggaccatacattcaagtcggcaagctatatgtcagcctaaaagaagatgacccgcgcgaaattaccgaagcaaaagcacgcgagttatacgccgcaaaactgcaagtcgaagccgaaaaacatatcgccgattttggcgatgtcaaagtactcaacgggcgcttcggaccatacgtcaccgatggtaaaaagaacgcaaaaatcccgaaagacatcgacccgaaaacaatcacagccgaacaagcacgcgagatgattgccgctgcacccgccaaacgtgcgcgcggacggcgcagtactgcgcaaaaagccggcaaaccgcgcacttcatcagcaaaggcaaagaaaaagtagcttcttgccgcattaccacattgccatagaacgtaaacgcgaaaaaagccgtcgcccgcgcggcgcgcttgcggtcgctaagctactccaaaaaaccgcgccttgacgctattatcgtaacagtgtattatcataaatatgacatttcgtcaacgcctccgcgaggtacgccactggcttctgctttgtttgttcgccgtctgtattacgtcgatttattcgctatcgatcaaaaatccagccgataatttttacgctatgtaccgcttaggcaaaatagcacgcatcattcacgacataccgtattgtagcggcagcgctgaacaaacgattgatttatacctgccgccagaaccggccggtccggctcgtacccatacgccatatccactcgctatctacgttcatggcggcggctggagtaaaggcgataaacgcaacgcaatcgccgatttctacggcgccgctttggtacgcgccggattcgcattcgcgtcaattaattaccgcctggcgccgcagcaccgctacccggtgcagaataacgacactgcttgcgccatcaacacgcttgccgcgatcgcgccccagtacgccattaacacgcacaaagctattctaataggcgacagcgccggcggttttttagtgagtacctacgcactttctaccgccaagccgcccgtgacaatccgcggcgtcgtgagcctatacggcacaactgatttagtgcgccaactcaaattagggcgccggcgcaatccgaatgcctttaattatctcgggtcagccgactttgcaaccgctaaaaaagccagcccgctctaccataaaatcgccggcacgccgccgccgttcttatttctgcatggtgccaaggacaaggtcgtatcacccgaccagtcgcatttattgtatgaacgtatcgtcgtacggcaaccgctcagccgtttcattcgcatatcgcacgctggacacgagtttactggcgcgtcgaatttaacgcgagtgcaaatccgcgagactattgtgaaattcgccgccgagcataccggaatcaacctggaggacggcgtatttgatgacattgacgatatcgatacgcaagcgctcttgtccacgccgccagcgattgacatatcaaccgacattgatacaccgcggtacccgcatacgcccgcaagcactgtacccatctttaatttcgctacaccgctactaggtcctcagtcctaaaccgtactgtaatactacctatattttacttatcatgatatttatgatgtggatttatcgtcgtcttgtacatgttatcggcaattcaacagaggtaatttgacaggatataaaaatatttccagccttatcattctttttcagtaaaaaaagtgtcaaaaaaacatttaccataagcgtcgatattgtgatacaatatttatagaaccgtgagggtttgacatctataacactatatattataattaacattaaatcatttatattaacctaacacgtaaaagcctcgggtgaggcggaggctggagatactatatgaccgaagttactggcaccgacaccgcatcgacaatcaaaaccgccattcaagacattttgaaaacgatcgatcaagaacgcgagcgcgagattattacgcgccgttttggtttgtttgaccgcaaagaaacgcttgaacaaatcggcgagcttctcggtatcactcgcgagcgcgtacgccagcttgagaaggcgatcctcattcgtctaaaaattgcagcagaggagggcgacattccagccatccgcaccgtcgagcgccttatcgtccgcgatttgtcggaaaatggccgtatcgggcgcgtcaacgatatcgctgaacgcttatcgcccggaaaggcagcagctatccgcacgcacatcgcctttatcgccgaactctcgccgcgcctcacaactatcaacgaaaccgacaattaccaccagggtatcagtatcgctgaaaacggcgacgagaagaaaatccgcagcaatattgataccattgttaaaacgatcaaaaagcacggtgaacctattgatatagaaacgctccacggcatgctcacctacgaaagcccggcgcaagtccgcgctctcgcaagcctgtcgaaacagctcgccagcctaaaagacgtctggggacttacgaaatggccaaccgtcaatccaaaaaatatccgcgacaaaatctacgtcatcctcgtgggtaatggcaaaccgttgcatttctcggaaatcgctaaagcgattaaaacaagcgatttcaagcgcaagaatgttaccacgcaggcaatccacaacgaactcatcaaggacaaacgattcgtgctcatcggccgcggcatttacgcgctgcaagaatggggctactcgcgcggcacagtatcagaaatcatcgcaaacgtactcaaagacgccggcgagccgctgcaccgcgacgagattgtcaggcgcgtactcaaaagccgccgcgtcaaagaaacgacgatcctcctcaatctgcagagcaaaccggaattcaaacgcgtcgccaaagcgacatacgcgctcgttgatgccgcgtagaaacacgcaaacaggctcgctctcttaaaaaaaccgaggcatagtcatgcggcggacgagacaattttttttgactttgcccgagcaattaaagcaagtaaaaaagcgcaagcagtactcactacgcagatattatggtataatataaaagaatattatgtcatttgttttgtcagtcgtcagcttgcttatgcagtggtacgtttggacgccaatcgtactcattttagggtatatgacctggcgcaactaccgcagtattgacgccgtgaagaacattgaaagcgttctgttgatgcttgaaattccaaaaacaaacgacaagtcagagctcgccgccgaacaaatgtttgcgagcttgcacggtattttgcgcgatgcgcgcgaactcagggcgaatggcgggtaccaagagcacctcagctttgaaattgcctcggtcggcggacgcattcaattctacgtctggacgccgaaggcgctgcaaagcttcgttgaaggacaaatctatgcgcagtatccacaggtacaaattcacaccgccgaagaagattacgtcacgcacgagcgccaccataccgtcgtctatacgtcagaactatcgctaactgatcgagaattcctgccgattaagacattccaaagctttgaagtcgacccgctcgccggtattaccggcacgcttgccaaacttgaagacaccgacgaggaaatctggattcaaatgctcgtacgtccagtgcgcgacgactggcacaaagcagcagacagctggattacatcaatcaaaacgggcggcttcaatctattcggacaaggcagcggcggacgatgggctgccagcttgattgaggcattgtgggcgccgccagagcagggaactggcacagcgaaagaattatccgagcgcgataaaacacgcatcgccgaagctgaaaagaaagcaacaaaactcggttatcaggtaaaaatccgcgttgcctatctaggagaaagcgttagcgacgcacgtttgcgcatgcaggggattgtcggcacgtttaagcagtttaattcaaccaaccttaacggtttcaagatgacaaatgacagcttcgctaaagaagcgctcgccaaatacaaaacacgcctgtttgccgaccgcggctatttgatgaatattgaggaggtcgcaagcgtattccatttgccgcacaccaatgttgagacgccaaacatcgtctgggcaagcaccaaaaccgccgagccgccggcaaagctgccagttctcaccggcgatccagcgcaagacgaaaatatttcggcattcggcatgacgaattttcgcggcatcaaccaccaattcggcatgctgcgctacgaccgctcgcgccacgtctacatcatcgggcaaacgggagcagggaagtcagggttgcttgaactatttgcacttagcgacattttccacgggcaaggttatgcgattattgacccgcacggcgattttgcaattaacaatatgcgcttcatcccaggatcgcgcctgaaagatattgtctatttcaatccagccgatacgcaatttccgctcggtttcaacccgcttgaagtgacaaatcctgagcaaaaaaataatatcagttcagaagttattggcgtattgaagcgtatgtttggcgaaagttgggggccgcgccttgaatatattttgcgctacacaatcctcgcgcttcttgaccgccccgaaactacgatgcttgacattacacgcatgctcaccgataaaaaattccgcaaagaaacgcttagttactgccaagatactgtcgtattgcaattttggaatgttgaatttgccagctggacggataagttccaagcagaagcaatcgcgccggtactcaacaaagtcggcgcctttacggcgaacccgatcattcgtaatattattggtcagccaaagtcaacgtttaacattcgccaaatcatggacgagggcaaaatcctcatcgttaacttaagtaaaggtttaatcggcgaagataacgccggcatcttaggttcattcatcgtcacaaaaattcagctcgctgctatgagccgcagcgacattcccgatgttaaagatcgccgcccgttctacttgtatgtcgacgagttccagaatttcgccactgatagctttgcaacgattttgtccgaggcgcgcaaatacgggctcaatctcacggttgcgaatcaatacatcagccaaatgcaagacacggtgcgcgacgccgtcttcggcaacgttggtacaatgatttcattccgcgtctccgccgacgacagcccgatcctcgctaaacaatttgagccgcagtttgaaccaaacgatctcctgcaaatgcataaccgcaatttcatcatcaacatggtgatcaatggcgaaaaagcaccagcgtttagcgcgaaaacgttaaatctgccaacctaccaagacgacaatacggggcggatcatccagtggacgcgcgagcattattcgcgccaacggtccgaaattgaagccgaaatcaacgagcgtatgctgccgcctgagaatctcaccgtcaagcgtcccggtccagcctacacgccgccaaaaacgcccgaacagcgcgccgccgatcgcgccgcccgccagcaagcacaaaaccaaacccagccacaaccagcaggagaggtgaacgtttcgaaaaaggcgctatcgccaaccattgagtctagcgtattacagattgaccatgggcgcgccaaaccgtcagcaaaggcagccgcaagcacttcgtctacgccggcaaaacccacgccaagcaagagtgaatctgaaagcaatgacgccgccgcgaaaccaaagcgcaaacgcactcgcagccgccggcgcaaaactccagcggcagctacttccaattcgtaatcaactattgctatgcctctaccgttagaaatagccaccacgccgcatgctcatgacgctcaagttggcgagattattgatctattatgcaagcccagtatctgcggcccaatttcagacatactaggccgagatgctttcatggaagcagctaccgacctaacacagcgtttatacttgggtgagtgtgccgctgcactggccagatacatcgatgaaagcagcaataccatcaaaccagttggcacaattatctatagccaggactcaaacgatcctaaaatagcaaatttggaactaatcgtcgtacgagaaaaataccgccgccgaaaagttggtacgcaattattacaactagtcgaggctgaaacagcattacgcggcgcaacgcaattacaaacactagcgcctcagagaatgccaggcctacagaacctcttggcaggaaacggcttctatttcagccgcatgaaagagggcgaggttttgtttttgcggtatcagaaaaaagttaaaggcactaaggatattgcaaaaaaataaaaaactgcgtattataaagctacagtcccttaagtaaggattgtaccaatatctaaattgttttaggtttctataataatttagcaacttagggcgacgattttgatcgtacagctacggttgagagttctattgtgaacctaaagcaaagctctaatccgctcactagttgggcggattatcttttgtttatactaattttgcttatgctttcaatcaccacgatttggttgtataattatacttagttaaacaaaggaatctcacacatggcacaaaaatcttcatattcaccgaaaaaatattcgctagggctagatatcggcacgagctcaatcggctgggcagtgctagatttagataaaaaacgtattcacgatttgggagtgaggatatttgagcggccagaagacccgcaaaatggcgactcactcgccaagcctcgccgcgacgcacgttcagctcgtcgccgtctgaaacgccgtcgccaacgtctcaatcacctgaaacaatttttcgtcgaccaaaatattctcacgaaagatcaagtcgaggaggtgttgagctacaagtctgatttcaacaaattagacgtatatgagctgcgttcaaaagcactcgccgaggaattatcgcccgaagaattactcaaagttttatatcaaatcgccaaacggcgcggcttcaagtcgaaccgcaaggttgtcgaagaatcagacaaagaaggcggccgtgtcactagcgccctcaaagctaatgaaaagtttctcgccgataacaattacacaactgtcggtgacgcgctgagtcgcgatgaaaaattcgctccgcacaagcgcaataaacgcgacgactataccaacagctttgcgcgcgatgactttttgcgtgaactagagttcattattaaaaaccagcgaaactacgccctgaaaaatattcccgaacaagctatcaacgaattaatttatggcattgacgatggacaggccactaacgtaagcgccatcatgtaccagcgtccatttatgactagagaactaatcgaaaagatggtcggcaactgtacgtttgaaaaagacgagaaacgggcaccaaaagccagctacagctttgagatgtttcgcctggcgagcgatttatcacacctcgttttcattcatcgtgatgccagcaaacgccaagccaagcgtgaaaatctagaggtaagattatctccagagcaaattagtaaagttatagatgcagccaaaagccaaaagagcttaacctataaaaaggtgcgcagtactgcagggattagcgaagactacgtgccaaaagatgtacgcggtaagaagaaagagggtgacgaattcggcgaagacaatacttttggcggcctaaaagcgtatagcgacatcaggttagcgctgaaagatctaccagaagattgggcgaaaattgataatgaatcggcaatcaatcaaatcgcctacatcctcactacgcaaaaagccgacgagggcattcaagctgaactagattcactgccgctttctgacaaagccaaagaggctattgtcaaaattaagccaaccaatttcaaagcattcggacatttatcaatcaaggctttacaaaaaatcacaccgcacatcctcgagggcataacttacgacaaagcctgcgaggcagctggctacgacttcaaaaagcaatctgccagcctagagcaaatcaccaaccctgtcgtcaagcgtgctatcacccagacgctgaaggttgttcgcgccattgagcgtaaatatggcaaaccatattttatcaaagtcgaaaccgcccgtgacttggcaaaaaacttcaaagatcgtaaagcaattgaaaatgaaaataaggaaaatcaagcgcgcaatcaaagtatcattcagacactaaacgaaaacggcgtcgtcactccaaccggtcagcagattattaaagttaagctctatcgcgagcaaaacggcgtctgtctatactccggaaagtcgattgattttgagacgatgctgcgcgacgacgacgcctatcaagttgatcacattgtgccgttttcacgctccaacaacgacggaatgacaaacaaagttctggtattaacagaggaaaatcaaaagaagggcaatcaaacgccatttgaatattttggcgccgacgaaaaacgctggaaagagtatgtagctcgagtagagtcgacatacaaaacacgtgatattaaaacagctgataaagcaacgaacgccatcaattacaaatacaacggctacgctatgaaaaagaagcaaaacttattgcttcaagattacaaaaatgacagctggaatgtgcgtgcgctgaatgacactcgatacatcactcgatttatccaaaattatttgcgccagaatgtcgactttgccgaaagtgaagaaaaacagcgcgtcatcgcgccgaatggcacaacaacggcatatttgcgtaaacgctggggattagccaaagatcgcgccgaagatgtattacatcacgccaaggacgcggcagttgtggcggcaattaaccagaagattgtttaccaagcaaacctcttctcgaaagagcaggaaatgaaactgtatctaaataatgctaaaacaattgatgaaaaacggcaaattttgttacaatctaccgacgaaaacactggcgaaattaccgatgaagcgacatttactcaggcgcaaaaagacctcgcgcaagttgaatatttcaagttgcgcagtgatgaagagactaaaaaacgcttcccagatccgtggccaggcttcagtaaagaagtcatgaagcgtaccctcaacaccgatattgccacattgcaaaatgagctacgtgggcttgataattacgatgaagatttccgcctaaacgtaaaaccgatcttcgtttctcgtatgccacgtcgcaaagctaccgctcaagcgcacaaggagactattcgctcgccaaaggtcaaagatggtgatcagagaaccgtacgaatgccactaaacaaaatcaagcgaaaagacgtcgaaaactccgtacttaaagaatccgataagtggctgtacgacaaattgcttgagaggctagatgctcacggtgacaacccagagaaagcttttgctgaacctatttacaaaaacgacaaaaaaatcgacaaaaacggcaaaaaactgtcgccagtctcaaccgtcaaagtatactcaacgcagccaagcggattttatatcaacaacggtaaagctttcgtcaacaatgggtctatggtgcggcttgacgtatatcaaaaaccaaacaagaaaggaaaaatcgagcactttttcgtgccagtttacgcccatcaagttggtaaaaataagcccacgccaacaaagatcttaccagcaccaaaaggctttaccgatatagatgaaacattcactaaaatttgttcgttatatccaaatgactatgtgcaatgccattttggtaatgaaattagagaagggtattatgcgagatttaacatcaacaacggtgctatgcaggtaatgccacacgatgcagccaacaagagtaacgacagccttatccaaatctcaccccgctccgcaaatcttatcgagcgctacgacatcgctatcctcggcgacaattacaggtggttataaatggcctggcgcgtcgtagttatcgaaaatcccgccaggctgagtttgcgcgacaaccagctcgtaatcgcgcaagaaactgaggcaactttgccgattgaagatatcgatgcactcattctggacggttatggcatgactgcgaccacaaatctactcacagcactggcgaccaaaggcaccacaactgtcatttgcgacgaaaagcacttaccagccagcgtacttctaccgtattcacaacactcacggcaggccaaaatttcacgtcaacagctcgccatgagccagccgctcaagaagcaattgtggcaacaaattatcatcagcaaaattaccaatcaagccgatgttttgcaatctatcgggttagatgacaccgccttgcgtacccatattagcgatgtcaaatcgggcgacactagcaatcgcgagtcgctagctgctcgcatatattttgaccagctactcgacgataccacacgccgcaaaccaatttggcataatgccgcactgaactatggctatgcaatggcgcgcagtcatatagctcggcatatcgccgcccgcgggctagtcgcttcacaggggatttttcaccacaacgagctcaatagttttaacctagccgacgacctgattgagccgtaccgcgccgctgtcgatttatatatcctagaaaaagttgcaccgcttcacatcggcgaccgcgatgccgtcctcaccaagcacgatcgccaacttattattgacatattaaattattatgttataatgaacggtaagaagtttactgtaaaacatgcggttgagcgtacggttgaaagctttatcgaatgtatcgaggtaaaggaggcgcgtaagcttcttttgccaaaaatcgcctcctaacagggaagggatgtcatataaaatcatgagggtcgcagtatttttcgatttgccgaccaatactaaagctgagcgtagagccgccacgcaatttcgtaagttcttgctggatgacggctttgatatgttgcaatatagcgtatacacgagactgtgcccgaatcgtgacgttgctgaaaagcacataatgcgcgttaaacgtcatgcaccagacagcggatcggtgcgattactgtatctgaccgaacatcaattcacgcatatgtacgttattgtcggcgagaaaactgtccaggaaaaggccgttcccgtcggccagctagcatttttctaaccaaaaatccccctcgtaacagagggggatttgaggaagtattataccaatatctaaattgttagggaactataacgtaatttcgcatacgataaacccgcgtgccattataccaatatctaaattgttagggaactataactctccgtacggaataacggaacttagtcttattataccaatatctaaattgttagggaactataaccttatacgatactgaccaatcaccaaccttattataccaatatctaaattgttagggaactataactggtcactgccgagccggtttgctggtcgaattataccaatatctaaattgttagggaactataacccgtggtggcgtattcctctggtgttgctaattataccaatatctaaattgttagggaactataacacataacgctacggaacgtcatctcctcggattataccaatatctaaattgttagggaactataacaaaagcaccgccggctgtgaatgcggcggcattataccaatatctaaattgttagggaactataaccgttcccatcacgcccagcgcgccggttatattataccaatatctaaattgttagggaactataaccgcgccggcttcgatatcgctggtatttatattataccaatatctaaattgttagggaactataaccgagagcagccggtgcaaaagaacgttgttattataccaatatctaaattgttagggaactataactcaatagtaaaaaaggcgaatacatgggtgattataccaatatctaaattgttagggaactataacttctttggcccgagcaaacagattataattattataccaatatctaaattgttagggaactataaccaatttcttcttagattggcgcgaccatgtattataccaatatctaaattgttagggaactataacatagaattactgtaaaagactactttcgttattataccaatatctaaattgttagggaactataactgaccagccagtaagtcgttaaactgtacgattataccaatatctaaattgttagggaactataacgaggcaaatgatgaggtcgagccggcagcgattataccaatatctaaattgttagggaactataaccctccaccacggcaggcgcacgacgcgcttattataccaatatctaaattgttagggaactataacaatgtaccgtcaatgctccgcagcctctcaattataccaatatctaaattgttagggaactataactcccgcttcaactgctcgggtgcttcttcaattataccaatatctaaattgttagggaactataactccttaaacttcagccttaacgtggacaccattataccaatatctaaattgttagggaactataaccgacgcgttcatcgaggtcactgtccttgaattataccaatatctaaattgttagggaactataacttactcggttccgttgcgggtcttatgctcattataccaatatctaaattgttagggaactataaccgaggcgatagatgaagcgttttagtttatattataccaatatctaaattgttagggaactataactcatgctgttatgtcaaattatccaggtttattataccaatatctaaattgttagggaactataacttgctcggttccgttgcgggtcttatgctcattataccaatatctaaattgttagggaactataacgcgacaccattcgtctgtatttggtcaagcattataccaatatctaaattgttagggaactataactcgctatctgtatacttggaggggtcgaacattataccaatatctaaattgttagggaactataacaccttggctggtaatgtctccactcgctctattataccaatatctaaattgttagggaactataacgatatggtcaattacgtaatgtgagtttttattataccaatatctaaattgttagggaactataacctcctggccgtcaattcgcagcttcgctcgattataccaatatctaaattgttagggaactataactcgtggcaacgtcggaatcttgccgctttgattataccaatatctaaattgttagggaactataaccgacgccgccgccgagcgcgcaatcctcgtattataccaatatctaaattgttagggaactataactattttaaaatgcagtcatggctgtctcgtattataccaatatctaaattgttagggaactataacagaacgcggcggcatgtcaacaccattccaattataccaatatctaaattgttagggaactataactcgctgaatctctccctcgaccaccagcttattataccaatatctaaattgttagggaactataaccattttcacgcggttgtgtcgcgttatccaattataccaatatctaaattgttagggaactataacgtgataagcagcgtgatgagcgccatctggattataccaatatctaaattgttagggaactataacttactgcaacgccgttttgaagctcggcacattataccaatatctaaattgttagggaactataaccgggtcgttgagcaatatatacaagacgagattataccaatatctaaattgttagggaactataacatataaattttgattattcggcgcgcttggattataccaatatctaaattgttagggaactataactgatgtcttaacgtcaatatcgcagcaacgattataccaatatctaaattgttagggaactataacccgcgcacagcagcattgatagcacgaccaattataccaatatctaaattgttagggaactataacctgaggctgtttaatatttggcggcgttctattataccaatatctaaattgttagggaactataacggcgaggcaagcgatttattcttcagtcatattataccaatatctaaattgttagggaactataacgctgccgcgtgaggactttgacttcattcaattataccaatatctaaattgttagggaactataacctatctgggtgtctccctcgacatgtccggattataccaatatctaaattgttagggaactataacttattttcgtctagttcaacgccgtccagaattataccaatatctaaattgttagggaactataacctggaggaagatgtcccgccacgatacgatattataccaatatctaaattgttagggaactataacccgacttctctgaataaaatctcaaggttaattataccaatatctaaattgttagggaactataacgatttgacgacaagctgtgtgtgtttcataattataccaatatctaaattgttagggaactataaccgcggagcttaagcagtcacctgagagctgattataccaatatctaaattgttagggaactataacgacaatttcgtaaagctccgttgtgccggcattataccaatatctaaattgttagggaactataacctaaaagtacaatcaattaaacgaaaggacattataccaatatctaaattgttagggaactataaccagcgagggagctattgacgacgtgctggaattataccaatatctaaattgttagggaactataacaggcggttagcctttacacttgatagcgcgattataccaatatctaaattgttagggaactataacgcttcaacgtcaaagtcgctgccctggttaattataccaatatctaaattgttagggaactataacgtcggaactgcacataaaaaaagggcttgaattataccaatatctaaattgttagggaactataactaagaacgagcgttatttgcttggccagcaattataccaatatctaaattgttagggaactaagctcatcttaacattaaaaatccactgaatctcggcgattttaacagtaaagaatctctggctgagcatttaagaatatcgccagatattttatctgattctggtggctttatacatccaacaacctctcacacaagcagcttctcatccgccttaaggtatgcaggatatgatgatggtgttatcattctacatacagccaaaggtgcacgtggcaatgaaatagtagctctagatccagaacaaattaaatatatcgataacctcaatccaacagatagtccagatatgaggtttaaatctaatagtacagtacgtacaggactagaagagatccaacaatcaagcgaactcctagcacgccatctgcgactaacagatgatgagcgccttggtctttaatgagtggcagaacgaaatgcaaagaaaaaccttgggctactataatccaaaaaccgacaccataaacctaaatcaactcacagaggatactctgaaccatgagttgggacacaaactcttggagcgaacagacaacaaaccagagctcttaaccgccatccgccgattttacggagataactacctcattaacaagtacgggcagcaatacgacactactgacatcaacctactagcagaagagcaattagctgatggattcagcgaatattacaacggcaaactaaacggcgagaatacccagcgcctggctgctcgcctacacatcccgcagcgcattgtcgctatctacgaccgcattaccgaagccattcgaggacttattggtaagcaggatatcatcaagcagttttacgcccaaatggaaacagggaaattcagaaacacccagcagcaaacacctggcggcgatgggcgagtgaggacgatgagtatcgatcctgaaagagcactccatgcaattaaaggtattgatgacttagcaaatagtcgccgtgcgctattcacactggcacgtgtatctgataacttggcaaacaagataaaaacagagactggcatatcaataagtaaggacgcacgtatcgtcatggataggagtggcgctgttcatatgctatctactcatgggcaaggcggtaaaaagccaaccaatccgttgaccgacgctgacttgggcaggctgccatacgttttggaagatccagatgtgattatcaagggtaaaccagtacgaaacacagaacgaattcgtatggagcgtaacctcgaaggtaataaaattgctattgttgaagtaattaaaaaggcaacgaactacgagtcgtcacctactttaatgattcgtcatctggccgcaccaatcctgcatataatatgtcgaggcttgatgatacgtccgaaacggggcaattacagtccacgaatctcaatggcagtataccaaaaaatacccaaaatgtcaatacgggtaatcgttaccagcactctctccaagaccaaatagacgatatccaaaacaatcctaaaccaaaaatgaccaaagagctacgtcaagctatagacgaggaaatatacaactactacccagaattattcgcgaatgaagccgccgacctccaaagtaccaacggcgattggaatatacctcgtctgcatgtagatgacttaaagcactatttaggagaattagccaacgatataccatcaagatataagagacgagacggcaagagagatatcgataccgtagctcaagagatgggctatgacgatatcgacagcttcatcaatgagatacatcgagtgctagaggctcgccgtaatgtacgtgctggtaaacaacgactagcagagctgcgtcgagacccagatattattgccgatgcgcaacaagcgcttgcagctaaaaatagcagtaatactcagcctactcaatcccaacaatcacccgacgaacagctaaaagagactgttcaaaaccagccgctcgaacaacagggctttaaaaacataccactagaagacaatcacttactaaccaaaggcaatctatacgaacaaacaaagcctggtatacgagacgactggacgagaccattccaagacggagactacgagtatcgcttacacaccaaacgcagccgcgatggtaagaatttgccatcttagaggaaaaatccatcgtaaaaataaaaatatcaaaaaggagataatggagttagatgctgccattgcaaaagctaaattcagacagagaaaaggactagccctactacctactatctgtattttgtccagcaatcaataggtttagaacaaatatagaacattttaattttaatgatttgctcagaaagctcaaatacaaaaggtttggatttttgtagatataagtcgttacgataaatatatacatagtaaaatctaataaaataaacttaagaaaaactggcataaagatggcaaaatacaaacaaatacgtacacaaagacaaaatctcatacatacataaaaggcggggcaaacataaaatagctaaaagttgtaaaacaataaatcttcgagattaatcaaaaacagtagtaaaagggatgcaatctcattcatgttttacacatagacctaacgtcgcacaatgtccgttttacgtcttataatctatgttgtcaggatgattaatcatacgtttgcaaataacggttttgctttgattataatttgcagcttattaatcttggtctataaatggggagcgttgtcgcgctactagagttatcttttacttttacattttattcgctatataaaaaaataccgccaaccagcagttacatagatataagtccacgcactcgaaaacaaactcaaaacttaaattgtagtaattagcacatgttttatagacttaagttatccacagaaaaaatctcagcgccgtgagaataaatttgcattttttcaaaaatattgtcccctactacttttcccgcctcacctgctttatttgactttttgtattttcaatattttaatatagtttttttcacctagcctatttagctgtttaatagaacaaaagtagaacataacccaccagtgcaggggtaaccttactacctaaggcctcctcatttataaaaagcacgcctactcacccgcacatcaatatactctgcagttattcctctgttcgttaaatagcggatggcacgcaccgcgtcttcgacttggccagccgctgggcggtcaactgtcattttaatcgagtaccccaccccgtcgagactgactagcaactggcgagtagtactagctggcagaatcattttattaacagtaagattgttttctttgaaatgccccacaaccttaccgataaactgcaggaaacggccgctaattactgaattaccaacgcttgcacgaattccagtttgatcctcgacggcgataactgacgtgccgagtatattacgttcgaatactacacctgtgctatcaacataagctttcatgttaccagactgccaataaaccactggcgagcgcaaattaaccgaaaaatcggctgaccagagggcacctttagctggcggcgacacgctggatacttctgggtatctactttgaatagctcggctaagattattagcattgatgtttacagccaaccgctcgagcggattagcagagaggtaatcttgaattgctgctgcataatcgcgggcggcagtttgtacttctgaatcgttactagtgccgacaattt

SEQ ID NO: 1909 - DNA, 21576 bp, synthetic construct
  source 1..21576: mol_type = other DNA
  misc_feature 1..21576: note = Synthetic
atatgaagaacctcgttatcgtcgagtcgccggcaaaagcaaaaaccattgaaaaatatcttgggcatgattttcatgttttgtcaagcgtagggcatatccgctctattgcgaaaaaaaccaaagacggcacgccgccgattgatgttgcacacgatttcaaaactatatacgagattgatcctgaaaagaaaaaaattattaccgagctaaaaaaagccgtcaaggcagtcggcgcagcaaacgtctggctcgccaccgatgaagaccgcgaaggggaagcgatcgcttggcatctatgcgaagttttgaatctcgaccccgccaccactaagcgcattacctttcatgaaatcaccaaaccggcaattgaggcagcgatccaacacccgcgcactgttgacatgaagctcgttgaagcgcagcaggcgagacagattttagaccgtcttgttggttttgagctaagccccgtcgtctggcaaaaagtcccgggcggtaaatccgccggacgcgtacagagtccagctgtacgcctgttagttgagcgcgagcatgaaattgagcaattcacgggcagctctcagttcaaggtcactgccgtatttgtatacgacgggcaagaagtcaaagccgagcttaagcagcggttcgacaccgaagctgatgcacacgccttcctagagtcattgaacaacgcaaaatacaccattgacgatataaagacgtcaccgtcaacccgcaaccccgccgcgccgttcaccaccagcacattgcagcaagaagccaacgccaaactaggtatgagtagccgcgccactatggcgagtgcacagaaattatatcaagagggacacatcacatacatgcgtaccgacagcgtaaacctatcaggacaggcaattgccgctagcgccgattacatcaagcggctctacggcattgaatacagccacgtccgcacattcaaaacgaaatctgccggcgcgcaagaagcccacgaagcgatccgcccaaccgatgtcacgcgcgaatcggtcagcggcaacggctacgaccaaaagctctacgacctcatccgccggcgcacgctcgccagccaaatggcatccgccaagatagagaacacaacggtaacgatccggattgaacaggcaaatactaaacaggcggtcaacagtgctgctaatgcaaacgatctcgtttttgaggctaaagggcataccattgtcttcgacggcttcttgcgcgtctacggcggcagcaaggacgatgcaatcctaccgacgtttaccgccggcgaccttgtgcgcgaatattccatggaggcgcgccaaatctttgcccgtccgcctgcgcgctataccgaaggcacgcttgtcaagaaacttgaagagctcggtatcggccgcccgagtacctacgctacgatcatgaatacaatccaaacacgcggttacgctgaacgcggcgaatccgaaggcgagccgcgcgacattatcgtgctgcagcgtattgatgggaatgttgaacgcagcatccagactgaaaaaaccggctcaacccgcggcaagctcataccaacaccggcgggcgagcttatcagcggctttcttaccgatcattttaagccagttgttgattacggatttaccgccaacgtcgagaaagatttcgatgacatcgcgagcaacaaattaacgcgcaatgccatgctgcacaacttttacgaaccgtttcatgcccgcattgagcaatcgggcgcaattgaccgcagtaaggttggcgattcgcgcgacattggcactgacccgaaaaccggcaagccgatcatcgcgcgcttcggacgcttcgggccgatgctccagctcggcagcaccgatagcgacgagaaaccgtacttcgcgccactgccgcgtggtacaaaaatcagcaccgtcacattagagcaagcactcaaagcgttcgagctgccgcggcttgtcggcacgaccgaggacgggcaagatattaacgccaatatcgggcgcttcggaccatacattcaagtcggcaagctatacgtcagcctaaaagaagatgacccgcgagagattaccgaagcaaaagcacgcgagttatacgccgcaaaactgcaagctgaagccgaaaaacatatcgccgattttggcgacgtcaaagtacttaatgggcgcttcgggccatacgtcactgatggtaaaaagaatgcaaaaatcccgaaagacaccgacccgaaaacaatcacagccgaacaagcacgcgagatgattgcagctgcacccaccagacgcgcacgtggacgacgcagtgctgcgcaaaaaaccagcaaaccacgcgcttcatcagcaaagacaaataaaaagtagctcttgctgcattgtcatagagcgtaaacgcgaaaaaagccgtcgcccgcgcggcgcgcttgcggttgctaagttactccgaaaaaccacgccttgacgccattatcgtaacagtgtattatcataaatatgacatttcgtcaacgcctccgcgaggtacgccactggcttctgctttgtttgttcgccgtctgtattgcgtcgatttattcgctgtcgatcaaaaatccagccgataatttttacgctatgtaccgcttaggcaaaatagcacgcatcattcacgacataccatattgtaatggcaacgctgaacaaacgattgatttatacctgccgccagaaccggccagtccgactcgtacccatacgccgtatccactcgctatctacgttcatggcggcggctggagcaaaggcgataaacgcaatgcaatcgccgatttctacggcgccgccttggtacgcgccggattcgcgttcgcgtcaatcaattaccgcctggcgccgcagcaccgctatccggtgcagaataacgacactgcttgcgccatcaacacgcttgccgcgatcgcgccccagtatgccattaacacgcgcaaagctatcctaataggcgacagcgccggcggctttttagtgagtacctacgcactttctaccgccaagccgcccgtgacaatccgcggcgtcgtgagcctatacggcacaaccgatttagtgcgccagctcaaattagggcgccggcgcaatccgaatgcctttaattatctcgggtcagccgactttgcaaccgctaaaaaagccagcccgctctaccataaaatcgccggcacgccgccgccgttcttattcctgcatggtgccaaggacaaggtcgtatcacccgaccagtcgcatttattgtatgaacgtatcgttgtacggcaaccgctcagccgtttcattcgcatatcgcacgctggacacgagtttactggcgcgtcgaatttaacgcgagcgcaaatccgtgagactattgtgaaatttgccgccgagcataccggaatcagcctggaggacggcgtatttgatgacattgacgatattgatacgcaagcgctcttatccacgccgccagcgattgacatatcaaccgacattgatacgccgcggtacccgcatacgcccgcaagcactgtgcccatctttaatttcgctacaccactaccgggtcatcagtcctaaaccatactataatactgcttatattttactcatcatgatatttatgatgtggatttatcgtcgtcttgtacgtaccatcgacaattcaacagaggtaatttgacaggatataaaaatatttccagccttatcattctttttcagtaaaaaaagtgtcaaaaaaacatttaccataagcgtcgatattgtgatacaatatttatagaaccgtgagggtttgacatctataacactatatattataattaacattaaatcatttatattaacctaacacgtaaaagcctcgggtgaggcgaaggctggagatactatatgaccgaagttgctggcaccgacaccgcatcgacaatcaaaaccgccattcaagacattttgaaaacgatcgatcaagaacgcgagcgcgagattattacgcgccgttttggtttgtttgaccgcaaagaaacgcttgaacaaatcggcgagcttcttggcatcactcgcgagcgcgtacgccaacttgagaaggcgattctcattcgtctaaaaattgcagcagaggagggcgacattccagccatccgcaccgtcgagcgccttatcgtccgcgatttgtcggaaaatggtcgtatcgggcgcgtcaacgatatcgctgaacgcttatcgcccggaaaggcagcagctatccgcacgcacatcgcctttatcgccgaactctcgccgcgcctcacaactatcaacgaaaccgacaattaccaccagggcattagtatcgctgaaaacggcgacgagaagaaaatccgcagcaatatcgacaccattgttaaaacgatcaaaaagcacggcgaacctgttgatatagaaacgctccatggcatgctcacctacgaaagcccggcgcaagtccgcgctctcgcaagcctgtcgaaacagctcgccagcctaaaagacgtctgggggctcacgaaatggccgaccgttaatccgaagaatatccgcgacaaaatctacgttatcctcgtaggcaatggcaaaccgttgcatttctcggaaatcgctaaagcgattaaaacaagcgatttcaagcgcaagaatgttaccacgcaagcaattcacaacgagctcatcaaagataagcgtttcgtgctcatcggccgtggcatttacgcgctgcaagaatggggctactcgcgcggcacggtgtcagaaatcatcgcaaatgtactcaaagacgccggcgaaccgctgcaccgcgacgaaatcgtcaggcgcgtactcaaaagccgccgcgtcaaagaaacaacgattctcctcaatctgcagagcaaaccagaattcaaacgcgtcgccaaagcgacatacgcgctcgttgatgccgcgtagaaacacgcaaacaggctcgctctcttaaaaaaaccgaggcatagtcatgcggcggacgagacaaattttttgactttgcccgagcaattaaagcaagtaaaaaaagcgcaagcagtactcactacgcagatattatggtataatataaaagaatattatgtcatttgttttgtcagtcgtcagcttgcttatgcagtggtacgtttggacgccaatcgtactcattttagggtatatgacctggcgcaattaccgcagtattgacgccgtgaagaacattgaaagcgtcctgttgatgcttgaaattccaaaaacaaacgacaagtcagagctcgccgccgaacaaatgtttgcgagcttgcacggtattttgcgcgatgcgcgcgagctcaaggcgaatggcggataccaagagcacctcagctttgaaattgcctcggttggcggacgcattcagttctacgtctggacgccgaaagcgctgcaaagcttcgttgaagggcaaatctacgctcaatacccgcaagtacaaattcacaccgccgaagaagattacgtcacgcacgagcgccaccataccgtcgtctatacgtcagaactatcgctaactgatcgagagtttctgccgataaaaacgttccaaagctttgaagtagacccgctcgccggtattaccggcacgctcgccaagcttgaagacaccgacgaggaaatctggattcaaatgctcgtgcgtccggtgcgcgacgactggcacaaagcagcagacagctggattacatcaatcaaaacgggcggctttaatctatttggacaaggcggcggcggacgatgggctgccagcttgattgaggcattgtgggcgccgccagagcagggaactggcgcagcgaaagaattatccgagcgcgataaaacacgcatctccgaggctgagaaaaaagccacaaaacttggctatcaggtaaaaatccgcgttgcctatctgggagaaagcgtcagcgatgcgcgtctgcgtatgcaggggattgttggcacatttaagcaatttaattcaactaatctcaacggcttcaagatgacaaacgacagttttgccaaagaagcgcttgctaaatacaaaacgcggttgtttgccgaccgcggctatttgatgaatattgaggaggttgcaagcgtattccatttgccgcacactaacgttgagacgccgaacatcgtctgggcaagcaccaaaaccgccgagccgccggcaaagctgccggttctcaccggcgatccagcgcaagacgaaaacatttcagcatttggcatgaccaatttccgcggcatcaaccaccagtttggcatgctgcgctatgaccgctcgcgccacgtctacatcatcgggcaaacgggagcagggaagtcagggttgcttgaactatttgcactcagcgacattttccacgggcaaggttatgcgattattgacccgcacggcgatttcgcaattaacaatatgcgtttcatcccaggctcgcgcctgaaagacatcgtctatttcaatccagccgatacacaatttccgctcggtttcaacccgcttgaagtaacaaaccctgagcaaaagaataatataagttcagaagtcattggcgtattgaagcgcatgtttggcgaaagttggggaccgcgccttgaatatattttgcgctacacaatcctcgcgcttcttgaccgccccgaaactacgatgcttgacattacgcgcatgctcaccgataaaaaattccgcaaagaaacgcttagctactgccaagacaccgtcgtgttgcaattttggaatgttgaatttgctagctggacggataagttccaagcagaagcaatcgcgccggtactcaacaaagtcggcgcctttaccgcaaacccgatcatccgcaatattatcggccagccgaagtcaacatttaacatccgccaaatcatggacgagggtaaaatcctcatcgttaatttaagcaaaggcttgatcggcgaagacaacgccggcatcttaggctcgttcatcgtcacaaaaattcagctcgccgctatgagccgcagcgacattcccgacgttaaagatcgccgcccgttctacttatatgtcgatgagttccagaattttgccaccgacagctttgcaacgattttgtccgaggcgcgcaagtacggactcaacctcacagttgcgaatcaatatatcagccaaatgcaggacacggtgcgcgacgccgtctttggcaacgttggtacaatgatttcatttcgcgtctctgccgacgacagcccgatcctcgctaaacaatttgagccgcaatttgaaccaaacgatctcctgcaaatgcataaccgcaatttcatcatcaacatggtgatcaatggcgaaaaagcgccagcgtttagcgcgaaaacgctaaatctgccaacctaccaagacgataatacggggcggatcatccagtggacgcgcgagcattattcgcgccaacggtccgaaattgaagccgaaatcaacgagcgtatgctgccgcctgagaatctcactgtcaagcgccccggtccggcctacacgccgccaaaaacgcccgaacagcgcgccgccgatcgcgccgcccgccagcaagcgcaaaaccaaacccagccacagccagcaggggaggtgaacgtttcgaaaaaggcgctatcgccaaccattgagtctggcgtattacagattgaccatggacgcgccaaaccgtcaacaaaggcagccgcaagcacttcgtctacgccggcaaaacctacgccaagcaagagtgaatccgaaagcaatgacgccgccgcaaaaccaaagcgcaagcggacgcggtcaagacggaagaaaactaccgccgcaaaaagcagcgaataacttgcacgtttaagcgagtttgcagtataataacagtgcagtcccttaagtaaggattgtatcaatatctaaattgttttaggtttctataataatttagctgcttaggatttatgtttagcataaattacggtagagaattctattgagaatctaaagcaaagctctaatccgcctttctcttcgttgagttgggcggattatcttacttggtagtgtttatgcttggattttagcaaaaatcattgtataatttacacatggaactttcaaaatactctcttgggcttgatatcggcactagctcagtcggttgggcggtaattgatttagaaaaagaacgaattcatgatttaggcgtgcggatttttgaacgaccagaagatccgcaaaacggcgactcgctcgcaaaaccacgccgcgatgcgcgctcagctcgccatcggctcaagcgtcgccgccagcgcttaaactatctgaagcggttctttgtcaatgaaaaaattttaacgcaggcgcagatcgcggaagtacttgatccaaagtcgacatacaacaaactgaatgtatacacgttacgcgacaaagccctcaactacgagcttaccgccgaagagctgtttaaggcgctctatcaaattagcaagcggcgaggctttaagagtaatcgtaaggttgtagaagaaacagatagcgaaggtgggcgcgttagcaaagcattgacaataaatgagcaactcttggcagaaaaaggctataaaaccgttggccaagcgctcgcacaagatgaaaaatacactgagcataaacgcaacaagcgcgacagttacaccaacagttttgcgcgagcagatttcatccacgagttagaagaaattataaaagctcaacgaagttatgccctaaaaagcgtgagcgatgaagccctacgcaacctcatttatggcgttgactcagatggcttactgactaaccgcagtgctattatgtaccaacgcccgtttatgacagaaggtctaatcaaaaagatggttggcgagtgtacctttgaaaaaggcgagaaacgcgcgccgagagcaagctatagctttgagcttttccgatttgcgaatgacttaacgcacctcgttttcataccgaaaagtacaaataagcaccaagcaaaacgtgagcagcttcagttaacgctaaatccagagcaaatcgcagccgtcgttgccgaagcaaaaaagacagcaaaaattacctataaaaaagttcgccaggtcgctggcattagcgaggaatacgctccggaatatgttcgcggaaaaataaataaagacgacccgtatggcgagaaaaacgagtttggcaagctaaaagcctaccacgacatcaaaaaagcgctaaaaagcacgcccgaagattggacgaaagttgataatgagtcgacgctcaatgaaatcgcctatatcctaacgactgaacgtgaggatgctggaattatcaaaaaattgagcaggctggcactttcagacgaggcaacgtatgcaattctaaaaattaatccaaagaattttagatcatttggacatctatctatcaaagctttgcaaaaaatcacgccatatattttgaatggtttgacctacgataaagcgtgtgaaaaagctggctatgatttccgcagaaagtctgctagcttagaacaaatcactaatccggtcgtcaaacgggcaatttcacaaaccaataaagtcgtgcaggcaataattcgtaaatacggcaaaccgtattttatcaaggtagagactgctcgagatttagcaaagaatttcaaagatcgcaaggcgattgaaaatgaaaataaagacaaccaagccttcaactcagaggttaaagagattattgaacacggctacaacataaagcccaagactaaacgcggcaagaatttacttgagtttttgagagaaaataatgtgccgctttcgcaaaatattgacgcaaacgggcaaatgataactaaggtcaaactctatagagaacagaacggtaaatgtttatactctggggatccaattgattttcaagccatgatccacgatgacaacgcgtatcaaatcgaccatatcgtgccattttcgcgttcaaacaacgacggcttaacgaataaagttttagtgaaaactgaggagaaccaagagaaggcgaatcgcacgccgtttgagtatttcggcggcgacgaagcgcgctggaaacaatttgcagcgcgcgtcaacgcaacataccaaacacgcgatgtcaaaactagcgataaagcaacgaacagtgaaaactataaatttaatggttacgcaatgcgtaaaaagcaaaatctcctcattgaggaatataaaaatgacagctggaacgcgcgagcattgaatgatacacgttatattacgcggttcgtacagaattacctacgtcagacaatcgatttcgctgaaggagatgacaaacaacgcgtattcgcaccaaacggcacaataacttcgtatttacgcaaacgctggggcttaaacaaagtgcgtgaagaaaatgtgctacatcacgcagccgatgcgacaatcgtcgcggcgattgatcaacgcattatttatcgcgctaatttgtatgccaaacgcggcgaaatcaccgaatttttagcggctgccaaaaccatggacgagaaaactgacaagttgacaggtgaaatccttgatgatgacgaatttatgaaagctcagcaccgcaaggatgctttgcaagtgctgtcagacaagcactttcccgagccttggagcggttttcgcgatgaggtagatttgcgcactcgcaacatcaatagagaaagtcttcgcaagaaacttcaaggcgcccatctttacgacgaagactttttgtctcaaattagacccatattcgtttcacgaatgccacgccgaaaagcaaccgcccaagcccataaagaaacgattcgctcaccaaaagtaaaagatggcgatcaaagaaccgtacgcatgccgcttaacaaagtcaagataaaagatgtcgaaaattctgttttgaaagaatcggacacatggctatacaataagctcatttcactgttagagataaacgctgacaaccccgagaaagcatttgccgagccggtctataaaaatgataagaaatttgatagacatggaaaaccgctcatgccagtctcgacaataaaagtttactcaacgcagccatccggtttcttgataaataaaggcaaggcatttgtcaacaacggctcaatgatccgcctggatgtatatcaaaaacaaaatcaaaaaggcaaaattgagcactttttcgtgccggtttatgcgcaccagattggcaaaaatcaacccatgccaacaaagattctgcctgcgccaaaaggttttactgatgttgatgaaacgtttacgaaagtttgttcgctatatccaaatgattacgtgctatgtcgcttcggggataagatcaaagaaggatactatgttaaatataacattagcaatggagatcttcaggtaattaatcaaacgtcagcagacaaggatgcttcaaaccttattcatatatcacctcgttcagcaaccctcattaagcgctacgatatctcaatcctcggcgataacgccccgaggttataatggcctggcgtgtaatcagtattcaaaacccaagccgcctaagcctgcgcgacaaccagcttatcgtcacacaaaacgaagaagcaagcctgccgattgaggacattgacgcgctgattcttgatagctacggcatcactacaacagcgaacttactaacagaacttgcggcaaacagcacaacggtcgttatttgcaacgaaaagcatctgccagctagcgtattattaccgtactcacaacactctcgccaagcaaaagtttcacgccaacagctaaccatgagtcaaccattgaagaagcagctctggcagcgcattgttatgcaaaaaatctctaaccaggctgacgtacttcagcattttagtctgaacgatataccattgcgccaatataccgcccaagtgaggtcaggcgacagcactaaccgcgagtcaatcgccgcccgcgcctactttgaccagctacttgatgacaccacgcgccgcaagccaatctggcacaatgcggcgcttaattatggctacgcgatggtccgcagccatattgcccggcacatcgccgcccgcgggctagttgcctcgcaaggcattttccaccatagtgagttgaacagcttcaatctagcagatgacttaattgagccgtaccgagcaatcgtagatctattcgtacttgagaaacttgcgccgctccatattggcgaacaagacataggcctcgccaagcaagaccgccaagtgctagttgacatattaaattatcatgttataatacagagcaagaggtttactctgaaacatgccgtcgaaaaaacggttgaaagtttcatcgagagcataggagcaaaggaggcgagtaagcttcttttaccaaaaatcaacgcctcctagcagggaagggatgtcatataacatcatgcgagtggcagttttctttgatttgccaaccaataccaaagctgagcgccgagcagcgacacaatttcgcaagtttttgcttgacgacgggtttgatatgttgcaatatagtgtttatacacggttatgtcctaatcgcgatgtcgccgaaaaacatatgatgcgcgtacagcgcaacgcgcccgatagcggctcggtgcggttattatatttaaccgagcaccaattcgctaatatgtacgtaattgtcggcgaaaaaactgtacaagaacgagcaattccaaccacgcagctggcatttttctaaacaaaatccctctcataacggagagggatttaagtaagtattatatcaatatctaaattgttagggaactataaccgaaagaggagatggacgatgatacagccgattatatcaatatctaaattgttagggaactataacgatttttgacgctaactcaatcgcccgcgtattatatcaatatctaaattgttagggaactataacactggcaaaatgacgctatatggcaaattaattatatcaatatctaaattgttagggaactataaccacgccgcaacgctacattaacggcctcgcattatatcaatatctaaattgttagggaactataacgccgaaaatcattaatcaaaccaccaatcaattatatcaatatctaaattgttagggaactataaccatccgttgcggcggcgcgtggcccgtcgaattatatcaatatctaaattgttagggaactataacggattggtcgtggattgggatggtaaagctattatatcaatatctaaattgttagggaactataaccaatggttggtgttctcgctcgctttatattatatcaatatatcaattatcagaaaagtcgcaaattaaagaggtataggaacctaaatagaccccgataaaaataagcatagaccgtaggatagatctttaagtaatttaagatatcttgatatgcttatgcttgctatgttactataattgttagtaatattgcatataaataagcaacatgttatacgggcgggcgcagataaacaacaaaatacgaaaaacaaacatttgagctttcacaactttattaaaactctcacagacgcctgattattccgacgcctatgagagctttaatagacgctaggaatctattaaagctcttcagtccttaagtcgtcttatttctctcggacgacttttttctttttactctcagcttcggtacaaaaactgaaagctgaggcgcgttttgggcgtatcaccttaccattctttctaatgtatttacatacgatatgcttaacgcaagcgggattattacaatgatacataataaaaaccctttcttgttaagattgcttcttgccacgatacgtgagtatcacagctgcatcggcattgtattatttttcatttttccaaattctaatgagcttaacctagcattttctagattttggtaataaaaaagtcatatgccgagatggacggcgtaggctacaacgattgctgccctgatggcaatagaactttttgagatccacgccatctatctcgatatatgacgaatagattgtcaatcgttgtaatttcgagcttgccacaacgtttcgttcaccccctatggatttttggtgaatatttttattataccaaccattgtgaaaaaatcaatgatatagaacaaaagaaaacacccgtccgaaatcctaaaagtggtcatcgaaagggcgttctatggggaatagtagcaaataaccataaataagtcaaggaggcaacccaatgaaagacatagaaatcaacttcatgagccatccaataacggtacacttgccgaaagcaatccaggagtgtgcttttatatttattaaccatagaagagcgtgtttaattcatatattctacgggcggaaattaaaacccacctccacttactggaggcgagagtttagctcatggcgccttaccggctttccgatttattagagacaccgaacaaacagcgaactaaagtatagccggctaatcaacaacatcagccaaatataatattgctttatctttatccgaaaccttaaactcaagattaaatggtttatctttaattaaaacttcaaggacgagacgttcatagacaacagacttaccagaatcatcagtaaacgaacgttgcgcaaaatacacacgagataggcgagacttaagattgtctggtaattttgttgatggttgcataaaaggaaacctccattaaatatttataaagtcaccatatcaaaaaacaatacaaaagtctaacgtcgcacaatgtccgttttacgacttaaaatactgtacaagaatatgaattagcatccatctactgtgagcgctaatttactttacaaaaactactctcatcttttgtaggggatttgctcgaaaattgtctttacttatctactacatctatcacttaacgtgcgttaatgcacctaaacggcggcagcctcaagctctcattaaagtactactagtagcactcgcaacaacatatactcttaggaaattagtcctcgcataagttatccacaaaaaatatctggttaacgctaatttgcatttttgttaaaaacattcccccactatctttttttggcttttctgccctatttgatttttatacgattttatatttttatatagtttttcctctcactcgctcaattacgataaaacgaacaaatatagaacatctcccaattggcaagagaagtgaccttttctatttatagaatgctcgcctgctcacccgcacatcaagatatgccgggttgactgagtgttcggcgcaatatcggatagcgcgtaccgcatcttcaacctggctagctgccgcacgatcaatcgacagtctaaccggataccctaccccatcaagcttcacttctatttgacgagttgtgccttcaggcaaaattacgcttgaaacagtgtatttttgcgctgagaagtacccaacaaccttgccgacaaattctaaaaaccgattgctcacaagaaccttatttgtcgtcgcttgaacacccgtacggtcaatgacttgtacgacaggcgactcgggcacattccggtaaaacgccgctccgctagagtcaacaaacacaagtgttgcgcccgcttgccatgacacaactggatgccgcatgacgatagaaaattttgcacgcccaaacccagcaaaagcgactgtcggctcgacagactgaacctccggataatcatgctgtaaatagtcaataagggatttaatatctattagcgcgcgtagccgctcaaacggacgagccacgaggtagtcctgaattgctttttcatagcgctgcgtcgtttcagcagacggcgagtcaacgccaacaagcgtaacacttggcaaaacaactgattgataaagtatccatgcgaggccagcgatgcccgccaaaagcacaaataatcgtaatacaagcttgcgacgacggtagcgtaatgtatgcgcttgcacgcgcggcgacttaagatcagcgcggtgttcacttgggctcgaaatttcggaaagaagactgccggtcagcgtgcggttgcgccggaaagcatagctactcgctgtcgttaaatcacccggctgcgccgaatcatcgcgatcaattgcccgccgacgcactggctgcggcgggcggcgacgcagcacggcttttccgaattttcctagcatatatctttattatatcacttacgcttagcggttcggacgatcatctcagccatatcgcgcgccgcacgtggatgagcaaaagtcaaaaatgcggcacccatacgcgccattgctgcacgatctgcgagcagcgcttcaatcgcctgaacaagcaccttagggtggtcgtccaactgtaattcatcaattactttcactgcacctttttcttcgtataccgccgcgttttttagctgatggccgcccgtcaggtagccattcggcactaagatcgtcggtttggcgagcgccgcaagctccaagatcgtcgttgcgcctgcacgcgccacaacaatgtctgccgcaccaagcatatcaaccagcccgctgctaataaaatcatgaatatgcaccttgctagtatcattcggaacgcgtgcgcgaatatcgctatattgttgtgcaccggtgatgagaataacgttagtttgcttcgtaagctgcggtagcattgcaacaaccgcatcattaatgcgccgcgcaccaaggccgccgcctgtcacaacgacaagcggccgcactggatcaaatccaagctttactttgacgtcacgccgccgctcatcgctatacggcacaaaatcttccataattggcacaccaacatactgcgagatctcgcgcgggtatgggtagaattttagcggcgcacccgtaccaattgcgtccgcccaacgcgccaaaactcgatttgtcaagccggggtgcgcatcagagtcgtgaataacaagcggaatcctcagcgcatgcgccgccaaaccaaccggcaaacacacgtacccgcctttcgtaaaaacgacgtccggacgccatgcgattagcttgcatagacactgcacaaacccaacacccaccttaaccgcatcgatgatattaggcagcgtaatcgtacgaaacttcatcaactgctgccaccacttcaagtgatgataccggcgcaacttaccgctcacgattgcatcaacacgaattgaatcatcgtacccgcccatgacagtacgcgcttgtttttcaaatgcatggtcaacccagaatcgaatctccgtgtctggttctattttccgcaattcacgcaatactgcgacgaccggcgtaacgtgtccgcccgacccgccgcctgctgccaaaatccgcacgagcgtcctccttcatgttaactgacttatgattagtataccgcgaaagttgaaacacgacacccagcgcgccgctcataaaaatcatactcgttccgccaaaactaagcagcggcaacgtaatacctgtgagaggaatcagtccaatcattgaagcaacgttcattacaacgtgtgcaagcagccagccaaacacgcctgctgccgcgatccgcatagacatatcggggagctggtcggcaatgcgcaagatgcggaataacaaaataccaaataacccgatgatacaaactgtgccggcaaacccaaagatctcgcccataattgcaaaaatcgagtcattgaccgcctcgggtaaatatccagtcgcctggatactcttgccaatcccacgcccgagcaacccgcccgttcctagagcaatcatcgcgtttttgatgtgatagttattatcgcgttcatctgctgcagcaacatcgttgctcgagctaaagaatgtgccgatgcgctccatgcggtgcggcgacgacacgaccagcacaagccccacaacaacgccaacgcctgcaatttttaccaggatctgccaattcatcgtactaacaatgaacatcgatacgaccgttgctgcaatcgccacgcctgtgcccatgtctttctgaacaacaacgacgataaacagcaataacgccaatagtcccgccatcggataaactgtttctttcaggttgttaattttaccctgctggtaacggttgcctagaaatactgccatgaatataacgacggcaaacttcatcagctcagacggctggaatccgccgaagctgccaaagttaaaccaacgatacgcgccgagcgttgcctgcgcgagcgtatcaatatgcgcaacgtttcccaccaaaaacagtaatacggacgcaataagtgccgcagccataaactttcccgcttgattttttagcaccgagaacggcacaaacgccaatacgacaaacgcagcaagcgcaatgagcaaactagcgaattgtttaactgcaaagtatgtcgccgaatacgagccattatacgccgcattcattacattggcgcgctgcggaccaatcgcatacatcacaaccaaaccaatgagcatcagcacgcccatgcacatgacgatcatatagtcgggacgatgccgccgctgcctttgatggttcgtacgagcacgtactgcttctcggtgtgataaggctagaccaccgctcacgatgtaatatgccctccgctcagcgccatcagcatgccgataaacgccgccacgccggcaatcacccaaaagcgcatcgtaactttcacttccggccaacctgttgcctctaagtgatgatggattggggccgagacaaatatcttacgatgaaatagtttcttgctgatgatttgtagtagacttgaacccgcctcaaccacaaataaaatcccgataatcggcagtaaaaacagcgtattcgtcatcatcgcaacaacgcctaagctcgtcccaaatgcaaagctaccaacatcgcccatgaaaaatcgcgccgggtaaatattaaaccacaggtagctcagtaatgcgcctactaccgtgaagcagaagcccgccagcttaatatgcccctgcaatagcgcaatcacgccaaacgctgaaaacgacattaccaacaaaccgcccgctaatccatcaagcccgtcgctgatgttcaccgcattgcccgttgacaccactgctaatacaaaaaagaaaataatccacgcgccgacttgccattcgccaaagtacggtatatggatcgtattgtagccaagtttcgtgtagaagaaccagccgagcacaatactcattgcagtaatcatcgcgaacttcacccagctgcgcagcccggcatccttacgatttgagccgaacacattaagtacatcatcgatcagcccgacaaatgctccaccgagcaatgccgcaagcggcagccaagtttgtgcccggtcaaggttgcgcgccaacgtaatcgccgtaatggcgaccaccgcgatagtgcccgccattgtcggaacgtgccgcgcaattttctctttgtgcagtatattaaaaatctttagccgctcccccgttactgctgcgctacgctgcgttttccaaaatttatatttatacgcaaaatgcgtgtaaatcggcgtcagcagcatcgccaacaaaaacgctgccacgctcagtatgaaagtctgatttagctcgttggaaaaggttacaatcgtcataatatacagtatacccctttagccttgcggcgttaacattaaataatttaccatccaatttgagatgtcgttaaaaatcggcttagcgtcgctgccgccgcccatatccttgccgctggctgcaatttcaatcatgataacatagcgtggaatttgccctttttcgccgccataccccagataagttccgaccgtttgattactgacgtatttgccgttcacgatagtttcggacgtaccggttttgccgccaatcaagaatcgctccgacccgtctttgggattataggtcgcgtagtgcgactggtgaaccatttcgcgcaccgtgttagatgtcgcctcggttatcacgcgctcctgcggcttagcggcagcagctgtaaaaaccccgttatcatcaatcgttccgcccaagacagtcggcgcgcggtacaagccgccattgacgatagcgcaaaaaccgctcgccacctgcagcatcgtcacgttcataccctgcccgaacaccatattgctatagcgcaccgcgttcccctcttgctgctgcggcgaaacaatcgtgcctttgacctcattggcgagctcaatcccggtcaattcacccagcctgagtttgtcatgaaaataagaataaatcgtatcgcgcgccgaacgcgtaatatatgtgccgttgcccaaacgctgcgcaatcgtcaccatgccggtgttgagcgaccaattgagcgccgtctgcatcgtaatcgtgccggttacggcggcatttttcgtagcattgttcaccacgatatcttcgactttgattttgcccgtgttgtcgtaagtgctttctggcgtaatcacgccgcggtctacccctgtcgcaaccgtaaaggttttgatatccgagcctggttcatacggattcgaaatcgtgttattgttaaataccgccacgtctttgacattcaaattcgacgggtcgtaagtcggcgcgttcgccatcgccagcactttgccggtttgcggctccatcacgattgcacttgcccgcgtcgcgccgctgcggctcactcctgccgccagcgcttcttcgactttcgattggatattgcggtcaatcgtcagcaccatatttttgccattcaccgccggtcgcttgatatttttgtcggttacggttagcggcacatcgcgcacgtccgtcactgtttttagctcgccgtttttgccggagagcgcctcgtcatttgcctgctcaaagccgtatttcccctgccctttgctgttgacgaaacctagcacctggctcgccagcgcgccctcgggataaacgcgctgcgtcgatgcgtcaaagccgatacccgccagcttttcggatttgattttttccgcttgcgttcgcgtcactttcgtcgctagcacttggtagcgcgaatttttggtatccaggtatttaccgaagtctttgcgcacattgccgcccgccacgcggttcatcacctcaatcaccttttgcttatcggtcacgagcgtcgggtcagcccaaaccgtgtacaccgtcgtattcatcacgagcttcaccggcgtatcgccgtccatcgcgtaaatttcaccgcgcgacgcccgcagagtaaactgcttaatctgctctttgtccgccagcttcacataaaaatcgtgttctaacacctgcacatagaaaagacgcgctatcataaccgcgaatgccagtattgttacggtgctcagccaaaaaacccgccggtcgccgtgaatttgcacgcccatcgttctcctattcgtttacatgctgcgtatcagctggcgttgtcatcgcccgggcgacgctgctgctcttcaccgactgtag

SEQ ID NO: 1910 - DNA, 20397 bp, synthetic construct
  misc_feature 1..20397: note = Synthetic
  source 1..20397: mol_type = other DNA
aactctacgccgccaaactccaggccgaagccgagaaaaacatcgctgactttggtgatggcgtcaaaatcctcaacggtcgctttggcccatatatcaccgacggcagtaaaaatgccaaaattcctaagggcaccgatccaaaaaccatcacccatgaaaaggcactggaattgttaagtaaaacagctacaaaaccaacccgtaagcgaacaactaagaaaaaatagcgatattttctatactatccaacaattttggataataaaaactctcacatcatctattgcaaaaatagtaaaatacatgctataatttatatgaacaattatagcatttacctattgacatttatcaaatgcaattgtataattaaaaacatattttaatcaatgtaacctgtggtgaggcagagaggattttcctaatagcatgaacgagacagtaaaaaccgaaagaatcgacaacttaaattctgccattgatactattatttccaaaataccgcaagagcgcgaaagggaaatcatctctcgacgattcggcttgtctgacaggaaggaaacgctagaaatgattggtgatatgttcggcatcacccgcgagcgagttcgtcagctggaaaagtctatcctaacacgacttagagttgctgttagcgaaggaaccctaccgtcagttactgctatagaaaaggaaataacctcaagcctatcagaaatgggtcgagtagcccgtatacaagatttagcatcacatttcctgggcaaggaggcctcatcaattgaccgctctcgtgtagcgtttatcggagagttggcggaaaatatcactatcatcacagaaaatgacgactactatcaagcggcagccattgacactctgggcaacgaaaagcaagttaaagtaagagttgaagaagttgttaagacgattaaaaaacatggcgagccaatcactgcggaagatctacataaaaaattagactacgaacatccatcaaatattgcagcattggctactgttagtaaaaaattagctaatctacacaatcaatggggactagctaaatggccatcagttaacccaaagaacatccgcgataaaatctatgtcgttcttgacaccaacggctcaccgatgcacttttctgacattgccaaaggtattcgagacagcgagtttaaccgacgaagcgttactactcaggcgattcacaatgaacttattaaagatagtcgatttgtgctgattgggcgtggtatttatgcactggccagctggggatatagtcgcggtaccgtctctgatattattaccgatatcttgaaaaattctgagtctcctttgcaccgtgatgaaattgttcgtcaagtccttgataagcggcaggttaaagaaactactattctactcaaccttcaatcaaaaccgcagttcaagcgtgtcgcgaaagctacttacgtttttgacgaagccgcttaagctaagttgcaaacttccttcagaggtgagataatttacatatcatgcagattatttcttggattattggcacgttattacaatggtatgtttggataccaattgtagcagttctggtatttttgacgtggcgaaattatcgaagaatcgaagaatttacccccgttgagagtgtactattagttttggaaatcccacggaccaatgataaacaagagctagccgccgagcagctgtttgcctcactccacggcatcttacgtgacaataaagaactgcgcttatctggtggacagcaggagcatattagttttgagattgcctcggttaatggtcaaattcgcttctatgtttgggtgccaaaaactctgcaaagctttgttgagggtcaaatttattcgcaatatccaaccgtccaaattcatcaagccaacgaagattataccgagcacgagcgtgatcatgaagttgcgtattcaaccgaactaaccttaactacggatgaatttttaccaattcgcacctttcagaattttgaagttgacccgctagctggcgttaccggcacacttgccaaattagaaactaccggagaagaactatggatccaagtgctagctcgaccaattcctgatgattggcaacatgctgccgacagatatataaataatataaaaaacggacgcggattatcactgcctgggctcggtggtagtatgcagtggatagtcgggatacttggtgcactctggcaaccaccggagcagggagtcggtcagtcgacaactgttgagttgtcagaccgcgacaaaactcgcatttctgaagcggaaaaaaaggcgacaaagcttggctatgaggtaaagatacgactggtttacatgggagaaagtaacaccaacgcaaagctgcgcatgcaggctctggtcggtacatttaagcaattcaactcaaccaacctcaacggctttcgcgcagtaaagggtgcattcggcaaagaattcctggagaaatatcgtaagcgagcattttacggcgacggctttatcttaaacattgaagaactagcttctgtctttcatttaccgcacaccaacgttgaaacaccgaatattgtctgggctagcgccaaaaccgctgaaccaccgtccaaactaccagtcttaaccggcaatgacgccaacgacgaccaaatctccgcctttggagtcactaacttccgcggcattagtcatcaattcggcatgctacgctacgaccgctcacgccacgtttacattatcgggcaaactggtgccggaaaaagtggcctgctggaattattcgccctcagcgatatcttccataatcaaggctacgccatcattgacccacacggcgatttcgctatcaataacatgaagttcataccgggctcacggctaaatgatgtcatctattttaacccagccgacacagcttaccccttagggttcaatccgctagaagtcactaatcccaaccaaaaaaccaatatttcatcagaagtgattggcgtcctaaagcgcatgttcggcgattcgtgggggccgcgactggaatatattttacggtacactattctggcactacttgaccgaccagaaaccactatgcttgacattactcgcatgctaacagataaggaattccgcaaagagacgttatgctactgtcgcgataccgtggtcctacaattctggaatgttgagtttgccagctggaacgataaatttgtcgctgaagcaatcgcaccggtactaaataaagtcggcgcctttaccgccaacccaatcatccgcaacatcattggccagcctaaatctacgttcaatattcgtcaaatcatggacgaaggcaaaatcctcatcgtcaatttatcgaagggcttaattggtgaagacaacgccgccattctgggatccttcttagtcacaaagattcagctagccgccatgtcgcgctcagatattcctgacgttcgcgatcgtcgtccattctatctttatgttgatgagtttcagaatttcgccactgattcatttgccaccatcttatccgaagctcgcaaatacggtcttaatctgactgtcgccaatcagtatatttcccaaatgagtgaaaccgttcgtgacgctgtttttggcaacgttggtaccatgatttctttccgcgtttctgccgatgacgcaccgatcctagctaaacagtttgagccgaactttgaatcaattgacctactgcagatgcataatcgtaattttgttatcaatatggtgatcggcggcgaaaaaactcccgcattttcagcgcgtagcctggagcttccaccatcccaagcggacaatacgccgcatatcatcgaacattcaaggcgtatgtattcgaagagcagggaggatgttgagagagaaattagtgacattatcatgcccaacagaaatcagaaaaagcaggccgccccacagccgaatccgcagaccaatagtcagccaaataaaacacagccttctacagatagcggagaggttgttttgcaaattcgtggtaatagtgaattagacaaacctaattcctcgccagaagttgcaaccacacccgaatcaaccgcgaccaccacgccaaaaagacgacgccgacgacgaaaaaagagtgccactcaataaatcattgaactctagttataataacgccactggcgcatatcagcattataaacatcagttatccgcggagagatcagcgtagagacgggacctgatggaactgaaaccgcattatttttagtcaaaaaagtaagtagcttctgattctgataacgcaatccttttggcaaagggtgactcatcacagcatcagcatttggcgccgataatacaaaaccccattcgccaaatgacggtacattcactgaaaacgccgctatgtgtcgcccaggatgagcggattttacagtatttgccaccatataaaaagcctgcggagaaaagaacgaagaagttgcttgcgttaccattacgccatgctctgttaaaatattgccgacttgacggtatagttgttcggaatagagcttggccagccgttcattcgaagggtcaaccaaatcaatcaacacaacatcatatttatcctgcgtcgaaaaagcaaattgaaaagcgtcttgattaacaatattaacgcgagaatcatgaagtgaccgctgattaatgtcagttagcaggtgattagtctttgctaaattagtcattgactcgtcaatatcaaccagagcaacatgctcgacgctcgagtatttcaacacatcacgcgttaacaaaccatcaccaccgcccataatcagcactcgctttggactggcgaccgaggacaaggcagaggcagacagggtctcatggtagcgcgcctcatccagactagaaaattgtagattatggtttaaaaatagcctggtatctttcttatacctggttaatacaatcttctgatatggcgtttgttgctgaaacattaccggatctttatagatccgcttatcaattgcgttttcaatctctgtcgcataaacaaacagtccagacagaactatcgttgctacaatactaactatcatcacaaccctagaagccttcatctgccttaaaatcaatacggccacagcgatattcaacgccgctaccagataagcactgcgcatcaaaccaagatgaggcaacataatcagaggaaataataaggacgccactaacgcaccaaaataatcaagagccagaatcttactaaataacctaactgatgatttgcgaccaaatttctgaaacatcttcactagaagtggaatttccagaccaatacaaatgcctattgctaggctgataattgcaaaaataacccagtgcagtcgcgtaaaaacaaatcctgtgtacatcaaaagtaccgaattaccaccaattagccctagaataatctcgttggttgcaaaactagtcgctggatgtattttaatgtaattaaccagcagcgaaccaatgcccattccaaataaggttacgccagtcgccaaactaaagcttaagattgaatctccgaccaagtaagacgcggccgcgcctaagattaattcatagataatgccgccaatcgccactaatattgccgccgcaaataaagccacctgctcacgtttatgtatttcaaatcgcggcactaaaatatcctactttccaaatccgccactactgccgccataaacaccacgcgctccgctaccgtgcccatcactagaactattatccaaaaatgtaaatataacagcagcggcaataaacactataaatatgatcatccaccaattaattggcgtaattgtcctaccgaatattcgcttttgctctttagcgtctagcttcactttacgataagcatcgtactcacgattattatacttctcaatagtaattagctggcgccccttcggcgctttactgtcccgcagcgtggcgtaggccatcatttcttttgggaaaacttgataggtatttttacctttaatattcacgatttcgcccacgccaacttcatcaacaactacaacatgatccgttccaccctgctcggaaagagtaaaagattggcctttttctagctgctgcggatcaattgacctagtaaaccgaattggctcatacaaagatacaacctcgtcactgtggtcatactcaacccaagtatcataatcagctaggccagtgatttcccattcttcccagtagtaaaagcgtttatctttctcgctccactcacgaaatagcagacaaccaaccactcgcagatttgtcttctttccagtcaaaatctggttaatcttcagacgtgctttagtgcgtttcatattataaatccacctttttcatagttatgtcttcggccgctagttcctgaccgactaattcttgtatttgttgaatagcgacatcattcaagggtttacaagtagtcattgatatataggcagtgccactttccggccatgtgtgaactgcaatatgcgattcagacaaaagcagggcagaactaaccccttggggcgaaaacttatgagttaccgactctaatgggtgcaagctagctgcctcggcaatgtcgcgcattagtttctgcaacccatctgcatcatcaagcagggcagagttagatccgctcaccttaatggcgatagattgtatcccagatgtgttcatattagtaattatagcactatttaaccagacacttgcgcaatcataataagtgcgctaaactacaattacagtcccttaagtaaggattgtaccaatgtctaaattgttctaggtttctataataatctggcggtaaaaatccgctgtaaagtatatgaaatactggagcaaagcactaatccgctcacttgttgggcggattatctttttatgtagtaaaaaaacttatgctttcaattaccactctttggttatataattatgccaaaagacatcacaaaaaaggacttctttatggcagaaaaatcttcatattcaccgaaaaaatactcgctggggctagacatcggcacctcctcggtcggctgggcagtgctagatttagataaaaaacgtattcacgatttgggggtgaggatttttgagcgaccggaagatcctcaaaatggtgattcactagccaaacctcgccgtgatgcccgttcatcccgccgccgtctaaaacgtcgtcgccagcgcctcaatcacctaaagcaattttttgtcgaccaaaacattctcactaaaaatcaagttgaagaagttctaaattacaagtctaatttcaacaaattagatgtatacgccttgcgagcaaaagcactcaccgaggagttatcgcctgaagagttgctcaaagttttatatcaaatcgccaaacggcgcggcttcaagtcgaaccgcaaggtcgtggaagaatcagacaaagaaggcggccgcgtcactagcgcgctcaagaccaacgagaaattcctcgccgataacaattacgcaactgtcggcgacgcgctgagtcgcgatgaaaaattcgcaccgcacaagcgtaataaacgcgacgattataccaacagttttgcgcgcgatgactttttgcacgagttagaagctattattaaaactcagcaaaattatatcctaaaaaatgttcccgaacagactatcagcgagttaatttatggcattgacgatgggcaggtcactaacgtcagcgccatcatgtaccagcgtcctttcatgactaaagagctgatcgaaaagatggtcggcaactgtacgtttgaaaaagacgaaaaacgggcgccaaaagccagctatagctttgaggtgtttcgtttggcaagcgatttgtcgcacctcgtattcattcctcgcgacgccagcaaacgccaggctaagcgcgataatctagaagtaagattatctccagagcaaatcagtaaagttatcgacgtagccaaaagccaaaagagcttaacctataaaaaggtgcgcagtactgcagggattagcgaagactacgtaccaaaagacgtacgcggtaagaagaaagaaggtgacgaattcggcgaagacaatacttttggcggcctaaaagcgtatagcgacgtcaggttagcactaaaagatttaccggaagattggacaaaaattgataatgaatcggcgatcaatcaaatcgcctacatcctcaccacgcaaaaagccgacgagggtattcgcgccgaattagattcactgccgctttccgacaaagccaaaaaggccattgtcaaaattaaaccgaccaatttcaaagcatttggtcatttatcgatcaaggctttacaaaaaatcacgccgcacatccttgagggtatgacctacgacaaagcctgcgaggcagctgactacgacttcaaaaagcaatctgccagcttagagcaaattaccaaccctgttgtcaaacgcgccatcgcacagacactgaaggttgttcgcgccattgaacgcaaatatggcaaaccatatttcatcaaagttgaaactgctcgcgacctcgcaaaaaatttcaaagatcgtaaggcaattgaaaatgagaacaaggagaatcaagggcgcaatcaaagtatcattcagacgctaaacgagaacggcatcgtaactccaactggtcagcagattattaaagtcaagctctatcgtgaacaaaacggcatctgtctatactccggaaagtcgattgattttgaaacgatgttacatgacgataacgcctatcaggttgatcatatcgtgcctttttcacgctccaacaacgacggaatgacgaacaaagttatggtgttaactgaggaaaatcagaagaaaggcaatcaaacaccatttgaatattttggcgcagatgaaaaacgttggaaagagtttgtagcccgagtagaatcaatatataaaacacgcgacgtcaaaacgtctgacaaagccgcaaacgccatcaactacaaatacaacggctacgccatgaaaaagaagcaaaatctattgcttcaagattacaaaaacgacagttggaatgtgcgtgcgctgaatgacactcgatacatcactcgatttatccaaaattatttgcgccagaatgtcgactttgccgaaggtgaagaaaaacagcgcgtcatcgcgccgaatggcacaacaacggcatatttgcgtaaacgctggggattagccaaagatcgcgccgaagatgtgctacatcacgccaaggatgcggcagttgtggcggcaatcgatcagaagattgtcatgcaagctaacttgtacgccaaacgccacgaaatcaaagcactgctcgcggagaccaaaacaatggaagaaaaaaccgacaagctcactggcgaaatcaccgatgaagacgagttcgacaaagcacagcgacgtaaagccaccatcctcgtattgtcatctaaacatttccctcaaccatgggataactttggcaaggaagttatgaaacgcactctcaacactgacaatgcaacactacaaaacgaattacgcggacttgaaaattatgatgacgagttccgcttgagcataaagccaattttcgtttcgcgcatgccacgccgcaaagctactgctcaagcgcacaaggagactattcgctcaccaaaggttaaagatggcgatcagcgaaccgtacgaatgccattaagcaaaattaagcgaaaagacgtcgaaaactctgcacttaaagaatccgataagtggctgtacgataaattgctcaagagactagatacttacggcgataaccctgataaagctttcgctgaacctatttataaaaacgacaaaacattcgacaaaaacggcaaccaactgtcgccagtatcgactgtcaaagtatactcaacgcaaccaagtggcttttatatcaacaacggtaaagcatttgttaataacgggtctatggtgcgacttgacgtatatcaaaaaccaaacaagaaaggaaaaattgagcacttcttcgtgccagtttacacccatcaggttggtaaaaataaacccataccaacaaagatactgccaacacccaaggggttcactgacgtagacgaaacattcactaaggtttgttcattgtatccgaatgattatgtgaggtgctattttggcaataaggttatggaaggatactatgtgaaatggaatatttctagcggagttatgtctattatttcacactattcaccaggtaaatccaaggataaattacgtgaaatttcaccccgttctgctactctcatcgagcgttacgacatctctgtcctcggcgataactacaggtggttataaatggcctggcgcgtcgtagctatcgaaaatcctgccaggctgagtttgcgtgacaaccagctagtaatcacgcaagaaactgaggcgactttgccaattgaagatatcgatgcgctcattctggacggctacggtatgactgtgaccacaaatctaatcacagcactggcgaccaaaggcaccacgactgttatttgcgacgaaaagcacttaccagccagcgtacttctaccatattcacaacattcgcgccaagccaaagtttcacgccagcaactcgccatgagtcagccactcaaaaagcaattgtggcaacaaattatcatcagcaaaattaccaatcaggccgatgttttgcaatctgtaggactagacgactccacattacgcacctatattaacggcgttaaatcaggcgacactagcaaccgtgagtcaatcgctgctcgcatatattttgaccagctactagacgatgccacgcgccgtaagccgatttggcacaatgccgcgcttaactatggctacgcgatggtacgcagtcatatagctcgacatatcgccgctcgtgggctcgtcgcttcacaggggatttttcatcacaacgagcttaacagctttaacctagccgacgacttgattgagccgtaccgggctgctgttgatttatacatcttagaaaaagttgcgccacttcatgtcggcgaccgcgacaccagcctcaccaagcacgatcgccagcttatcattgacatattaaattattatgttataatgaatggtaagaagtttactataaaacatgcgattgagcgaacagttgaaagctttatcgagtgtattgaggtaaaggaggcgcgtaagcttcttttgccaaaaatcgcctcctaacagggaaggaatgtcatataaaattatgagggtcgcagtattctttgatttgccgaccaacactaaagctgaacgcaaagccgccgcacaatttcgcaaatttttactggatgacggttttgatatgttgcaatatagcgtatacacgagattatgcccaaaccgcgatgttgccgaaaagcacatgatgcgcgttaaacgccacgcaccagatagcggatcggtgcgattactgtacctaaccgaacatcaattcacgcacatgtacgttattgtcggcgaaaaaaccgtccaagaaaagaacgtacctgctggccaattagcatttttctaaccaaaaatccccctcgtaacagagggggatttgaggaagtattataccaatatctaaattgttagggaactataaccattttcgggcaaactggttctgtcgatttattataccaatatctaaattgttagggaactataaccttttggctattattgctgttggtgctggtattataccaatatctaaattgttagggaactataactctgaattcaccagctcacttacacgctctattataccaatatctaaattgttagggaactataactagcattcgtcaaagccagagtagccataaattataccaatatctaaattgttagggaactataactgccgtttgacaagctgatcatcattccacattataccaatatctaaattgttagggaactataaccgaatgtcaattggtttgctgctaaattctattataccaatatctaaattgttagggaactataaccggtcaggcgaggcaacggacatacctaagttacacagacgcataagtgtcttattctagtgatttaagcgctcgccaagaagccgaaaccacatcgctaagctccctatatactaccaccccagggtcatagcaattcatctgcgttacaacatcaaatctgcgaacatacaacatactctggatgtgcaccaaccaataaacacgaaccacgcccaatttcttttcctagttcaaacagtgtaatcggacagacagattcttttggaaaccaaaataaaatcattcgtgcccgcctcaaaaattcatattcccatcttatctgataagcagcgtcctcaccctcatgatctaacaatctatcgcgccgaggattagctactacaatatccgacccatcgtccagcatctttattgcgtccgcctgccaatctggacaatttgtaatacctcctgctaaaaataaatctaccgactgaggtatgtcatttaaatctatcacatccggtgtaagcaccttcatactactattatactacttcatcatgaagaatataacgacactttagacaaattttacgcacaagcagggtaagcacactaatctttcttcatgacaaacagataaggaataatagaacaaaatacgaactaattatttacgattttcaaggaagcgtcaaagcaaagcctaaacacgtaccataacaaatatcgcaatataaaacctacatacggctataataatcaatcacgcaaacgatccataaatccgccgtaaaagaacacagcagacagtccaagcagggtccatcagtagacaggacacaagacaggaagagtagttgcagatttataaaatagaataaatttacaccaaaaaacacgatagagtaatcatgtttatgagagtattataatgtcgcacaatgaaccttttacgtaataataaatacacgcccaacatgagtatacatgtgtccattgatatatccacactctataaatattacaattatttacccaaaatagtcaggggacttcactatccattcaacatagaccatgctacacaacaagctaaataaaactcaccaacaaacacgaacttaaaaaaatattcatctacctaaaagcgtacaccgcaaattgcgcattgatatttttacatcattatatccagtaaatatccatattataattagcttataagttttccacatatgattttgcttatttgacattttgctatttttatttccccgctcccctaacttgccgtgtctcaattatttgacttttgcatattttgatatcattatatataatttttagatagccaaaatagaacaaaaagagaacttactctatctaaaagagaagttaactactctatttatagaaagaccgctgatctaccctaacatctatataacctgacgattgaccatttttatctaaatatcccagagttactattgcctgctttacctgagagcgggcggatctatcaacaatcattcttatctgagactccctgccctcgatcttaaaccagacttgacgcacggtattcgctggtaaaatagcttccgacaccttcagcttatgttgcgagaattcagacacagcctgccctaaaaaacttaaaaattgccgatttacgacctcttggccaccccgagtaggtaatccactttcgtcgcgaaccgcaactgtaggcgggttaaaataattctgctcaaacgtaacaccaccatcatcaacaaaataaactttatttccagaagaccactgagctactggctgacgaaaagttaacttagcggctgaacgcgccaagaaatcgccctctatacgaatagtttttacttcaggagctttctgcaagaaaaactgcctcaagtcattattgttcagaaaaaacctaaaccgctcagctggatgggcattgtaatattcgttaagaacgctggtgtatttactagagttactagagcttttagcgtcgggagtctgaatggagatactaattgtcagctgaaacaataaaaataccacgacagccagacacactgcagttataaataacttctgcatcatataacgacgtttttttactagattatgcgcctcaagccgttcagaggcctctagcggtgaaatcgtctggcgactattaagagttctgtttcggcggtatgactgcgttggtagattgtcgtaattttcaacctgccgacgagcagcgatctctcgacggcttaaatttctatcagatttctttcgagaaaaagataatttcaccttcgcctaccctgtcttcgtatagtagtcagaatgatcttcaccatatctttggccgcatcaggcttggcaaacttgccaaaattatcgcctaaacccttaagaatcttctgcgatttcaatacgccgataatcttccgtgccaaaatttgattatccttgtctagctcgtcctctgaaactatcaaggcagccaacgcatcctgatacaccttagcattctttaactgatgaccacctgtcagacggccgttaggaatgatgatagtaggtttatgaagcgcagccagctccagaagagtagtcgctcctgccctagttacaactatatctgctgctgccaaaacttcagccataccattatgaacaaaggcttgaagacaccatccactgcgctcatcagtctgcttaagtatttcttcgtactgcaggtttccagatattaaaaacaccgaagcctcagccaagagttcttctctgattgctaaaattgcagaattaatacgcctagcacccagcccaccaccggtgacgacaaccagtggcttattggaatcaaagcctaatttcgccttcaatttttgccgctcagcctcagaataaggacgaaattctggcgccactggtataccaacatacgacgctttttcaggaggataattgtaatattcaaggggtgcgccagtaccaatagcttttgcaaatggactaagcaagcggttagttaaccccggatgagcatcagagtcatgcaggactaacgggattcgcaacagcctcgcagcataacctacagacaaacaaacataaccaccttttataaaaatagcatccggccgccaggctattagcttaaataagctttggaaaaatccgacaatcaccttaaagccgtcacgaagatttggtagtaatattgatgggtgtaaatggaacgacagactcttaccatgatatcgccgcagtttcccagcagtaatcagctcgactggaatagtgtcgtcaaatttagcaaaaatcccacgtgcgctaacgccaaactttttgtcgcaccaaaaacggagctcgtgatcaccagtcttttgtaattccctaaatacggctaccactggcgtaacgtgtccgcctgagccgccgccgaccgctaagatcttggccaccttcaccctcctctaatactttatgtgacgtatacttggaaatttgaaaaactaaaccgagagccgcagcaatgaacagcatacttgtgccaccataacttaataatggcaacggaattcctgttagcggcattagtcctgtcatggcagcaatatttaaaattacatgtgaggcaatccagccaaagatcccagcaacaatcaacctcaaagtcgtatctggcagccgtgccgccacgtgtaaaatcgataatagcagcgcagtaaataacgccaatatagccatcaaaccaacaaagccaaatgtttctcccataacagcgaagattgagtcattaatcgcttctggtagatatccggtcgcctgaacacttttaccaataccaagccccagaaggccccccgaaccaattgcgattctagcctgctggatgtgataatttttgtcctcttgaccacttgcggttttatgactatcaccctgaataaatgtcataacccgctcaattcggtgcggtgaggtaaatatcaatactaacccacaaaatgccaccactcctaaaatcttaccaattattttccaatccacaccagataccactatcattgataacactatggctatcaaagacacgccggtgcctaagtctttttgcaaaactacaatcatcaacagcgaaagtgcagaaataaccccaaccggaacaagtgtttcatgaacatcatttattttcccctgagaagcacgccgccccaaaaatcccgccaagaataatagaatgccatatttcaataattctgacggctgaaaactacctagtccacccaaataaaaccatctatacgcgccgttagtttctttggccaatgacaaatgcagcagcgagcccagcaaaaacaacaagacgcacgacaggaatcccgcccaaagaacatattttgaacgctcgcccgtaaaccacttatacggtacaaaataaaataccgaaaacgccacaacagctataacaacactagttaactgcttaccaaaaaaataagtatcactataattcgtgccataagcgtaattcatcacattagcgcgttgtggccccagtgcatacataacgattagtccgagcagcaataaaagacccatatacagcacaatctggtacatcggtcggtggctgcgaaccgattgcgtggaagcctggtgttttctagagactgaattacgcaatatgtccccccgccagtgccagcataacccccacaaatgccatcacgcagccaatcacccaaaaccgcatcgttactttagtttccggccagccaattgcttccagatgatgatgaattggcgcagataagaaaattttccgcttaaatatctttttactagcaatttgaatcaggcttgatcctgcctctactacgaatagtaaaccaattacgggcaacaatagcagcgaatcagtcagcatagccactacccccaaactcactccataggcgaaactaccaacatcacccataaaaaaacgcgctggataaatattaaaccacaaatagctaagaagtacgccaaccaccgtaaaacagaaccctgccaacagtacctgttgctgcaacaaagcgatcaccccaaaagcaccaaaactagtacctaacagaccgccagccagcccgtccatgccgtcagaaatattcaccgcattaccagttgccaccaccgcaaacgcgaataacggaataatcaaccagccaatatttacatcacccataaacggcacatgaaaactcatcacgcctaatttggcgaagaagaaccagccaagaaccacgccgataagcgtaattagcgcaaactttaccggactacgtaaacccgccgccccaccgcctagcccacgtagattaataacgtcgtcaatcagcccaaccgccccaccaccgaccagcgccgccaatggtagccatgtctgagctcggtccaagttaaagaaaaacgtcacaataaaaatagaaatcacaccaatcacacccgccattgttggaatatttcgccgtagttttgccgcttgaaacttagcaaaaacctttaattttttaccgtcagtactctccgatctttgcttcttccagaatcgatatctataagcaaaaaacgtatagactggcgtcaaaaacatcgccagtaaaaacgccccaacgctcagtaaaaacacatgagttaattcattagtgactgtctgtaaggctactcccatatctattccttcggtgctattttcatataatcaatcatccaattggatatatccgtaaaaattggcccagcatggaaatttccttgtaggttaatccccttacctggcgccgctacacgtaccattatgacatattcggcgccattttttccaccgccataaccaatatatacagcaatcgtttccttttgagtgtaagcgccattaaccaccgtttcagaagtactagtttttccaccaatttcatagccagatttgtcactctttgataggaatgaagatcggcgcgccgtcattagcatagttcgcatctgcgatgacgtgccgccgcttacggtttggcgaataactttattttccgacgatttcagattgccagattcgtcaattgtaccaacgagaatagttggcttataatattgaccaccgttaactagcgacgaaaatccagccgcgacttgaaccatagtcaagttcatactctgcccataagtcagggccgaatagcgaacctcatttccttcagcgctatctggcggataaatataacccgaaacctcacccagctcaattccagttttggcgccaaagccaaatttatcatgataatattcatacaacgtctggcgagccggcaaattaatctgcgaaccatttcctaattttcgaatcgcggtaatcgtgccgacattgagcgaattgttaaacgcgccttgaatcgtcattggaccgcccaaacctctcagagcgttacacatcgtgcgatcagcgactttaatacaatcggtattattatacgtgctggacggcgtaataacgcctttgtcaattgccgtagcgaaactaaaggacttgataaccgaacccggctcaaatggcaccatcgacgcgctatccataaacaccgacccgtttttctgcttggcaaaatccgccggattataagtcggataattcgccattgccagaacttgaccgtttttcggattcataacaatcacgcttccttcggtagcgccagctgcttcgactccctttttcaacgccaattcagtctgattctgaatattcctgtccaccgtcagcgctaaattgtcgccagatttcgcctcgattcgcatattattttttccaaccgtcaaaggtatgtttctaacgtcagttacagattgcaatagcccgtcccgacctttaagttgcttattcaaagaaccttcgacgccatattgaccttcgccagccgcattcacaaatccaagtacgtgcgcacccagttcgccctcaggataatttcgaatagagctttgttgataaagcacgccggcaaagtttttctttttcaatttttccgcctgagttctggtaatattcttcgccaaaacttcatagcgcgactttttattattgaggcgttcagatacattttctgtcatttcaccgccaacaatttccctcagactatcaataagctgattccgctctttatcgtcaatcgactgcgggtccgcaatcaccgtatagacagcctgattaagcactacgggaactggcgtttttccgtccatcatataaattttcccgcgctccgcaggaataacgaattgacgctgctgacttgcccgcgctaattccgtatatttgccatattgcaaaatctgcaattgaaataatcgcagcacaaaagccgccatcactactagtaaagcgatggctaaccaaccagttcttgaacgaataagccgctgcatattgcttattttattatatcactattgagcgtaatgcgtttcagttgctgtcattgctgaagcaacgttactattcttaaccttttctagagccgtcaagcgtgcattctgaacttctaattctgacttttttgcgcttagttcggtgatttttgtgtctagactctgagcttcatagccataagctgtaagtctggttgcctgagtaagataaatcaagcccagtactgtaatcatcaatgccactagcactgtatgagcgacaggaccaagtttgacctgagactgaaaacgtgtcgaattctgattgcggcgcatttgaccgtgtgagcgtcgtgaagtaaatgtggtggtgtttgtcatttgtctctatctttttatttttatctgtttatattggtataacaaaccagcccgcccgctacagacaggctggttttctaaggtatattccggaatacgctttagtttagccgcggcgtactgaaacagtctctgccttgtctgtattctggaattctactttgatgtggattggcatattgcctccttctttttgttttattttttcacggcgtatcgaaattttgcacttcgactacgcggattatgaacatcttcagttccagacactggttttttctcttggacaattagctcagcttcatatccagccgtcgcctgctccgaaaagtaacgcttaatcaatcgatcctccaagctatgaaagctaattattcctactcgcccacccttattaagtaaacgtggcaaaagtggcaataattcctcaattagccgaagctcgcgattgacctcaatgcgcagtgcct

SEQ ID NO: 1911 - DNA, 20207 bp, synthetic construct
  source 1..20207: mol_type = other DNA
  misc_feature 1..20207: note = Synthetic
gaactatttaaggatagtttgcgcacactagagaagttacgggcaaatggtaacaagttatatctattaagcttgagacgaaatgcaaatgctcttgattggcagattgaacatttgggaattcggcatttgtttgaaaagattttgtcgggtcatagcgacacaaaagagggaacgctgctgaaaaaggcggatatcgtcagacaaacagtggacaatccaagtgaagtcgttatcattggcgacaccgaagcagacatcgcggcggctcagcagctcggtgctaccagcattgcccttatgagcggtattcgtaacgaggaattcttatcagccatgcatccaaaccatctcgttgatggtatcggcgatgtagacaatatcaagctgtagcttatttcttaaaattgttgttctcattagacacatcaatggtgagcgctgttaaaactagctgtacacttaaaataaatggtagtacagctagcataacgctgccagcggtcggtgattgatgagcgaataatttaacatacaacaagaaagctgcaatcagcaatgagatgatcaaaaagaacatgccagtaaacaaaaacagggctactggatggaaaccgtacagaacgtatttatagtaaattcgtcgccaaaaacctttccatacagccttgaggttacgccaagcggttgggattagtttgatagttgatttctcatcaccgtaatgagctggtacggcgtggtcaataactttagcattgactatggatagggcggtcagcatgctggtttcatagtcgtagcgcttttcaactatggagaaatcgaccttttcaattatgtcgcggcgtagccaaccgcagccattagtgatgtctgtgatggaataatatccagtcgagaattttgtcagcaatgatatgaaaatattgccgaattggcggtattttggcatggtcttaaaggcttctcggtgaaagaagcggctggctttcacgtagtctgccgattgatcgataaaatcgtctagcattgccttgaggtatgacgagtcaaactggtcgtcgcccgccacgatcccgatagcggtcgctttggtgtgctcgatagcgtaattatatcctgagatgagagcgccgccgacaccttgatttgttttgttgtcaacgacaatcagtcgatcattttgcttttttaatttatttagaacgccaatggtatcatcagtgctggcatcattaacggctataacatgatcaatgtactttggtaacttcttgatcgtttgagtgatcattttttcttcgttataacaaggtataacaactgcggtctctaattttctgtacatacctctcattatactataaatatggtattatgggttagttggttagtatgaaaaagcttgttatacagatacttttatttggcattgtcggtgtgacgactctggcggttgatacattagttacctccatattgtactatatggctaaaatgccagcttttatggcgagcggtattggtttcttatcggggttttgtgttaattttcctatgaacaggaaacgagtttttaatcacagcgaagacgatcgattttcattaaaatcacaaatttgcttatatgctttgctaagtttttttaatttgatggcgacctctacggctgttgatttattagtaaaaatgaatatcctagagattcaatgggcaaagattgtcacaaccattgtatttgctgtttggaattttttggtctttaagctatttattttttcaaagaaagtatcgcacgaagagaggcaggatgtgcaatactctaataaataggctgcatgaccgtaggttatatataatagcttatattgtagttattattctcggtgttgtattcaatcaagccttaattttaataatggctgcaacagttaccgcggtagtatttctgccgactagacgactaggtcttatgggtcgactatttattactctttcggtttacataagtattaatactttgttggcttttgtaccatgggtactcaaggtgccgatgtcaatatggctctttgcctggactgtcggtgtatttaatctaggtcttgttgtattttgtcgtttcactcctcccagcagatggttcccattaagcgagattattagttctctagtgagccttactgtatttatcctgatgctgacgcaatctttttctagttttcagagcgccgatcttttaagagtggctaacggctcaggggtagataatatgtctcatcttagttttatagacactatcgagaggcaaaagggctatgtctatggttcaagaggtaaccagttgccgattaactctatgctaggctctgctgccaacaattaccctcagggctatcatataaatgcttgggtttttaatgaggctgtacaaccgtttatgagtaggtttactgacattaataaaaagctagttagctttttattatattcgataattaactatgtatttttagtgtttgcgtttatctttctggcaacgaaactggttaaattagataataagaaaaagccatggatgtcagctattattgttatctcctgtacgatatacacattattaggtttgatgttttctgcgtttactgacggtttcatgccacaaattatgagtctccatttgttgctttcggttatagccttactatttttatattgcaaggaaagcgatattacacaaaagtatacctacgggctattagcaaccttttctgttattggtgttggtctatcctattttttcctacttccagttgcgttgggtatatttatctttactttagcggctgattatttttatagtaatcaaaaagtaaagttgtcaaaacttttgctgggcagtcttttgtttattgtcagttttagcgttgtacagggggctatttacgtattacttgagagggtgacatcagataaaattaatgatcagggtggggtgttggtttttgacgtattctacgtgctaagtttggcggtgtttgctatggcatatttgtggcacaatcataagaagcgaacagttaatcctctaactattgggctagttgtgtcattagtattttctctggcgttatttatatttcaaaaaatgaccaatggtgaagtcagctattattatcataaatctgtattaagtttgcttctattgactagcttggttatgacaatgctaactatgtcgcttatagacaaagcacaatcaagtggcgtcaagattttaatgattataggcattataatgatggccttttcaaacggggttggtgtgtttggagtttatttgcagggtaaggtaaaggcggcgtttactgcaccagagttatttgaccatgcgattactatagctgagagtccaatctgtcgagaaaagtctacggctatactttcggtcagaagtgatcagaaaactgatggtgatatattttttaatagatctatgatgactctgactggacagtctactactacacaggaaataatttccaggtggtcaactcctaatgctgacatacatagtgcaaagcaggttatagctaagactttgctcgaggacaaaaatataaccccagaatctcgtctcctgattttgacgcgtagtgacgacataaaggctatatttattgaggttttaggcaatgaaagagtattatttgctgaccccagcaacgtatcaaaggatagcttgagtgggatatgcagcagattgcgaggcatgttttagcttgattgacaatctactctaactagatacttaccataaccagatttcttgagcggctcagcaagcgtgttaagttgttctcggctaatccagtcatttttgaaagcgattttttctgggctaccaatgatgcggccagttcgtttttggatgacgcgaacgaaatcagcggcatcagttaggctgtcgatagtgccggtgtccagccaaacatcgccattatctagagtctggacttgcagtttgccacggcgcagatattcagcattgatggaagtgatttctagctcgcctcgtgctgaaggctggacgtttttggcgatctcaataacatcgttatcataaaaatataacccgaccacggcgaagtttgattttggctcgtctggtttttcttcgatggaaatggcttgattttgctcgtcaaactcgacaacaccatatcgctctgggtcagaaactttgtaagcaaaaaccgtaccgccgtcaggattggtacactcctgtagggactcatctagccgctcaccgtggaaaatattatctcccaggactagagccactttgtcgttgccaatgaattcttcaccgataatgaaagcctgtgctagaccttctggtttgggctggacagcatattccagattgataccccactgcgaaccgtcgccaaggagtcgttgaaagccagcttggtcgtctggtgtggtgatgattaaaatatcgcgaattcctgcttgcatcagcgtagttaacggataataaatcatcggcttgtcatatattggcattaactgtttactaatcgcttgggtaattggccaaaggcgcgtacccgatccacctgctaaaattattcctttcataaaaactccttttagtttagtatataatctttcagatcatgtgtccaatcacgactagtgaacccggtagaatgtaatttatcaagattcatatcgctacctagtggtcgaggggcgatgccatctttgccggcaaaatattcagccgttgttgtgttggtaacggtcagatcattgcgcccagctaactcaaaaatccgcctagtgatatccgcccagctttctaatggcccgtcattggtagcgttatatgttccgaatggtgcttgagttgatagcaggtggtcaataattctcaccaattcacgagtaaaggttaatcggccaatttggtcatgaacaacagttggtgaaatgttcttttccgccaatcccaacatagtgcggacaaagtttttaccttcgccaatcacccaagtagtgcgcagcaaataaaaattatcgagttgctcgactaataaatctccagctgcttttgaggcgccataaacgctcaatgggctgaagtcttcattttcaaaatgaggttcttttgttccgtcaaatacgtaatcactagaaatatgtactaaagtcatgttgtgagtgcggcaaactcgggttaggtttgcaaccgctgaggcattaaccttccaagctgctacgcgaccttctggtgtttcagcgccgtcaacattagtaaaggctgctgcgtttaaaacgatcgatatccctgaccagtcgaatgactcaactgattggcggtcagtgatatccatctcgtctatgtcggcgaaccgtgcttctggatattgttgacgaagtgcccgccctagttgaccatttgctccgacgataaaaatgttatttgaattcatattaaacctccattggaattacatttgtaagtagtggatgagcggcgtctttttcggaaataatcgcttgctcttggctgattggccagttaataccgagtgctgggtcaaacagattgacaaaggtgtattttgcgtctggtgaccagtgtgcgtcaaccaggtaagtgtaggcaatgttgtcatcaagcgcttgatagccgttggcgacgcctttcggtacgaaaattgccatgccaggattgatttcatgtgtgaaaactcgaccgaagctgtcgcctttgcgcaaatcgcaccacgcgccgaatactcggccattagcagtggagataaatttattccacggctcagcatggaggccacgggtagcgccggctttgtcgttgaagctgatattgttttgcacgatggtaaatgacggcagtcccagtgcttccattttttccttttggtaattttctttgaaccaaccgcggttgtcgccgtggacgggcagttttactacaaacagcccggggattggcgattcggtgacggtgagttcattatagttatttggatcaaaattcataaaatctcctttaatttagcaaaaccttgcttaatatcttcgcctgacagcatctcaaaactaatctcgtcaggagatagtgtcactatttcggcaacatcatcatgtggctttagttgtacaccctcatgtattactgaccagaataaagttgaaataactggtatgttttcgccttgataatagtaatttgaaggtgctgagcagaggtaaacaggcgtactgtaatggtcttgtgttaactctgtttcctcggtaatttcgcgacgtacagcatcttcggcactctcgtttatttccataaaaccgcctacacaatccagtagacctttatttgggtcaaatttacgcctggcaagtacgatgctttgcttatttggcgttagaaagaatatacccgtagctggtacaggactattgaaagtactgtgttgatttttgcatttccaatattcttcggaaatcttgtttagggttgtgccgcatcttcggcaaaaatttatctcacgctgtttagacctgtctgcgtgtggcatagtttattgcccctgttttgcatacgctgcttcgacggcgtctttttgctcttgccaccagctttggttgtcgcggtaccattcgatggtttgcattagaccatcacgcataccagtttgattgtcggtgtactcaggctgccaacccagctcacgtcgcagtttactggagtccatggcgtagcgcatgtcgtggcctgggcggtcattgacgtgctcgtaccaatctttgcctttgcccatcagctcgcaaatcagttcaatcaccatcttgttgttgatatggtcgttgtcagcgccgatgatgtaggtttcacccaactcgcctttttccaagacgaggtgaacggcagcgttgtggtcatcgacgtgaatccagtcgcggacttgctcgccagtgccgtacagttttggtttgatatcgctcaaaatattggtgatttggcgcgggataaacttttcgatgtgctggtatgggccgtagttgtttgaacaattggaaatcgtcgctttgatgccgaagctgcggacccaggcgcgcactagcatgtcgctagaagctttagtgctggagtagggactagacggattgtacggggtgtcctcagtgaagcggtttggatcgtcgagctctaaatcaccaaacacttcgtcggtcgagatgtgatgtaagcgcttaccgtgcttgcggacagcctcaagaatggtgtaggtgccgatgacgttggtttcgacaaacggccagggattgcgcagagaattgtcgttgtggctttcagcggcgaaatgcacaatgatgtcgttttcagcaactaatttgtccatcaacgcagcgtcgcaaatgtcgccttccacgaaattgatctggtcagctactggctgtaaattggcggtattacccgcgtaggtgagcttgtcgataacagtgatgtcatattctggcttgtgtttgacggtataatgcacaaaattcgagccaatgaatcccgcgcctcccgtgactagcatctttgtcatatttatattgtaacaaattaatatattaaaatatatttttagtctgcaaatccatttggattatttgactgccacttccaactatcggcacaagcttgttttatagaataaacagtttgccagttaagttctttcttggctttacttgcgtctgcataagaagcggcaatatcacctggtcttctatctgttatttcataaggtattgactttcctgcagctttactaaattcatcgattagctccaataccgagacgcccttacctgaacacaaattataaattgcaacacctggcttactgtggtttaaggctgctgtatgtcctgatgctaaatccatgacatgtatataatcgcgtacacccgtaccatctggagtgtcgtaatcatttccaaatacaccaacctttgctagtcttcctacggctacttgagtaatgtaaggtaaaagattatttggaatgccatttggatcttcgccaattaaaccagatttatgcgccccaactggattaaaataacgtagaatagtaacttcaaaatttgggttagctgcggctatatctgttaatatctgctcaatcataaattttgtccatccgtaaggattagtaatgccgacaccagcttgatcagattcagtaattggtaatttttttggtgttccacatactgttgccgagctagagaatacaattttattgacatcaaatttactcataacatcaaataaaactaaacttgattctagattatttgaataatatctaagaggttgtttaacggattcaccaactgctttaagtcccgcaaaatgaattacagcatcaggcttttcttgcttgaaaatttcttccaatttggatttattacgaatatcagtttcgtaaaatggaacttttgttttagtaattttattaagcctattaataacttcctttgatgaatttgagagattatcaacaatgactatatcatttccattctctataagatctattgcagtatgtgaacctatgtatccagttccaccagtaagtaaaatcttcataaaacgaatcctttctataatgtaattgtaactactattatataatgtaaatatgataaccgtaattatagctggtggcgctggtactagactgtggccactttcaacaccaaacaatccgaaacagcttttgactctaactagcgagcgaactatggttcagcaagcttatgatcgtgcctctatactaggggataaggtatatattgttactgaatctagtcatgcagataaactgcgcgatcaacttccagaactccctagtgatgcctttttgatagaaccagggcgtcgaggtacggcacattgtattatttttgcacttgattatattgcacgccatcataaagccaatgaacccgttgcttttattcattccgatcataatgtccgtaatattaaaggctttaagcaatctttccaatcggcggctaccatatctcaacagaataattcaatcgcgctagttggcattgaacctacttcaccgtcaactggttttggatatattgaatgtggcgacttaatcgataaaagtaataatgcatatacggtaaaatcatttaaagagaaacctgattacgaaaccgctaaaaaatattttgcttctggtgattatttatggaacggcggatattttgttgggtcggttgatatttttgtaaaacaaatgcaacaatttgcgcccactttgatggaagactacagtaaattaagatccttatctcacttcgctagtgaggaatattacaaaacatatcttagttttgatgttcaagcaattgatacagtcttgatcgaaaagatgtcgaacttatttatgatttcggctagttttgattggatggatattggaaattttaaagatttatatgatgtccttataaaagatgaaaagggtaattattgcaaaggcgaaaatgtttatattttagatactgatacggcttatgtccgtaatgaagagccagataagccagttgcggttattggattagataatattgttgtggttaatacgccgaacggtattttagtcgcaagaaaggatatagctgctaaaacaagtgaaattactaagatgttgaataaaaattaaattaagatccatattgccatttaaaatgtagcgtgatatatttgaattacagtcccttaagtaaggattgtactaatatctaaattgttttaggtttctataataatttagcaacttagggcgacgattttgatcgtgcagctacggttgagaattctattgtgaatctaaagcaaagctctaatccgctcactcgttgggcggattatcttttatctatgctcattttgcttacgcttttaatcacagtgatttggttgtataatcatactcagttaagcacaaaaggaatcttgcacatggcgcaaaaatattcatattcaccaaaaaaatactcactagggttggatatcggcacctcgtcggtcggctgggcggtattagacctagacaaggagcgcattcacgatttgggagtgaggatttttgagcggccagaagatcctcaaaacggtgattcactcgccaaacctcgccgcgacgcccgttcagctcgccgccgcttgaagcgccgccgccagcgcctcaaccacctcaaacagttctttatcgaccaaaacatcctcaccaaagatcaagttgaagaagttctaaattacaagtctgatttcaacaaattagatatatacgccttgcgatcaaaagcactcaccgaggagttatcgcctgaagaattactcaaagttttatatcaaattgccaaacgacgcggcttcaagtcgaaccgcaaggttgttgaagaatcagacaaagaaggcggtcgtgtcactagcgccctcaaagccaatgaaaagtttctcgctgataacaactacacaactgtcggcgacgcgctgagtcgcgatgaaaaattcgctttgcataagcgcaataaacgcgacgattatactaacagttttgcgcgcgatgattttttgtgtgagttagaagctattattaaaactcagcgaaactacgccctgaaaaatgtccccgaaccagctattaatgaattgatttacggcattgacgatggacaagtcaccaacgtcagcgccataatgtaccaacgtccatttatgaccaaagaactaatcgaaaagatggtcggcaagtgtacttttgaagatggcgagaagagagcaccaaaagccagttacagcttcgaaatatttcgcctggcgagcgatttatcacacctcgttttcattcctcgtgatgccagcaaacgccaggccaagcgtgaaaatctagaaataaggctatctccggaacaaattaaacaagttattgatctggccaaaagtcaaaaaagtttaacgtataaaaaagtgcgcagcacggcaggaattagcgaagactacgtaccaaaagatgtgcgcggcaagaagaaagacggcgacgaattcggcgaggaaaacgtctttggcgggctaaaagcttataacgatattaggcttgcactaaaagatttaccagaagattgggcaaaaattgataatgaatcagcgcttaatcaaatcgcctatatcctcacgacacaaaaagccgacgaaggtattcgtgccgaactagacacgctaccactttctgacaaagctaaagaggctattgtcaaaattaagccaaccaatttcaaggcgttcggtcatttatctgtcaaagctctacaaaaaattacaccacacattctcgaaggcatgacctatgacaaagcctgcgaggcggctggctatgacttcaaaaagcaatctgccagcctagagcaaattaccaaccctgtcgtcaaacgcgccatcacacagaccctgaaggtcgttcgtgctattgagcgtaaagacggtaagccatatttcatcaaagtcgaaaccgcccgtgatttggcgaaaaattttaaggaccgcaatgcaattaaaaaagaaaacgacgaaaaccaaggatataacgaagacattaaatcaataattacagacgggtacgaggcatcgcctaaaaccaagggcggtaaacagctccttagccatcttaaagagcttaacgtgccattaaataagaatgcggattttaatggtcagcaaatcgtcaagattaaactctaccgcgagcaaaacggcgtctgcctgtattctggaaagtcaattgattttgaaaccatgctgcgcgacgacaacgcctaccaagttgatcacatcgtaccgttttcacgctccaataatgacgggattactaacaaagttttggtattaacagaggagaatcaaaagaaagtcgacaggacgccgtttgaatattttggtgccgacgaacaacgatgggagaaattcgtagcacttgttgaaacaacgtataagacacgcgatgtcaaaacatctgataaagctacgaatgctattaactacaaatacaacggctacgccatgaaaaagaagcaaaatctattgcttcaagattacaaaaacgacagttggaatgtgcgtgcgctgaatgacactcgatacatcactcgatttatccaaaattatttgcgccagaatgtcgactttgccgaaggtgaagaaaaacagcgcgtcatcgcgccgaatggcacaacaacggcatatttgcgtaaacgctggggattagccaaagatcgcgccgaagatgtactacatcacgccaaggacgcggcagttgtggcggcaatcgatcagaagattgtcatgcaagctaacttgtacgccaaacgccacgaaatcaaagcactgctcgcggcgaccaaaacaatggaagaaaaaaccgacaagctcactggcgaaatcaccgatgaagacgagttcgacaaagcacagcaacgtaaagccgccatccttgtattgtcatctaaacatttccctcaaccatgggataactttggcaaggaagttatgaagcgcaccctcaacaccgacattgcaacactacaaaacgaattacgcggacttgaaaattatgatgacgagttctgcctgagcgtgaagccaattttcgtttcgcgcatgccacgccgcaaagctactgctcaagcgcacaaggaaactatccgctcgccaaaagtcaaagacaacgatcagcgaactgtacgaatgccgctcaacaaagttaagagcagagacgtcgagaattcagtcctcaaggaatccgataagtggctgtacaataagttacttgagaggctagatactcacgacaacaatcccgaaaaggctttcgctgaacctatttacaaaaatgataaaaagtttgataaaaacggcaaaaaactatcgccagtttcgaccatcaaagtctattcaacgcaaccgagcggcttttatatcaacgatggcaaagcgtttgtcaataacggatctatggtacggcttgacgtttatcaaaagccgaataaaaaggggaaaattgaacacttctttgtgccagtttacgctcatcaaattggcaaaaataaacctgcgccgacaaaaattttaccagcaccgaaaggatttactgatgtggatgagacgttcattaagatttgctcgttgtatccgaatgattatgtacgaatttaccttaaaaataaaatactagagggttactattctggctatgacatatccgtaggaactatgatactatatccgcactttacaccgtctaaggatattaaagtagccaacagagtttctgcacgttccgctacccttatcgagcgctacgacatcgctatcctcggcgataactacaggtggttataaatggcctggcgtgttgtagctatcgaaaatcccgccaggctaagtttgcgcgacaaccagttggtaattgcgcaggagactgaggcaactttaccgattgaagatatcgactcgctcattctggacggctatggtattaccgcaaccacaaatctactcacagcactagcaaccaagggtacaacgactataatatgtgacgaaaagcacttaccagctagcgtacttctaccgtattcacaacattcgcgccaagccaaagtttcacgtcagcaactcgccataagtcagccgctcaagaagcaattgtggcagcaaattattatcagcaaaattaccaatcaagccgatgtcttgcggtcaatcggattagacgatgccgccttacgcacccatattagcgatgtcaaatcaggcgacactagtaatcgcgaatcaatcgctgctcgcatttattttgaccagttactcgacgacgccacacgccgcaaaccaatttggcataatgccgcactgaactatggctatgcaatggtgcgcagtcatatcgctcggcatattgccgcccgcgggctagtcgcttcacaggggatttttcaccacaacgagctcaacagctttaacctagccgacgacttgattgagccgtaccgcgccgctgttgatttatacatcttagaaaaagttgcgccacttcatgtcggcgaccgcgacaccagcctcaccaagcacgattgccaacttattattgacatattaaattattatgttataatgaatggcaagaagtttactataaaacatgcgattgagcgaacagttgaaagctttatcgaatgtatcgaggtaaaggaggcgcgtaagcttcttttaccaaaaatcgcctcctaacagggaagggatgtcatataaaatcatgagggtcgcagtatttttcgatttgccgaccaatactaaagctgagcgtagagccgccacgcaatttcgtaagttcttgctggatgacggctttgatatgctgcaatatagcgtatacacgagactgtgcccaaaccgcgacgttgccgagaagcacatgatgcgcgtcaaacgccacgcaccaaatagcggatcagtacgattattatatttgaccgaacatcaattcacgcacatgtacgttattgtcggcgagaaaactgtccaggaaaaggccattcccgtcggccagctagcatttttctaaccaaaaatccccctcgtaacagagggggatttgaggaagtattataccaatatctaaattgttagggaactataacagcgcgataaacgcgtttaccatttttcatattataccaatatctaaattgttagggaactataactagggacacattatgtgcgtttactactgtattataccaatatctaaattgttagggaactataaccctagttctaccactataattcgtctctcgattataccaatatctaaattgttagggaactataacatttttcagcttcttctttggttttgtaatattataccaatatctaaattgttagggaactataacatttttcagcttcttctttggttttgtaatattataccaatatctaaattgttagggaactataactaatactacaaaatgctattgacaggtttaattataccaatatctaaattgttagggaactataactgttggcgcccaccatatattcgccgttacattataccaatatctaaattgttagggaactataactggtgcaggtgctgtccagtggcaagacatattataccaatatctaaattgttagggaactataacgttcgtccatggtcttctcgagcgccctgtattataccaatatctaaattgttagggaactataactcataacagtcattaatataatctggctttattataccaatatctaaattgttagggaactataactatttccgataattatatgtattttcttgaattataccaatatctaaattgttagggaactataactcactgagagtctttattttaggtgtattaattatctcgtccattacgatactctataactaagtcaattatctgttcaaaacttaaggatcggatagccttgtctttctcgtttttggtacgtccatctaccatttcaagtaagtcttggtacgcacccttaagaaacttggcagcctgttcctgttcatccatagtcaactcactaactggtttgagtaaaatatccttaatattcatattctctcctcttatatattatatagggaaactaattaaaagtcagatctaacgtagattatactaatttaggcaactatcataaaatatattaaatataacttgattttcgtaatttgatattatttgataaacaaatcactggtctggttgcttaataatacagttggattgttgatagataactcgctgataattttacaaatcactacgactacttaaatagattaacatgagtttctgcattattttataaggtagtggctatctttaatttaaataatatacgctatactcataatatgacttgtgatgtctcgtttaagatagcaaagcttgccgagggcaacgaatcctacgctgcctttaatcagcgtatcgttaataccaagatgccagtcatcggtgtgcgtgtaccagatttgcggcggttggcgagggaattggcgcctgatatgagcgcggcggacattagcaaattactaacagtacagaacgaatcgtttgagtatgtgctgctgtgcgggctgttgattacacacgctcggcttgatgatcaaacggcgattgacctaaccaagcaatatttgccgctcgttgattcgtgggcgcacattgatgtatttgtcgagaaaaagcggcgttttgctagcgaagtgtggtggaactttgcgctggaatgcttgcagagtgaagctgagttcacggtgcgctacggcgtggtttctttgatgactaattttttggatgaattgcatattgatcaagtttttgccgtgctgcgaaaagttacaagcgacggatactatgtcaaaatggcgctggcctggctgtatgcgacggcggcggtacacttctttgagctgacgctggcggaattagaaaacgagcatatcgacgcttggacgcgcaacaaagcctatcaaaaaatgcgcgaatcgcggcgatttacgcctaggcagcaacagattataataaaaaacaagcgagcgagtggttgatggccggggtaatggcgctcttatttattactgctatttttattacttttaaaattttccgcgttcataaattacgagaagccgaaaaatatcataatccaaaattcctcaaacacttgcaaaatattgatgagtttttagcgcaaaccgacggctttgatggttacataaactggaaaaatcgcgacgaaatcctgaaaaaatacgaaaaaactcataacttctttcagggaaaatctaagtattataaaaaggagccgcgtgttcgccaatttaacggtctttatgaaaactttgccgagttcattaaaagttacaaccagaaatatgtcgccgcgcagaaacaactcaaccgcgagttctttcgcgatattgaaggcaaatcgctggacgatcagcagcagcaagcgatcattaccgatgagtattccaacctaattatcgctggcgctggttctggtaaaacgctgacgattttaggaaaagtcaaatatctggtcgagaaaaagaatgttgatccagaaaaaatccttctactgtcttttactcgtaaaactgtcgaggagctaaatcagcggttgcgtaatttgggcctgaaaacgcaagcgacaacttttcataagctgggttatgattatattaagcattttcagaaaaagccgccggctgttgccaatgagaatttgctgcaccaaactatcgtgcaatttttgaaaaacgatattttacatcatgattctgcgcttaaatcgtttgtgcagtttatggcttgttatctgaatattcccgaggaaaatgatgcatttgattcgcttggcgagaagcttgatgttaaaaacggcatagattttgaaacgttaaagtcgaaatattatgccaatacttccggcagccggcggattagtaaaaacaaacttgacacgttttctggcgagcgcgttaaaagcgtcgaggagctaatgattgctaatttcttattcttaaacggcgtgaattatgaatatgaaaaaccgtatccgcacggcgatcatatgtatcggccggatttttatctgacggattatgatatttggctggagcatttcggtatcgataagcatgggcgcgccaaatggctatcggattttcaggaaaagcagtatttgaaatctatgcacaaaaaacgcgccaagcaccatctgtaccgaaccaaacttttagagacgtattcgtggtataatcgcgataatattttgctggataaactgcgggaaatgttggagaaatcgggtgttacctttcagccgctgagcgagcaggagatttatcataaaattatcaagcaggattcgtcgtttggcgcggagattattagcttaattactagttttatcaatttgagcaaatcgcggggactagccgccaatggtttgcgaaaatttatggaagacagcgaagccggcaaccaattcctgagcgctcggcggcagctgtttttagatttcgcgctgccgattattgagaagtatagcgctgttttatcagcgcgcggcgagattgattttaacgacatgattaatcaagctgctaatctggtgcggcaaaaaggtatcaccaaagcgtatgactatatcattatcgatgaatatcaggatatttcggcggctaggtttaagttgattacggaaattcgccagcgttcgggcgcgcggttggtttgcgtcggtgatgactggcagtcaatttatcgatttacgggaagcgatatttcgttgttcagtggttttggcaagtttgttggcgagcatgaaaaattattcattgaaaggacgtatcgtaattcgcagcagttgattgatatttccgccaaattcatccagcaaaatccgcagcagctggctaaaaatcccaagtctaccaaggaactggattgcccggtggagtttgcagcgcacgatcagaataatgccttttcggtgcttgtcgaacagattcgccagatcgttgccgaaggcggcgcagagcagcaggttctgctgttagggcggcatagttttgatctggactatgtgatttgccagagggatgacaagggaaaaattatcaaaaaccagctcagaaaagaagtgaaaaaatataacgaggctactggcgaattaaatatagttgggcttgaaggtgttaatattacatttattactgcgcataaatcaaaggggttggaggcggacaatgtgatcgttttgaatttgaaaaatgatttgtatggttttccaaataagctaaccgacgacccgataatattgctgttgctgagcgcgccggaggcttgccgtttcgccgaggaaagacgcttgttttacgtggcgcttaccagaacgaggaataaggtctatctattaacaccggaaaacgaatcgctgtttaccaaggagattaaacggtactccaattacctggtccaaggacattacggcgaatcggatttggttaattgtccgtggtgtaaaactggcaggctggtaattcgtaaaaatagccagatgggtaagaattttgttggctgttcgcattacccaaattgcaatcaatcgtataacaatattgaaattctcagcaagccgatattgtgtccggcttgccaaagcggctttttagtgcggtggcgcggcaggtatggtgaattcctgggctgcacgaattaccccgattgcaagcaaacattagacctgtataaagatttggatgttaaaaataagatataataagaatgaatggagggattatggctaaaccaaacattgcaataaaagacattgagtcggcgctgaaatttcggcgggcaatgaaaagttttgatgcgtcaaagaaaattaacaaagaggatattacactaatcctggaggcaattcgcttgacgccaacatcgtacggttttgagccatttaacgtcatcgtggcgcaagacgctgatttccgcaagaaacttgaaaaagccgctggcgttaacgccgctaaattcaccgctagccatttgctaatttttactgccaaaactggcgaagaattgacgcgaaaagacggtcatatcgatcatatgttacgtgatgttgcatatatgaacgctgttgtcagaactggctataaaactttctggaaaaagtgggcaaaaaacgatttccagattttcggcgataatgagaagttgcatcagtgggcggcgcgccaagcatacattgctttgggatttgccatgatgacagccgccgagcgggggattgattcgtgcgccatggaaggattctcgattgataaacttgcggaaatattggaagaaattaagttgattgaccgcgagaaagatctgccagtggtgatgctggctctgggctacggcaacaaagaaccgcacccgcaaaagatcggaagagcgtcgtgtaggga

SEQ ID NO: 1912 - DNA, 19003 bp, synthetic construct
  misc_feature 1..19003: note = Synthetic
  source 1..19003: mol_type = other DNA
aaaacataccaaataagacggttgtattatccgattttaccgatatagagaataggcttttgaagcaatctgttaatagtgtaaataggctaactttagtttatttaacgagatattcacttaaatcatctacccaatcacggctagtaaatccagttgaatgtagcttgtcaagcctcatgttgctacccaatggacgcggtgcaattccgtctttgccagcaaaatattcagccgtcgtcgtgttggtaacagtcaggtcgtcgcggcccgccagcttaaatattcgtctggtaatgtccgcccagctttccagtggtccgtcgttggtggcgttgtatgtgccgaacggcgcctctgttgacagtaaatgatcaataattctcactagttcgctggtgaaagttagacgcccaatctggtcatcaacaacagttggcgaaatatttttttccgccaatctcagcatggtgcggacgaaatttttaccttcaccaattacccaagtagtgcgtagtagataaaacctatcaagctgctcaacgagtagatctccagccgccttcgacgcgccataaacactcagcggactgaaatcttcactttcataatgcggttctttcgttccgtcaaatacgtaatcgctagaaatatgcaccaaagtcatgttgtgagtacggcaaactcgggttaggtttgcaacggctgaggcgttaaccttccaggctgctaggcgaccttctggtgtttctgcgccgtcaacattagtaaaggctgctgcgttcaaaactattgatattcctgaccaatcaaatgattcgactgattggcggtcagtgatatccatttcgtctatatcagcaaatttagcctctgggtattgatgacggagcgctcgtcctaattgaccgtttgctccgacgataaaaatgttatttgaattcatattaaacctccatagggattacgtttgcaagtagcgggtgagcggcgtccttttcggaaataatcgcttggtcttggctgataggccaatcaataccaagctccgggtcgaatagattgacaaaagtgtatttggcatctggcgaccagtgagcgtcaaccaggtaagtgtaggcgatattatcatcaagcgtttggtagccattagcgacgcctttgggtacgaaaattgccgtgccaggattgatttcgtgcgtgaaaaccgtgccgaagttgtcgcctttgcgcaaatcgcaccatgcaccaaagacgcggccattggcggtggagatgaacttattccacggctcggcgtgtaagcccctagtggcgccggctttgtcgttgaagctgatgttattctgcacgatgttaaatgaaggtagtcccagtgcttccattttttccttttgatagttttctttgaaccagccgcggttgtcgccatggaccggtaatttgacgacgaatagcccagggatgggggattcggtgacggttagttcgttgtagtcgtttggatcgaagttcatagattgtcctttcgccatagttgataataatgtagtcctgccagagtttggcaatcattaatttcaccgtctcgaatcaaatcgtcgatttcatcaagcgtgaaaaaccgcatatcactaaacacttcatcgctttgttcgcgctggccagtgaaacttagttcttgggccaggcaaacggccattttctccgtcagtaggccattacagacgtatgcttcgcctagtttctgccaagactgagcgatgatgccggtctcttcttcaagttcgcgctttgaggcttctagtagatcttcattgtcacccccgccgccaggcaattcccagccaaagctttgcgacggatagcgaaaaccgcgcactaaatacaagcgctcttggtcgtctaacactacaaccatacacgaatctcgcgactccatgtagccatagattccggtgatcccatctggactaacagtctggtcttcgtgaatggtaatccaaggattttggtagacgattttactgctgactttagtttttgacggcgtatcagtcatgattattgcccctgttttgcgtaggctgcctcaaccgcttctttttgggctttccaccaatcttcgtgttcgcggtaccaggcaatagtttgcagtaggccgtcgcgcatacccgtttgattgtcggtgtattcaggttgccagcccagttcacggcgcagtttactagaatccatggcgtagcgcatatcatggccagggcggtcattgacatgctcataccaatccttacctttgcccattagctcgcaaattagctcaatcaccatcttgttattgacgtggtcgttgtcggcgccgatgatgtaagtctcacctagctcgcctttttccaagatgaggtgaacggccgagttgtgatcatcaacgtgaatccagtcgcggacctgttcgccggtgccgtacagtttgggcttgatatcgctcaaaatattagtgatttggcgcggaataaacttttcgatgtgctggtatgggccgtagttgtttgaacaattggaaatcgtcgctttgatgccgaagctgcggacccaggcgcgcactagcatgtcgctagaagctttagtgctggagtagggactagacggattgtacggtgtgtcttcggtgaagcggtttgggtcgtcgagctctaaatcgccaaacacttcatcagtcgagatatgatgtagacgtttgccatgcttgcggacagcctcaagaatggtgtaggtgccgatgacattggtctcgacaaacggccacggattacgcaaagaattatcattatggctttcagcggcaaaatgcaccacaatgtcagtttcagcgactaatttatccatcaactcggcgtcgcaaatatcgccttctacgaaattgatctggtcagctactggctgtaaattggcgcggtttcccgcataagttaacttgtcgataacggtgatgtcatattctggcttgtgtttgacggtataatgcacaaaattcgagccaatgaatcccgcgcctcccgtgactagcatctttgtcatatttatattgtaacaaattaatatattaaaaatatatttttagtctgcaaatccatttggattatttgactgccacttccaactatcggcacaagcttgttctatagaataaacagtttgccagtcgagctctctcttggctttacttgcatctgcataagaagcggcaatatcacctggtcttctatctgttatttcataaggtattggctttcctgcagctttactaaatgcatcgattagctctaataccgagacacccttacctgaacacaaattataaattgcaacacctggcttactatggtttaaggctgctgtatgtcctgatgctaaatccatgacatgtatataatcgcgtacacccgtaccatctggagtatcgtaatcatttccaaatacaccaacctttgcgagtcttcctacggctacttgagcaatgtaaggtaaaagattatttggaataccatttggatcttcgccaattaaaccagatttgtgcgccccaactggattaaaataacgtagaatagtaacttcaaaatctgggttagctgcggctatatctgttaatatctgctcaatcataaattttgtccatccgtaaggattagtaatgccgacaccagcttgatcagattcagtaattggtaatttttttggtgttccacatactgttgccgagctagagaatacaattttattgacatcaaatttactcataacatcaaataaaactaaacttgattctagattatttgaatagtattttagaggttgttcaacggattcaccaactgctttaagtcctgcaaaatgaattacagcatcaggcttttccttttcaaagattttttctaacttagatctattacgaatatcagcttcgtaaaatggaatttctgttttagtaatttcattaagcctattaataacttcctttgatgaatttgagagattatcaacaatgactatatcatttccattctctataagctctattgcagtatgtgaacctatgtatccagttccaccagtaagtaaaatcttcataaaatgaatcctttctataatgtaattgtaactactattatataatgtaaatatgataaccgtaattatagctggtggcgctggtactagactgtggccactttcaacgccaaacaatccgaaacagcttttgactctaactagcgagcgaactatggttcagcaagcttatgatcgtgcctctagactaggggatacggtatatattgttactgaatctagtcatgcagataaactacgcgatcaacttccagaactccctagtgatgcctttttaatagaaccagggcgtcgaggcacggcacattgtattatttttgcacttgattatattgcacgccatcataaagccaatgaacccgttgcttttattcattccgatcataatgttcgtaatattaaaggctttaagcaatctttccaatcggcggctgctatatctcagcagaatgattcaatagcgctagttggtattgaacctactgcaccgtcaactggttttggatatattgaatgtggcgacttaatcgataaaagtaataatgcatatacggtaaaatcatttaaggagaaacctgattacgaaaccgctaaaaaatattttgcttctggtgattatttatggaacggcggatattttgttgggtcagttgatatttttgtaaaacaaatgcaacaatttgcacccactttgatggaagattacaataaattaagatccttatctcacttcgctagtgaggaatattacaaaacatatcttagtttcgatattcaagcaattgatacagtcttgatcgaaaagatgtcgaacttatttatgatttcggctagttttgattggatggatattggaaattttaaagatttatatgatgtccttataaaagatgaaaagggtaattattgcaaaggcgaaaatatttatattttagatactgatacagcttatgtccgtaatgaagagccagataagccagtcgcggttattggattagacaatattgttgtggttaatacgccgaacggtgttttagttgcaagaaaggatatagctgctaaaacaagtgaaattactaagatgttgaataaaaaaatttaaattaagatccatattgccatttaaaatgtagcgtgatatatttgaattacagtcccttaagtaaggattgtactaatatctaaattgttttaggtttctataataatttagcaacttagggcgacgattttgatcgtgcagctacggttgagaattctattgtgaatctaaagcaaagctctaatccgctcactcgttgggcggattatcttttgtctatgctcgttttgcttaagctttcaatcacagtgatttggttgtataatcatactcagttaagcacaaaaggaatctcacgcatggcacaaaaatcttcatatttaccgaaaaaatactcattggggctggacatcggcacctcgtcaatcggttgggcggtattagacctagacaaggaacgtattcacgatttgggggtgaggatttttgagcggccagaagatccgcaaaatggcgattcgctggctaaaccgcgacgcgacgcccgatcggctcgccgtcgcctaaaacgtcgtcgccagcgcctcaatcacctcaagcagttctttattgaccaaaatattctcactaaatatcgagtcgaggaagttctagattacaagtctgatttcaacaaattagacgtgtatgatctgcgagcaaaagctctcaccgaggagctatcacccgaagaattgctcaaagttttgtatcaaattaccaaacgacgcggctttaaatcaaaccgcaaggtcgtagaagagtcagacaaagaaggtggtcgtgtcactagcgccctcaaaactaacgagaaattcctcgccgacaacaattatacgaccgtcggcgaagcgctaagtcgtgatgaaaaattcgctttgcataagcgcaataaacgcgacgactataccaatagttttgcgcgcgatgactttttgcgcgaactagaggccattattaaaactcagcaaaattatatcctgaaaaatgtccccgaaccagctattaatgaattgatctacggcattgacgatggacaagtcaccaatgtcagcgccatcatgtaccagtgtccatttatgaccaaagaactaatcgaaaagatggtcggtaagtgtacttttgaagatggtgagaagagagcgccaaaagccagctatagtttcgaagtatttcgcctggcaagcgatttatcgcacctcgttttcattcctcgtgatgccagcaaacgccaagctaagcgcgagaatctagaagtagggctatctccggaacaaattaaacaagttattgagttggccaaaagccaaaagagcttaacatacaaaaaagtacgcagcaccgcaggaattagcgaagattacgtgccaaaagatgtgcgtggcaagaaaaaagatggtgatgaattcggcgaggaaaacgtcttcggtgggctcaaagcctacaatgatattaggcttgcgctaaaagatctactagaagattgggtaaaaattgataatgaatcagcaatcaaccaaatcgcctatatcctcacgacacaaaaagccgacgaaggtattcgtgatgaattaaatctattaccgatttccgacaaagccaaagaggcgattgtcaaaattaagccaactaatttcaaagcatttggtcatttatcgatcaaagctctacaaaaaatcacgccacatattctcgaaggtatgacttacgacaaagcctgcgaggcggccggttacgacttcaaaaagcaatctgccagcctagagcaaattaccaaccctgtcgtcaaacgcgccatcacacagaccctgaaggtcgttcgtgctattgagcgtaaatacggtaagccatatttcatcaaagtcgaaaccgcccgtgatttggcgaaaaattttaaggaccgcaatgcgattaaaaaagaaaacgaagaaaatcaaggatataacgaagacattaaatcaataattacagacgggtacgaggcatcgcctaaaaccaagggcggtaaacagctccttagtcatcttaaagaatttaacgtacgattgaataaaaatgccgattttaatggccagcagattattaaggtcaagctctaccgcgagcaaaactgtgtctgtctatattctggaaaacctatcgattttgagacgatgctacatgacgataatgcctatcaggttgaccatattataccgttttcacgttccaataacgatggaatgacgaacaaagttctggtgttaactgaggaaaatcaaaagaagggtaatcaaacgccatttgaatattttggcgcagacgaaaaacgctggaaagagtttatggctcgagtagagtcaacatacaaaacacgcgacgtcaaaacttctgacaaggctacaaacgccatcaactacaaatataatggctacgccatgaaaaagaagcaaaatctattgcttcaagactacaaaaatgacagctggaatgtacgagccctcaacgatacacggtacattacgcggtttatccaaaattatctacgccagaatgttgactttgccgaaggcgaagaaaaacagcgcgtcatcgcgccgaatggcacaacaacagcatatttgcgtaaacgctggggattagccaaagatcgcgccgaagatgtactacatcacgccaaggacgcggcagttgtggcggcaatcgatcagaagattgtcatgcaagctaacttgtacgccaaacgccacgaaatcaaagcactgctcgcggcgaccaaaacaatggaagaaaaaaccgacaagctcactggcgaaatcaccgatgaagacgagttcgacaaagcacagcaacgtaaagccgccatccttgtattgtcatctaaacatttccctcaaccatgggataactttggcaaggaagttatgaagcgcaccctcaacactgatatcgccacattacaaaatgagctacgtgggcttgataattacgatgaagatttccgcctaagtataaagccgatcttcgtctcaagagagattagacacaaaatacgaggagaagcacatgagtcaaaattgcgatctaaccgaaatcgtaacggacaaaacatcatacgaattccgctaactgagctaaccctacaaagactagaaaattctcttgcaaaagaagagtttgatagtcagaaaaatagcaatggatctagtttatacgaaaaactactagctcgacttaatgagtgtaacggagatgcaaaaaaggcttttaatcctccatttaagctgtacaaaggtccaaaacaggacaaaaatggtaatcccatttcacctgtagccgcagttaaagtatatgacaagaagggcgtggtttctgttggccgtaaggcaaatgcgccagtcgcccttgctgagatggttcgtattcgcgtatataaaaaagataaccaaatatatatgatacccgactatcgcataaacatactagaaaataaagagacaatggaactcctaaaaccgttaaagaaagtatcaaaaatcgacaatagttttaactttatcggttatttgtacaagggcgatctaataacaatacaaaaagacaaccaaacttttgttgggtattttgttcaatttgaaggcgacaatcgcataacaatcaagaaccacttagccgtagacagctctagggattcaaaatctacagtaaaacgagaatcgctgtctggcattaattatctaaagatacataaagtagatgtgttaggagacgtgaattttagcgagggtattgtatggcctggcgcgtcgtagctatcgaaaaccctgccagactcagtctgcgggataatcaattggtaatcgcgcaagatgtcgaagcgacactaccaattgaagacctagacacgcttgtcctggacagttatggcataaccacgaccgcaaacttactaacagcactcgctaccaagagcacaacaactgttatctgcgacgagaaacatctgccagccagcgtgcttttgccgtattcacagcactcgcgccaggctaaagtttcgcgacagcaacttgctatgagccagccgctcaagaagcaattatggcagcacgttgttgaacaaaaaattgtcaatcaggctgacgttttgcgaatggttgggctagatgatatgtctatccgcaagcacgcaagcgacgtcaaatcaggcgacaccagcaaccgcgaatcaatcgctgctcgcatttattttgaccagttactcgacgacgccacacgccgcaaaccaatttggcacaatgccgcacttaactatggctacgcgatagtacgcagtcatattgctcggcatatcgctgctcgtgggctagtcgcttcacaggggatttttcaccacaacgagcttaatagttttaatttagctgacgacttgatagagccctatcgtgctgccgttgacttatatgtcctagaaaaagtcgccccacttcatgttggcgaccgtgacgccagtctcaccaaacatgatcgacagcttatcattgacatattaaattattatgttataatgagtgataagaagtttatgataaagcatgcggttgagcgaacagttgagagctttatcgaatgtatcgaggtaaaggaggtgcgtaagcttcttttgccaaaaatcgcctcctaacagggaagggatgtcatataaaatcatgagggtcgcggtatttttcgatttgccgaccaacactaaagctgagcgcaaagccgctacacaatttcgcaaatttttgctggacgacggctttgacatgctgcaatatagcgtatacacgagactgtgtccaaaccgcgacgttgccgagaagcacatgatacgcgtcaaacgtcacgcaccagatagcggatcagtgcgattactgtacttaaccgaacatcaattcacgcacatgtacgttattgtcggcgagaaaactgtccaggaaaagatcattcccgtcggccagctagcatttttctaaccaaaaatccccctcataacagagggggatttgaggaagtattataccaatatctaaattgttagggaactataacatgacgccagccgaactaatcgctaaattaattataccaatatctaaattgttagggaactataactgctcggtctcgatgaatgtcgccttgttgattataccaatatctaaattgttagggaactataactacaatcgcttgcaccagctcatcggacagattataccaatatctaaattgttagggaactataacccaagaccattatccacaacagcatgcagcattataccaatatctaaattgttagggaactataacttctctctcttctcttgtttgctttaggggattataccaatatctaaattgttagggaactataactgtgccacgtcttgcaagaaaatatcacggattataccaatatctaaattgttagggaactataactacgacaaaatgatttcgagtttagaaataattataccaatatctaaattgttagggaactataactccactattcttattatagcatatctgttaattataccaatatctaaattgttagggaactataacaagttcgatatactaaatacagttaaatgaattataccaatatctaaattgttagggaactataacatacgccgaactttaccaacaacggaatcgattataccaatatctaaattgttagggaactataacgagaacccgcgctacctaagagccacaacaattataccaatatctaaattgttagggaactataacttacatttatctggttgtggccgagaagcaattataccaatatctaaattgttagggaactataacaagccgacggcgttccagcaacctctttaaattataccaatatctaaattgttagggaactataacgccaaaaattattaaccaaactacaaatcaattataccaatatctaaattgttagggaactaagctcatcttaacattaaaaatccactgaatctcggcgattttaacagtaaagaatctctggctgagcatttaaggatatcgccagatattttatctgattctggtggctttatacatccaacaacctctcacacaagcagcttctcatctgccttaaggtatgcaggatatgatggtgttatcattccacacacaaccaaagggtgcacgtggtaatgagatagtagctctagatccagaacagattaaatatatcgataacctcaatccaacagatagtccagatatgaggtttaaatataatagtacagtacgtacaggactagaagagatccaacaatcaagcgaactcctagcacgccatctgcgactaacaggtgacgagcgccttgtattcaatgagtggcagaacgaaatgcaaagaaaagccctcggctattacgatccaaagaccgacaaaatagacctgaacaggctgtctgaagacaccctgaaccacgaactgggacacaaactcttggagcgagcagacaacaaacaggaactcttaaccgccatccgccgattttacggagataactacctcattaacaagtacgggcagcaatacggtactactgacattaacctgctagcagaagagcaattagctgatggattcagtgaatattacaacggcaaactaagcggcgagaatacccagcgcctggctgctcgcctacacatcccgcagcgcattgtcgctatctacgaccgcattaccgaagccattcgaggacttattggtaagcaggatatcatcaagcagttttacgcccaaatggaaacagggaaattcagaaacacccagcagcaagtacctggcggtgatgggcgagtgaggacgatgagccttgattctgaggtaagtgaacgggcgcttaggtcttttaattctgttaagcgaggcaagcaagttaaatccatagttggtcaattgtccaaaaacggagctagaaaagtagcagcagtattacaatctacagacttcaaccaaaatgcacggctagtaatcgataagaatgcagtaaaccacttaagaaatagtggacaccttacaggaatgggcaggaatgggaaagatgtcaacccgctaacggaggcagacattagagcattacctcatgtattttcagaccccgatgttgtatatatgtcgggtactggcaggactggcaagcgtatggtgtttgagcggcagctggacaatcatcatcgtattgttgctaaacttgaatatagcggtaaagattttaatctggtaacgtacttcaacataaacaaagacctgccaaacgacaagcctgctatgccttattccccagagggggctgttgctgcggatgaatccggccgacaaccttcacgtcctggacggttctctggcgacccagacaacgggttcaatggtagcgcgtagcaaacaatacccaaaatgtcaataacgacctacgcttcaagcactctctccaagaccaaatagacgatatccaagataatcctaaaccaagaatgaccaacgagctgcgtcaagctatagacgaggaaatatacaactactacccagagctattcgtgaatgaagccgccgacctccaaagtaccaacggcgattggaatatacctcgtctgcatgtagatgacttaaagcactatttaggagaattagccaacgatataccatcaatgggctatgacgatatcgacagcttcatcaatgagatacatcgagtgctagaggctcgccgtaatgtacgtgctggtaaacaacgactagcagagctgcgtcgagacccagatactgccattgcaaagactaaaatcagacggaaaagctggcaaagatatgtcaccccaacaagaactagccctacctatctgtattttgtccagcaatcaacaggtttagaacaaatgtagaacattttaatgattcgctcaaaagactcaaatgcaaaaggtttggatttttgtagatataagtcgttacgataaatatatatacatagtaaaatctaataaaataaacttaagaaaaactagcataaagatggcaaaatacaaacaaatacgtacacaaagacaaaatctcatacatacataaaaggaggggtgaatataaaatagctaaaagttgtaaaacaataaatcttcgagattaatcaaaaacagtagtaaaagggatgcaatctcattcatgttttacacatagacttaacgtcgcacaatgtccgttttacgtcttataatctatgttgtcaggatgattaatcatacgttcgcaaatagcggttttacttgatacaagccgcagcttattaatcttggtctaaaatggggagccttaaccacgctactagagtcatcttttacttttacttttacttttacttttcattcgctatataaaaataccgccaaccagcagctctatagatataagtccacacactcgaaacaaactcgaaatttaaattgtagtaattagcacatgtttatagacttaagttatccacagaaaaaatctcagcgctacgagaataaatttgcattttttcaaaaatattgtcccctactacttttcccgcctcacctgctttatttgactttttgcattttcaatattttaatatagtttttcacctagcctatttagctgtttaatagaacaaaagtagaacatggcccaccggtgcaggggcagcctactacctaaggcctcttcctcatttataaaaagctcgcctactcacccgcacatcaatatactctgcagccgctcctctgttcgttaaatagcggatggcacgcaccgcgtcttcgacttggccagccgctgggcgatcaactgtcattttaatcgagtaccccaccccgtcgagactgactagcacctggcgagtagtactagctggcagaatcatcttattaacagtaagattgttttctttgaaatatcccacaaccttgccgataaactgcaggaaacggccgctaattactgaattgccaacgcttgcacgaattccagtttgatcctcgacggcgataactgacgtgccaaggatattacgttcaaatactacacctgtactatcaacataagctttcatattaccagactgccaataaaccactggcgagcgcaagttaaccgaaaaatcggccgaccagagagcgcctttagctggcggcgacacgctagacacttctgggtatctactttgaatggctcggctaagattattagcattgatatttacagccagtcgctcgagcggattagcagagaggtaatcttgtatggccgctgcataatcgcgggcggcagtttgtacttctggatcgttactggtaccgacaatttgcactttcggctcgacaataatctgagtaagcagccaccccaaaccagcaattagcactaatgcgccaatcaacgctaagcggatagagcggcgtttgcgcttcagattgtgtgcctgtacgcgcggcgattgcaagctagccgattgctcattaggactaggcaccgaggaaatgagactgccagtcaaggtacgattacgccgaaataatgttcccacactaggcgagttatcatcaaccacagcacggcgccgcacaggctgtgcggcgcggcgtgatttagattttttcgatctcataccaaacatgcttgtggtattaattatatcattttgcagcgctatcagggttcgttcggcggctattagcagcatctagaatcatatcggccatatctttagcagcaccaggatgtgcaaacgacagaaaagcctgccccatttgctgtgcttctgcaggattgtcaataaggttttttatctcatcaacgagcaactgcggcgttttttccatttgcatttcgtcgatgactttgacagcacctttgtcttcatacaccttagcatttttaatttgatgaccgccagtcaaaaagccgttcggcaccagaatcgtcggtttggccagcgctgccaactcgagaattgtggtcgcaccagctcgtgctaccacaacatcagccgcaccaagcatatcaatcataccgtcgctaacgaaatcgtaaactttaacttgatctgtatcctcaggcaaccgccgtcgaatctcggcatactggccagtaccagttattaaaattacgctagtgaactgtgtaagttcgctaatagtatctgccacagcattattcaaccgttccgcacccaaaccgccgccagtaaccagcactaacggtctgttacttggaaatcctagtttttccttaaccacgcggcgctgttgctcgctgtacggcttaaatccctcgcggatcggtacgccaacgtaacgactaatcgccttggggtacggataatactctagcggagcgccagtgccaatacggtcagcccaacgtgccaatacgcgattagttaaccctggatgagcgtctgagtcgtgaattaccagcggaatacgcagtacatgcgccgccaagccgactggcatgcaaacgtagcctcctttcgtgaatatcacgtctggacgccaggcgattagtttcactaggctctgaacaaagcccacgcacacctttagcgcatcaacaaaatttggccacacaattgtccgtaagcgtagcagctgacgcacaatgctaagattatgatagcggcgtaatttaccgctagcaatgacatctacgcgcaccgagctatcaaagctagccataacattgcgcgcttgcttgctaaatttgcggtcaacccaaaaccgcagttctgcatctggctgctgttttttaacttctcgcaacacggcgacaactggagtaacgtgaccccccgagccgccgcctacggctaatatccgcatcttggcctcctatatctattggtttatgcgcagtatatcgcgataactggaaaacaatccccaaagccgcgcccgaaaacagcatactactaccgccagcactcaagaacggcaacgttatacctgttaacggcgctaaatgaatcattgatgcaatattcatgaagaagtgcgcaaataaccagccaaaaatacccgccactaccaatcgcctggtcatatctggcgagtattcagcaactcgcaaaacccgcagcaacaaagctgcaaacaacactactaccaataccgtcccggcaaaaccaaaaatctcgccaattacagcaaaaatcgaatcgttaattgcctctggcaagtagcctgtcgattgaatactcttgccgataccgcggccagttaacccgcctgtccccaacgcaatcattgcgtttttgatatgataatcgttatcgtcttgcgaagctgatttacccgctccgaaaaacgtcgtaatccgttccaaccggtgcggcgccgttactgccgtgagccccaaaaatagcaagcccactagtgcaatttgcatcagagttttcattcttatcgtactcaccataaatatcgacgccgcagccgccgctatcgccacccccgagcccatatctttttgcaacactacgacaataaataacaaaaagccgaccaacgccgctgctgggtagaccgtttctttcaagtcgtttatcttaccctcttggtagcgtttacctaaaaacaccgccatatacaaagtcattgctaattttagcagctcggacggctgaaaattaactggccccaagtgaaaccagcgataagcgcctagcgtattttgcgctattgcatcaacatgcagaatatttccaatcaaaaagagcaaaaacgataagccaatcccaatcatcattaactgaaaaatatacttcttgagataatcaaacggtaccaatattaacagtacaaaaccactaactgccaggctaatacccataagctgtttgaaaaagaaatatgtactagaataatcgctgccataagcactattctgcaaattagcatactgcggcccgaccgaataaacaattatcattcctaccagcatcaacaacgccgcacataacaccaaccaataatcaggccggtgtttacgctggattttaccatcggtaaattgtacgtacctgtcgcggtgccgagcgccaatcacggagcaatatgccccccggtcatcgccatcgctatccccataaacgccgccacgccagcaatcacccaaaaacgcatcgtcactttagcctctggccagcctgatgcctccagatgatgatgaatcggcgccgacaggaatatcttgcgatggaataatttcttgctggtcatctgcaacaagctcgacccagcctcgaccacgaacaatatgccgataatcggcagcaaaaacagcgtgttggtcatcatcgctaccacacccaagctcgtcccaaaagcaaagctgccaacgtcgcccataaagaaccgcgctggaaagatattgaaccacagatagctcagcaacgcgccgaccactgtgaagcagaacgccgctaatttcaaatggccttgcagtagcgcaatcacaccaaatgccgaaaatgacattaccagcaaaccgcccgccaaaccgtccagaccgtcacttatattgaccgcgttacccgtcgctaccaccgcaaacacaaacaatccgacaatccacgcgcccatttgccaatcgccaacgtatggtatatgcaccgacgagtagccgagcttacagaagaaaaaccagcccagcaccagcccgacgccgataatcatggcaaatttcacccagctgcgcaagccagcatccttgcgattagagccaaaaacattcaaaatatcatcaatcaaaccaatcgccgcgccgccaaccaaagccgccaatggcagccaagtttgcgctcgatccagattaaaggccagtgtcaccgccacaatcgccactacggcaattattcccgccatcgtcggaatatgccgctcgattttcttcttatgtaataagttaaaaatcttgagtttttcgccagttaccgctgctgtacgctgtgttttccagaatttatatttgtaagcaaaatatgtatatactggcgttagcagcatcgccagtagaaacgccatcaagctcattagaaaaactgagttcaattcgtttccaaaagttacaatcgacatattaccattatactccctaccctactctctcggggctaattttaagtattttatcatccagttggatatctcgttaaaaatcggcttagcatccgagccgccgcccataccgcggccatctgccgctatctctaccatgataacgtaacgtggaattttaccgtattcgccgccaaaacccagataggtaccaatcgtctcgttatcatcgtacttgccgttaacaatcacctgcgaagtaccggtcttgccgccgactagccagcgttctgagtcgtcatgcggcttatatgtcgcataatgagcttgatgcaccatttcgcgtactgtctgcgacgaggcctcactgatagcacgagcgctggtcttcgccgccgtagcagcgaacttaccgccatcacccatcgtgccgttaataatcgttggcgcgtgatatacgccgccattaactaccgaacaaaaaccgctcgccacttgcagcattgtcacattcataccctggccaaacaccatattactgtaacgcacagcattaccttcttgctgtgctggcgagataactgtgccgcccgcctcattcgctagctcaataccagtcagctgccccagccggaaacg

SEQ ID NO: 1913 - DNA, 18542 bp, synthetic construct
  source 1..18542: mol_type = other DNA
  misc_feature 1..18542: note = Synthetic
aaattcgacttgattttgtcaatttgctccgcactaaggccactttcatcttgcgagctagaaaatacaaaagtagggatcttttgtcttgctatccgcccaagccaactgctaaagtcatcaactttaccccgttccttcacccgctcaaagccggtgttgtcaatcgcaatatcgcccgctcgatctaacgcctgagacagctcggtaaaatccgtgcaaatatcggccgcgctcaaactcaaaatcggcgaaaatagtagtatcgattggcaatacttaaggccagagatatcaacctgacgaataacccaagtagaaaaggagtaggctacgataaagtagggtcttttcttttgttcgagccgctcaagctcgccttctatatcaataattgcctgatgcgggctaaatgtaccttgatctttacgatcataggtgccggtgtaagtgaaccagctcacggcgacttcaaacttctttatgtcgctcagtagctggtagtctttttgaggcccaggcagccccggcaaaaatagacaggttatcttatcatccatacattgactccggtctatccctcagtttaatgacttcaggcctatccactaaaactgcgccgaagagtccgttttgccctacgtggcttactagctttttgcgtgtatcaataacccctctccacaaatcagttgctagccatttcaaatgactgaccccacccaactgtctagccgccaaaaagggcatggctcgctcaacagccaactcaaagcctggcctattttgtgacggcgcagctagaacgatatttggacacgaatttgattccattaaagctattacattggatttaatcttgaaaagtcaagcccggcctactgcaatcgatcataccgccgcccacaacaaccgcggcaagcccttctagcacaccaacccgtagctactggtcgcggtacttttcgtaaaacttgcgcggatttttaataagttcttggttgagcttgggcggaggatcagcctttggcgccgcaaaatcgccatgacgtacatccaccaaaaactcaccctcaatcgtccggcggccgattaaaatcggatacttgtgcccagagcgatcggatagattaaacagcgctcgaatcgtctttccgccgatacgaatcggtatacggatatggtagcgcaccgccttatgaccagacgtactcttcacgatagcagccgaatagtccgtgcacttgataatgttgccgttgtagtacggcgaccctttgccaaaaagcgaaaacaccaaaacgccttcctcgtctatgtggacgttacttgcccacaccgaggagttgtcggcgccagtgtctatcttggccggcacgccaacagcatactcgccaaaatcaacccgagcactccgaccaattaccggtaaatcattctttgtcattacacaaactccgcgttaaatgcttgttggataaaccctatcgaccgctcgatattatcgtttacaatcacaaccactacgtcgcccggacgcgctagctccgctgccttttggatggcctggtcttccctgacaattcgctcgacacgcggattttttgaccgtagcgcagtcgcgaatacgtctgacacataccccgccttctgcggaaacctcaggtttttggcctgggtaggcttgcgccaatagccgtcaatcttgtcatagacaacaaactgatcatacgcatctgctatggcatgcgccgtatcctggatcagctggtcagtcctatcatgcgcgagacgcaccacgccgattacccgtccgtctttgctcgtcatggtgcgcgccaactcgccaactcgccccagcgacactttctcgtgtgcataatctgccagcatagtgatattgtctcggtttttaagcagcgtcaggcggccgccgtaccgatcaagccgcacgccttccagaacctcgcgaatagtttcgggcaaacgcccgtcaaaatatccatacagtgcgccagccgcagccagcagattgtacaccgacggcacaaacgacccgccaaatgcccaagggatagccgccgcgtccgccagtaccgccgtctcgctgccctgctttagcacgatataacgaccagtactatctactgtaatcgctgcgccgccctcgcgcagatgactgtctatatcaaaatgcgaaaaggtaaccccaaccgggagcttattcacgccgcgaggaatcgcaccaacggctttggccacaaactcatcatcggcattgaacaccgcccaaccgtctgcccgaatccacctaaagacaaagtcttttgcttgcacgatatcgtctttgctcttgatcctggggctggtaccgatgtggtcctcaaacacgttcagaaacacaccgactttgtgcctcagatagcccaaaccagatccagaactactgcctagcgctgcctctagcacggcgacgccattttgcttgagttcagggttggcgtgaaactcccacaagtagcggccaggacacgccgttggcatcagatgccatgttcgcctagagtcctgtagagtactccgccgttcgccattcacaaaatgaccagttgtatcaaccttgagcgtattctgccccaagcggcgcagcacatcctcgacagcatgaacaactgtagtcttgcctttggtgccagtgactgtgatgatcgatgaaaacatgttcataactataaatagggcgctttattgtaaaacattatgaagtttttggcaaactactccacactgctacagcatatgcagactcggaacgtacatattgtacgatagcttagatgttttccttggccgagaggagcagcctcgccaccgtccagacctcaggcaagcggcccctcaaagggcggattgacaccagcaagcctatcaagatctgcgtgatactgctgcttagtctcttccgtaagcccatcgacgccgcaagcgtgaccaagtgcgcccacaactagcgcagtggcggccaaggttggtgccgcgtcacctaccttgggcaccggcaagccctccttgaccgtagacgcccccagatacgcaccagcgaataagacagggttggtaaggtaaacttggccggttgctaaaatcccctgaatcgcctgccgcgacgtttgaacacccagccttaccgactcaccgggcgcaccggcggaaacattgtatgctcggccatcttcagtaacaaccacgctctttgacgactccgcaaactccctaatggcttggttgcactgacgcttgcgccagctgtccgtgcccaatgccacccccgcactagcaacaatagtgccagccaatggcagtagaaggtcttgatgttcggcttcggggttcagccccataaacgtcccgagccctagcgccgccccagctgcaaaacgctgtaagcgccgcgaagcattgagcgcgccgtccactctgtctctagcctcggcgaggccaacctctggattggttctattcataaaccacgactctaccacaagtgtagccgctcgtccaccaacacgcccatacgctgcctgtctacacgccaatacccggcataaaaccgacgcaagtctagtgccgcgctatcgggtcagcacattgtcttctcgccgggaacaacgccagcgcggctaaagatgcgaattcgcaaaaagtgccaatgccagcgagacgcccaggccaaaaccggcgcgtagcaggtcgtttttgacaaggcgtagtgttcttgagtatggctgatctttatggatagttgccctcagggcgatttcacggccggcgagcagacccagaaacacccatgtcgtgctcatcggcagatgattcagccatttgaaatacaccagtatcaccgcgtagacaaaatcaatcgccgttgccgatttgacatagagcgtgtcggttttttcggtgatgacatcttggatctctccgccgcgtcgatacagcgtaaaaccgatcatactgaccataaataccagcacgatcagcagctgctcaaagctgatctctctgggcaaaaataccgccgcattggcgttgtcctgcgccagccaggccgaccacaaaaacccggtcgatagccactgaaatactcgccaacgccgctcctgccgcttggttagtttgcgctcgatttttgtacgatttctgttgacgatatagccgatacaaccccaaacaacaaacgccaatacaaacgccagcacatagccaaaaaacgttttttcaagcataccctgaatcgttttcgacgagctaaacgtcgccaaaatcaaaaacgtcgtgctgaccggaaacttgtatttggtcagcacgatcagcacaactggcgccaaaatctgcaaaaacgaaaactgctgcggctgcggaattgcgctcagcctatggaaactaatgtcgccattataagtcagccagccataggtgacagtcactaccatgatgccgccaataaacagccagagcagccgccaatcgacctttctgttcgacgacaagaatgtgccgagcgtctgaatgctatcgttcgacactgcggcgtagccagcaacagcaaagccaaaccacatcgccaaatgaggatggtcaaaaaaaatccccgccagagctgcgaggaaaacgataattatatagaacgtcgtgttaccgctcagatagatacgattgcgtcgttccatatgccccgatatgtattataagcacttttgcgtccgtatcaactatttggcactttccgccccccagcctaaattcgccgacgacaaacatataaggccgcattaagcgctacagcgtcgtatgtgcgcccctgcacaaaccttactattatctccgccgggcagaaatagttttactccttagcaacccaccgcctcgtacacaagccccgggcgttctgtccccacacacaaagaacacactgcaaaactggaatattgattttcgcgctccaaaagactactatgtctaggcagctccttaagtaagagttgtacaactatccgaattgttttaggtttctataataatagttttctatgatgttagaaatactaaagcaaagctctgatccgctcggttcgtccaagcggatcatctttttgacggcaaggtttcggtatccaaaaaactatcatatactctactcatgaagagtatgaaatattcactgggcctggatatcggcacagcctctattggttgggcggtgatcgacctagaaaaacaacgcattcacgaccttggcgtacgcatctttgaaaaaccagaaaaccccaaggatggcgactcattagccaaaccacgccgcgatgctcgttcagctcgacgtcggctacatcgccgacgtcaccgtctaaacaatctaaagcagttcttcgtccaacaaaagatattgtccgatccccagattaaggacgttcttgacccacgctcaaagttcaactctgttgatgtgtataagctacgctccgaggcgctcacgcgcgaactaacgccagaagaattatttaaggttctgtatcatatcggcaagcgtcgaggctataaaagcaatcgcaaggcggacgaggagtccgaccctgaaggcgggcgggtcataaaagcccttagtatcaaccaacagctactagctgacaacaaataccaaacagttggtcaggcgctagcccaagacaaggcctaccaaacacacaaacgcaacaagcgcgacagctacaccaacagctttgcccgagccgactttttgcatgagctagaagagatcgttaaagcccaaaaacaatacgcgctacatgacgtcagccagcagtctatcagggagttaatctacggggttaatgataacggcgagctaaccgaaattaacgccattatgtaccagcgaccattcatgacagaagagctgatcaaaaaaatggtcggcgaatgcacgtttgagacaggcgagaagcgcgcaccgaaagccagccacagctttgaggtgtttcgtttcgcggtcgacctatccaaccttgtttttatccctaaaagtgccaccaaacaccacgcacgcaaacaaggcctacgcgtacagctcaacgaacaacaaatccaagacgtcataaacgaggccaaaaaagtcagaaaaatcacctacaaaaaagttcgtaacgtggcaggactcgacgaggagtacacacccgaatacgtgcgcggcaaagttagttcggaagatccctatggcgaaaacaacgcatttggtagcctggaagcctaccatgacatccgggccgccctaaaggatcttccagatgactggcaaaaagttgacaacgaggacacactaaaccaaatcgcttacatcctgactgtccaacgcgccgacgatgccatcaaaaagtcgctcgaaccgctgccgatttccgacgcagccaagaaagctctactcaaaatcaagcccaaaaacttcagaacgtttggccacctctcaatcaaagcgctgcaaaaaatcaccccccatattctcgctggcaaaacctatgacaaagcgtgcgaagcagcaggctacgattttcgcaaaaaagccgccgacctgagtcaaataaccaaccctgtggttaagcgcgcaatctcgcaaaccaacaaagtcgtccgggctatcattcgcaagtacggtaagccatactatatcagggtcgaaaccgcccgcgacttagccaaaagctataaagatcgccaaactatcgaggccgaaaacaaagaaaatcaagccaacaatgagcttgtcgtagaaagactcaaagagctcgggtgtattacgccgaccgggctacaggttattaaacttaaactatacgacgaacaaaacggcaagtgtctctactctggcaaaccaatcgacctcactactatgcttgccgacgacaatgcgtaccagattgaccacatcgtgccattttcacgctccaacaacgacggcctaaccaacaaagcacttgtgctgaccgcagagaaccagaacaaagccgaccgcaccccatatgagtactttgggtatgacgagcagcgctggcgagcatactgtgctcaagtcgaagcaacatacaaaactcgtgatatcaaagccgcccagggcaaagacaaagcaatagcctacaaacaaaacggctacgcaatgcgcaaaaagcaaaacttactaattcaggaatacaaaaacgatagctggaatgtcagagcactgaacgatacgcgctatataactagatttgtacaaaactatctcagacaaactgtcgactttgccgatggcgatgagaaacaacgcgtttttgcgcccaacggtactctaaccagctacctccgtaagcgctgggggctgtccaaaaacagagaagaagacgtcttgcatcacgccaaagacgcggccgtcgtagctgcaattgaccagcccgtcattctccgcgcaaatctatacgccaaaaaaggagaaatcaccaactacttgcttgccgttaagaccatggaggaaaaaaccgacaaactaactggagaaataaccgacgagagcggcttcaatcaagcacagcgccgcaaaaacgctttagaagtactatctgaagaccacttccctaaaccatggacagattttgacaaggaagtacgcaaacgcactctgcccaaggacacggcaactgtccagaatgagctaatcggcctcaaaaactacgatgatgcgtttcgcctgcaagtccagccgatatttgtttctcgcatgcctcgtcgaaaagcgacaggcaaagctcataaagaaaccatccgttcaccaaaagcaaaagacgacgatcaacgtactgtccgtatgccactaaacaaagtcaaaagcaaagacgtcgagaactccaccctaaaagaatccgacaaatggctatacaacactctcaaagaccgcttaaggcagcatggcgataaccccgaaaaagcctttgccgagccagtgtataaaaacagtaaaaaacaggacaaaaatggtcgaccattgtcgccagtatcgactatcaaagtctattcgactcaaccatccggtttttatatcaacgacaataaggcctttgtaaacaacggctcaatgacccgactagatgtttacaaaaaagccagcaagaagggcaagaccgagcacttctttgtgccagtttatgcccaccaagtcggcaagaaccgtccaaccccaaccgagatattacccaaaccaaaaggctttagtcatgttgatgaaacatttactaaagtttgttcgctgtatccaaacgactatattcgctgtatatttggcgacggaagagtagaggaaggctattacagaggatataacgttgcgaatggtcagatggacctgctgttccatgcagacgcaaatagcgacaatatcatgcgtaaaaataagaggtcagccatatctatagagcgcttcgacatctcaattttgggcgataacgctccgaggtcatagctatggcctggcgagtcatcggcattcaaaaccccgctagactaagcttgcgcgacaaacagctaatcatcgcccaagacgaggaggctagcctgccgatagaggacatcgacgctctggtgatcgacagttacggcgtcactacgaccgccaatttgctcaccgagctagcggccaggtcaacaaccgtgatagtctgcgacgacaagcacctacccgccagtgtgttgctgccatattctcagcattctcggcaagccaagatttcgcgccaacagcttgccatgagccaaccgctcaaaaaacagctatggcagactatcgtccgccaaaaaatcaccaaccaagctgccgttttggcatattttgggctagacagcgccccgctccaggactacgctacggaagtaagatctggcgactcgaccaaccgtgagtcaattgcagcgcgcgcctattttgaccagctcctgcacgacgccacacgacgcagaccaacctggcacaatgccgcccttaactacggctatgcaatggtgcgcagccatatcgcccgccatattgctgcgagaggcctagtagcctctcaaggtatacaccaccatagcgagctcaatagtttcaacttggcggacgacctattcgaaccctacagagcagcagtagataagtacacattagaaaaactggcgccgttgcacgtcggcgacagcgaccccaccctaaacaagcaagatcgacaactacttgttgacgtgcttaactatcatgtcataatacaacgtaagcgtttcacacttaggcttgccgttgggaaaacggtcgaaagcttcgtagatagcatttacaaaatggaggccggagcgatcttgctccccacaatcgaaacctcctaggggacgcaccagaaatgtcgtacaagctaatgagagtggccgtactgtttgacctaccaaccaataccaaggcagaacgacgtgcagccacgcagtttcgcaagttcttgcttgacgatggctttaccatgctgcagtacagcgtgtatacacgcctctgtcccaaccgcgataccgccgaaaaacacatgcaacgcgtcaagcgcaatactccagaggctggttctgtgcgcctcctgtatctaaccgaacaccaatttactcatatgctgatccttgtcggcgaaaaaacggtgcaagaacgcgcagctccatcacaacaactagtgtttttctagctcaaaacccctctcgcaacagagaggggttttggcaagtattatacaactatctgaattgttagggagctataaccaaacgctcgtaatcctaagattagcgatgattatacaactatctgaattgttagggagctataacttgtctgccgcggccttatttacgagctctattatacaactatctgaattgttagggagctataacctcagagagcacggtatagacgccctgataattatacaactatctgaattgttagggagctataacgcattcgcagtcgcagcaatggtgacgcggattatacaactatctgaattgttagggagctataacaagctggttacaacttaacactgattgcgcattatacaactatctgaattgttagggagctataacaagtcatcagcgatagctttaaacatatacattatacaactatctgaattgttagggagctataacaacgcaaaaggtgagtgcgtataaattcatattatacaactatctgaattgttagggagctataactaattgcttgtgctatattgatgacacgtaattatacaactatctgaattgttagggagctataacctggatgacgtgctttaccaaagtatagtgattatacaactatctgaattgttagggagctataaccctgggattcgtataaggacacagacgaatattatacaactatctgaattgttagggagctataacccagcaggcatcaaccagccaccttttgtcattatacaactatctgaattgttagggagctataactacgtgtcggccactatatcgacggcgacgattatacaactatctgaattgttagggagctataaccaccttgcctgtgttgtcgacgaccgactcattatacaactatctgaattgttagggagctataacacgcgtgttatcgtggcttcgctagggaacattatacaactatccgaattgttaggcgcacaccttaacgactggaagtacggcgcaaagcgacgacggcaactatcagcacggcacccagagctataaacagggctgacgaggagccggtgttggcgagggttgtgccgggcgcggctgtttgcggctgggcaggagtcgtaggcgttggggctgggtctggatctgggtcggtaggcggctgcgtgggcgtcgtgtcattattttgtatggtgtaagtaaggctagccagagtggccgcatcgcggtcggcatcgtcaacagccagcggcgcgccagaagcactgagtgaaaaaataatcgtttcatctggctccacgtcgctgtcgtcagtaaccgtcaagccgctcaacgccagcggtgcagcaacataaagaccggcggggatagtgatactggccggcgatgaaaaatcgtagtccaccccagcacttgcgctaccgctgagcgtgtcggtcagggtaaccgtcaggggctgtgttgcccggccgctaacgactagcgccggcaagccgttcgtcgattcggcctgcgctacggcagccgccgaaaactctacaaacacagctgactcgtacgtaccgctacgcggtgtaggcgtgcagtcagagtcaagatcagccggcgtatcggtgtctgtggcgctactgcggcaaaccgaaagatcggtcgttgcgccagcgccccagcccggaacggccgactcccacgcgatgaagtctaccgtcgcgccagttgcgactgggccgtcgcgcagcgtcaactgatcgcccgtattgttcagcagcaactgcccgcccccgccgggatccatttctatatccaccgtaacaccagggtgacgggtatgaaaatcgacctgatcattggtaaccaaagcataaccaccagcatcaatactaaacgacggaaacgtaaacgacgcgccagagccttcttggatagtccaaccagtgatgtctatcgaaaacggcgttggattgtatagctcgaaccactccgactcggcctcgttggtcgacaagtcatactcgacctctgtaataatgatgttgtcgccagcaggtgtcgcactagctggagtcgcaacgccaaacaacgacactaacagaccaattacagcaatatggcgtagcaccttcatagtcttagcataacccatatgataggccgtgtctatctgccgcggcgtctggcgtcgaacagccaagagtacgtccgataacatgccaataaaagcaacgctataggtagcgtgcccacaccacccatagcgtaggtacgctacatgtagcgtcgtccactcagactacgtagcaccttgccgaccactgctggcaccgctcccacgagccgcctttccaaacaacgacaacccgcgaacagcccgatcacgccccgcaacattagagaacccgtcaaatctcgcctgtttgtttttttgaccccgcccgtcgccgacacgcaccgccaaagcgccactcgcgtgcagcgaaagcttgcggcacgcgccgcaacctactgtctattgtagactttgctcatacgcaaactatacgctagctaacttttgcagcgtgaaattactcacaaatactcgccgcacagcaagaacaatcgctaattacagatcaatatctggataaatactacgcgttacgccgtcgacttcactacgcaactgcgggaacggcacgccctcacgagcagttacgccttcgaacacccaaaaaactcgctcactaaagcccagcccgcaagccggcggcatgccgtattcgagcatctccacgtaatcgatgtctagcatttgtgcttcgtcatcgcctgcattgcgcatcgattgctgctgcacgaaacgctccaactggtcaatcgggtcattgagctcgctccacccattgcacaattcgctacccgctatgaccgcctgaaaacgctctaccgtttctggccgctggggatttggcttggacaacgggctgatgaacagcggcgtattcactagccaaacaggaccagccacgtctttacggatgtttttccaaagcttgtcgataccgcgcgccagattttcggtctgttctacttctagcttgttggcagccaacgcttctttgacttggtcaagcgtgcagttaaatgggtcgacaccgtagtgtttttggatagtttcggcataatcccactcctcccactcctgcgacaaatcaacatcgaaagagcctagcttgaactgcagcgtgccaaaagtttgctgcatgacataacggaacatgtccgtcatcagagccataccatcgcgccagttggcgtacgcccaataccactccatggctacgtgttctggcagatgctcatcagaatagttttcgttgcggaaacgcgggccaatatcaaaaaccttctcgtagccgccgcctaccaaccgctttagaggtagctcgtggctaatacgcaagtaaaagtcctggtctagcgcatccatatgcgtcacaaatgggttggcgtctgccccgccagtggtgtgctccagcacgggaatgttgatctctaaaaagtcacgctctagcaaaaactggcgagttgcctgccaaaacttactgcgacgtacaaaacgctggtagacctctgggttgacgttggtgtccacgtagcggcgacgcatacgttcttccttattactgaagccctcctgagcatttggcattggtcgtagggattttgtcaacagtcgcaagctctgcacctcgacggatatttcaccagtctgcgtcttaattaccgtaccatcggcctgcacaaaatcaccgctatccaaaagcggcaactgctctagaccgagccggccagacgccgcatctagcccctgcacgacgccagcgcggaagaacagctgcagctcgccagaagcgtcttttatgacgataaaagcgatcttgccgaacttgcggatactgcggatacggccgacaacctgtacctgctgcccctctagggcatcaaactgttgcgttatctggtttaggtggtgcgaacgttgtgcattcgcgggatacggatcaacgcccaaagccttcagctcggccagtttgcgcagccgctcatcgcggtaatcttgtagtgttgccataatagtttgcaattataccaaatcggctgccccatcccaaggaaacgccacctctgacggcacacacccgagcgccaacaacccgaccaaactataacagccgttcgtacagcaaaaacacagggtatacagtgttaaactaagggcggttatgtttggtgttttggagccggtattaacagatgcgccgcagcgcgtattcaagactaagactattatcatgcaccaaggcgaggccaagcttaatgcctatgcggtcattcgcggcctagtcaaggtatacaccatatcagcacaaggcaacgagcaggtagtaacgtttcatggccccggcgacgtattcccctcttcttggatatttgatacggcacctggcgctctgtttttctaccagacctgcctggagacggaagtatactgccttgaccgcgaaacattcctacaaaaagtatatgaatcgccgcagcgcacccaggccctacttgaccattttgctcggcgctacacggccgacaccgtgcgcattaacgccctacagcaaccgcgcgcccgcgagaaactactctataccctgttttacttatgccaacgctataacacgagcggcagccccaacctagaaatccccttcccgcttacccagcaactactaggcgggctggtcggcctaacacgcgaaaccacggccacagagctcaataaactacgacggcttggcgttataacctacgacaagcagcactacggcatcaatgcaaagaaactaatcgccgctatgggttctggcgactacgacaacctgtgcagtattcggcatcaaacctaagcagataaacgcgcccgcagcgctatagatacagcaaccacctcgggggagctggcaaaataagctgcgatacttacaacagcattttgtataacaaacaacacatttatggttaaaaagctttacgattcggtacgagtatgccagagtataagcactacaccataataaacaggtgggcaggagggttcaacaacatgtctaagacatacgttacgcgtatcgcagcggggggcgtgctaggcgcattagtgctagccgtggctgctatcatgggcgcaccgtcagtcatcgctcaggaaaatacagaaaataccggtgataccgaggtcattattacggagacaaccgagggcgcagaaggcgaagcaaccaccgagaccgatacaacaatggatgaagagcagtccgacgaggcttcgccagaaatcggtgagcaagccccagttcaagacgagaccgaggcggctcagcaacagaacaacgaccagccagcagtagcagacgccgataacccctacgcctacaccgcgcaggatggcgacaactactcagtactagcacgcaaagcaattcagacctacggcatcattgagggcgttgacctgtcacaggcacagatagttgccgcagaaaccaagctagccgccgacgcaggcttcccagagctagacttgggccaagtgcttacgtttgacgtatccgacatacgcggtgccgttgagtacgctcagcagctctccgaggatcagatcgctagctggcaaacctacgtaccatacgtcgactttgacaccagcaacaacggcggcaagtaataagaactaatccgcgcaaaaaggactagctcatcacgagctggtcgcccaatgcagcgctaccatcgtggcgctgcattttatattcaatggcagcgggtacacggtacgccccgccgccaaaagtcagccacaagaattaaggccgctacccgcgacagtcaataatcgcacggccactacttgcaaacactacccaagtgcgtgtaccataagcgcagtaactataactttaaaactgagggaaccgccagtggcgacatcacaaaatacaacctccagaacaataaaccgcgtagcgagctcgaaactactactgctagctgcagcggtagtattcgggataatcggcgtctatatcataagtcgctcaaatgcagccactggcgtggttgccgggcctgagacgcaagaaaacatagcctacgctaatacgcattccgcgcaaaagctagacctaatgcttccagagcgcactggcacgccagtaccgctagtcattgatatccacggcggtgcattctctggcggcgacaagtcgggcgaatcctacaactatgacgcgctactcaacgaaggatgggctgtcgccagcctcaattaccggctctccggcgatgctcagttcccagctggcggccaagacgtcaaagccgctgtgcgctggctacgcgccaacgccgacacgtacggcattgatcctgatcgttttgcagcttggggccgctcggctggcggctacatggttgccatgctcggtgtaaccggcgaccagccaaccgtttttgacgacgattcattgggcaaccccaatgtcagcgatgcagtccaagcagttgttggctactacagcccaaccaacttcgccaccatggacacacaagcacgtcagacatgcggttccggcaactatcaggtgcacgacgccgacggatctccagagtcctactggctacgcgcccccgtacaagaatcaccactcacctctaaggcagacctgacaagctatgtcgctaccaatcctaagctacctaaatttgcgctgtaccacggttcctgggactgcacagtgcccccaggacagtcgcaagagttagccgacgcgctaaccgctgccggcaacactcccgacctacggatcgtggacggctttggccacgcagatgatcgattcgaccgtcaaatgatcgaaccaggcatagaactcataaagagcgcttttgctgaggtacagacgcctgttacgcctggcgacaatgccaacgacaccacaccagagccttgcgtcgccctaccttcgggcgctcccacggctacagcaagcatcaacataccagccgatggcacgtaccgaatatggtcgcgcattaaatcaaccaacggcaacactacgtcgtacggtctacagcttagcccctacgtctgtaacgctgtcgtgggcggcaattcatccctcgccacgaacaactgggaatggatcgactaccgagacggtagcgaagcgactaagctagaagcccaactgaaggccggcacctatgacgtcattttgaccagcaaccagcccggcattgctatcgacaagctcatctttacgaccgacaccacctgtaagccaaccggactgggcgaaaactgcggcaccagcaccacgcagccagaacccaacgacccaccaggggataacggttcgggcaacggcggcaactcgtcctctagcgacttagcgatcaactcgtttaccgcctctgccgagaatatcactcagggccaaaccacgacccttagctgggaaactgctaacgcaactagctgtaccgtagaacctggcgctggcacagtggtagttccaaacggcagctggacaacaccagcactgaacaccccggggaccagcacctttgtactgtcctgcgagggcgcaaacaacacgaccgccactgaaagcgtcaacataaagatagctgcgacatcgagcacacctcaaccggtcatcaatagctttactgctaacccgaccaatgtgccttacggacagagctccacgttggagtggaagaccagcaatgtggccgtctctggctgtgccatatcacccagcccgctgaccagcgcaagcgccaacggcacctggactaccccggcattgaccgaatcagtcacctacacgctgacgtgcgtaaacagtgagggcagtacaacgaccaagaatttgggcatagcggtcacaccagtcactaccgtgcctggcgacaccgagaccgaaaatccgccgccgccagtaaacccagacacgccaacacggcgcccatcgggaagcaaccaaaccgatcgctccaccgtaactgctagcgacggcacggaagtgtccaacgccgcgacaagctccacggtatctggcgagaccaccctagacaacaccaatgtcatcaacagccaaaaagagaaaacgatcgtccgcaccgagtactacgagaacggcggcctagtctactctgacaccgaagcaccgttcaccctcgatacgactcagctgcgagatggcacacacaccatcacagagcgcacctactacgaagacggcagcagcagcgagctgactaacaccataacagttgctaacgctaccgagcttcctaacaccggaacttctagtaccgctatctggggcagcctattcgtaatcacgttgctcgcagcatgtgccggcggcttcataatctggatcaagcggacgcgcaacaatagcgactactaccagagctatgacgcaggagcagtaccacccgcccaagctggcagctactacactcccgcaccgcacaacgacggagctgactggcagcaggatctacgttcaccagacgaaaaactatagtaaacgcaaggggccttggcagtgtcagcatcgagttcgcacaaacgcccgaaaacccgcgcgaccgccaacacagatgacggaccgctgctgacagtcaacgccaaacgcgcccac

SEQ ID NO: 1914 - DNA, 16913 bp, synthetic construct
  source 1..16913: mol_type = other DNA
  misc_feature 1..16913: note = Synthetic
tcgttcacgattattgtccctgttttgcgtaggctgcctcaactgcttctttttgagtcttccaccaatcttcatgctggcggtaccagtcaatagtttgtagtaagccatcgtgcatacctgtttggttatcagtatattgcggttgccagcccagttcgcggcgcagtttactggaatccatggcatagcgcatgtcgtggcctgggcgatcgttcacatgctcgtaccaatctttgcctttgcccatcagctcgcaaattagttcaatcaccattttgttgttgacatggtcgttgtcggcgccgatgatgtaagtttcaccaagcttgcccttttccaggatgaggtgaactgccgagttgtgatcgtcaacgtgaatccagtcgcggacttgctcgccagtaccgtacagtttgggcttgatgtcgctcaaaatgttagtaatttggcgcggaatgaacttttcgatgtgttggtatgggccgtagttgtttgaacaattggaaatggtggctttgatgccgaagctgcggacccaggcgcgcactagcatgtcgctggaggctttggtgctggagtaggggctggatggattatacggcgtgtcttcagtgaagcggtttgggtcgtcgagctctaaatcgccaaacacttcatcagtcgagatatgatgtagacgtttgccatgcttgcggacagcctcaagaatggtgtaggtgccgatgacattggtctcgacaaacggccacggattacgcaaagaattatcattatggctttcagcggcaaaatgcaccacaatgtcagtttcagatactaatttatccatcaactcggcgtcgcaaatatcgccttctacgaaattgatctggtcagctactggctgtaaattggcgcggtttcccgcataagttaacttgtcgataacggtgatgtcatattctggcttgtgtttgacggtataatgcacaaaattcgagccaatgaatcccgcgcctcccgtgactagcatctttgtcataattatattgtaacaaattaatatattaaaatatatttttagtctgcaaatccatttggattatttgactgccacttccaactatcggcacaagcttgttctatagaataaacagtttgccagtcaagttctttcttagctttacttgcgtctgcataagaagcggcaatatcacctggtcttctatctattattttataaggtattggctttcctgcagctttactaaatgcatcgattagctccaatactgagacacccttacctgaacacaaattataaattgcaacacctggcttactgtggtttaaggctgctgtgtgtcctgatgctaaatccatcacgtgtatataatcgcgtacacccgtaccatctggagtgtcgtaatcatttccaaatacaccaacctttgcgagtcttcctacggctacttgagtaatgtaaggtaaaagattatttggaatgccatttggatcttcgccaattaaaccagatttgtgtgccccaactggattaaaataacgtagaatagtaacttcaaaatctgggttagctgcggctatatctgttaatatctgctcaatcataaattttgtccatccgtaaggattagtaatgccgacaccagcttgatcagattctgtaattggtaatttttttggtactccacatactgttgctgaactagagaatactattttattgacattaaatttactcataacatcaagtaaaactaaacttgattctagattatttgaataatatttaagaggttgttcgacggattcaccaactgctttaagtcctgcaaaatgaattacagcatcaggcttttccttttcaaagattttttctaacttagatctattacgaatatcagcttcgtaaaatggaatttctgttttagtaattttattaagcctattaataacttcctttgatgaatttgagagattatcaacaataactatatcatttccattctctataagctctattgcagtatgtgaacctatgtatccagttccaccagtaagtaaaatcttcataaaacgaatcctttctataatgtaattgtaactactattatataatgtaaatatgataaccgtaattatagctggtggcgctggtactagactgtggccactttcaacgccaaacaatccgaaacagcttttgactctaactagcgagcgaactatggttcagcaagcttatgatcgtgcctctagactagggggcacggtatatattgttactgaatctagtcatgcagataaactacgcgatcaacttccagaactccctagtaatgcctttttaatagaaccagggcgtcgaggtacggcacattgtattatttttgcacttgattatattacacgcaatcataaaactaatgaacctgttgcttttattcattccgatcataatgtccgtaatattaaaggctttaagcaatcttttcaatcggcggctactatatctcagcagaatgattcaatcgcgctagttggcattgaacctacttcaccgtcaactggttttggatatattgaatgtggtgatttaatcgataaaagtaataatgcatatacggtaaaatcatttaaggagaaacctgattacgaaaccgctaaaaaatattttgcttctggtgattatttgtggaacggcggatattttgttgggtcagttgatatttttgtaaaacaaatgcaacaatttgcgcccactttgatggaagattacaataaattaagattcttatctcacttcgctagtgaggaatattacaaaacatatcttagttttgatgttcaagcaattgatacagtcttgatcgaaaagatgccgaacttatttatgatttcggctagttttgattggatggatattggaaattttaaagatttatatgatgtccttataaaagatgaaaagggtaattattgcaaaggcgaaaatatttatattttagatactgatacagcttatgtccgtaatgaagagccagataagccagtcgcggttattggattagataatattgttgtggttaatacgccgaacggtgttttggttgcaagaaaggatatagccgctaaaacaagtgaaattactaagatgttgaataaaaaaataaattaagatccatattgccatttaaaatgtagcgtgatatatttgaattacagtcccttaagtaaggattgtactaatatctaaattgttttaggtttctataataatttagcaacttagggcgacgattttgatcgtgcagctacggttgagaattctattgtgaatctaaagcaaagctctaatccgctcactagttgggcggattatcttttgtgcgtttcgattcctcttatactttcaatcattatcatttgattatataatataatcaacaacgacattataaaaggggcttctttatggcacaaaaatcttcatattcaccaaaaaaatattcgcttgggctagatatcggcacctcgtcagtcggctgggcgatactggacttggataaggagcgtattcatgatttgggggtgaggatttttgagcggccagaagacccgcaaaacggcgattcactcgccaaacctcgccgtgacgcccgttcagctcgccgccgtctaaaacgtcgtcgccagcgcctaaaccacctaaagcaattttttgtcgaccaaaacatcctcaccaaagatcaagttgaagaagttctaaattacaagtctgatttcaacaaattagacgtgtatgatctgcgagcaaaagctctcaccgaggagctatcacccgaagaattgctcaaagttttgtatcaaattaccaaacgacgcggctttaaatcaaaccgcaaggtcgtggaagaatcagacaaagaaggcggccgcgtaaccagcgcactcaagactaacgagaaattccttgccgacaacaattacacgaccgttggcgaagcgctgagtcgcgatgaaaaaattcgctttacataagcgcaataaacgcgacgattataccaacagttttgcgcgcgatgattttttgtgtgagttagaagctattattaaaactcagcgaaactacgccctgaaaaatgtccccgaaccagctattaatgaattgatttacggcattgacgatggacaagtcaccaacgtcagcgccataatgtaccaacgtccatttatgaccaaagaactaatcgaaaagatggtcggcaaatgtacttttgaagacggcgagaagagagcaccaaaagccagctatagtttcgaggtatttcgcctggcaagcgatttatcacacctcgttttcattcctcgtgatgccagcaaacgccaggctaagcgcgagaatctagaagtaaggctatctccggaacaaattaaacaagttattgagcttgccaaaagtcaaaaaagtttaacgtataaaaaagtgcgcagcacggcaggaattagcgaagactacgtaccaaaagatgtgcgcggcaagaagaaagatggtgatgaattcggcgaggaaaacgtcttcggtgggctcaaagcctacaatgacattaggcttgcgctaaaagatctaccagaagattgggcaaaaattgataatgaatcagcaatcaaccaaatcgcctataccctcactacacaaaaagccgacgaaggtattcgtaccgaactagacacgctaccgctttctgataaagccaaagaagctatcatcaaaatcaagccaaccaacttcaaagcattcggacatctatcaatcaaggctttacaaaaaatcacgccacacattctcgatggtatgacttacgacaaagcctgcgaggcagctggctacgacttcaaaaagcaatctgccagcctagagcaaattaccaatcccgtcgtcaagcgcgccatagcacaaaccctgaaggtcgttcgtgctattgaacgcaaatatgacaaaccatactttatcaaagttgaaaccgcccgcgacttggcaagaaatttcaaagaccgcaatgcgattaaaaaagaaaacgacgaaaaccaaggatacaatgaagacattaaatcaataattacagacgggtacaaggcatcgcctaaaaccaagggcggtaaacagctccttagccatcttaaagagcttaacgtgccattaaataagaatgcggattttaatagtcagcaaatcgtcaagattaaactctaccgcgagcaaaacggcgtctgcctgtattctggaaagtcaattgattttgaaaccatgctgcgcgacgacaacgcctaccaagttgatcatatcgtaccattttcgcgttccaacaatgacggaatgacgaacaaagttttggtattcacagaggagaatcaaaagaaagccgacaggacgccgtttgaatattttggtaccgacgaacaacgatgggagaaattcgtagcacttgttgaaacaacgtataagacacgcgatgtcaaaacatccgacaaagctacgaatgctattaattacaaatacaacggctacgccatgaaaaagaagcaaaatctactacttcaagattacaaaaacgacagttggaatgtgcgtgcgctgaatgacactcgatacatcactcgatttatccaaaattatttgcgccagaatgtcgactttgccgaaggtgaagaaaagcagcgtgtaatcgcgccaaacggtacgacaacagcatacttacgcaaacgctggggactagccaaggatcgcaccgaggatgtattgcatcacgccaaggatgcagcggttatagcggcaatcgaccaaagtatagtgaggcaagctaatctatttgcgaaacgcggtgaaatagccactctattagccgctgcgaaaacgatggaagaaaagactgacaagttgactggtgaaattattgacgaagacgaatttgacaaggctcagcgacgcaaggatgcggcgatcgtactatcctcgaagtactttccgcaaccatgggataatttcggcaaagaagtcatgaaacgcacactcaacaccgatataaccacactacaaaatgagctacgtgggcttgataattacgatgaagattttcgcctaaacgtaaaaccgatcttcgtttctcgtatgccacgtcgcaaagccaccgccaaagcacacaaggagactattcgctcaccaaaggtcaaagatagtgatcagcgaaccgtacgaacgccgcttaataaaattaagcgcaaggacgtcgaaaactctgtacttaaagaatctgataagtggctgtacaataagttacttgagaggctagatactcacgacaataatcccgaaaaggctttcgctgaacctatttacaaaaatgacaaaaagtttgataaaaacggcaaaaaattatcgccagtttcgaccatcaaagtctattcaacgcaaccgagcggcttttatatcaacgatggcaaagcgtttgtcaataacggatctatggtacggcttgacgtttatcaaaagccaaacaagaaaggtaaaatcgagcactttttcgtgccagtttacgcccatcaggttggcaaaaataggcccacgccaacaaagatactgccaacgcccaaaggctttactgatgtagatgaaacattcactaaggtttgttcgttgtatccgaatgattatgtgaggtgctactttggcaataaaattaaagagggatattatgtaaaatatggcattaataatggagccatacaggtgatagctcatggcactaccagcaaagacaaggaccaccttatccaaatctcaccccgctctgcaaatctcatcgaacgctacgacatatccgtccttggcgataactacaggtggttataaatggcctggcgtgtcgtagctatcgaaaatcctgccaggctaagtttgcgcgacaaccagctagtaattgcgcaagatgtcgaggcaactttaccaatcgaggatatcgactcgctcattctggacggctatggtattaccacaaccacaaatctactcacagcactggcaaccaagggtacgacgactgtcatctgtgacgaaaagcacttaccagctagtgtacttctaccatactcacaacactcacgccaagccaaagtttcgcgtcaacagcttgccatgagccaaccactcaaaaaacagttgtggcaacaaattattatcagtaaaattaccaatcaagccgatgtcttgcggtcaatcggattagacgatgccgccttacgcacccatattagcgatgtcaaatcaggcgacactagtaatcgcgaatcaatcgctgctcgcatttattttgaccagttactcgacgacgccacacgccgcaaaccaatttggcacaatgctgcgctgaactatggctacgcaatggtccgcagtcatattgctcggcatgttgccgcccgcggactggttgcttcgcaggggatttttcaccacaacgagcttaacagttttaacctagccgacgacttgatcgaaccgtaccgagctgctgttgatttatatgtcttagaaaaagttgccccgcttcacgtcggcgaccgcgacgccagcctcaccaagcacgatcgccaactcattattgacatattaaattattgtgttataatgaacgacaagaagtttactataaaacatgcggttgagcgaacggttgaaagctttatcgaatgtatcgaggtaaaggaggcgcgtaagcttcttttaccaaaaatcgcctcctaacagggaagggatgtcatataaaatcatgagggtcgcagtatttttcgatttgccgaccaatactaaagctgagcgtagagccgccacgcaatttcgtaagttcttgctggatgacggctttgatatgttgcaatatagcgtatacacgagactgtgcccaaatcgtgacgtcgctgaaaagcacatgatgcgcgttaagcgttatgcaccagacagcggatcagtgcgactgctttatctcactgaacatcaatttacccatatgtacgtcatcgttggcgaaaaaactgtccaagaaaaagctgttcccgccgcccaactagcatttttctaaccaaaaatccccctcgtaacagagggggatttgaggaagtattataccaatatctaaattgttagggaactataacatgataacacgctcggtattctcacgctacattataccaatatctaaattgttagggaactataacccaacgccaagcatattcaaatcaagcgcgattataccaatatctaaattgttagggaactataactttggccagtgctttttaagaactgttgacattataccaatatctaaattgttagggaactataactggcaaaaagcgatattggtgtagtcaaaaattataccaatatctaaattgttagggaactataaccgcccgcagggcgatacttgataatagggaattataccaatatctaaattgttagggaactataactcgcttatagttttgatttgtgcgcatggaattataccaatatctaaattgttagggaactataacggtgatttggtcgtatttgtgggtgccagcattataccaatatctaaattgttagggaactataacccatgtgttgtattgtaacaccgccgccacattataccaatatctaaattgttagggaactataacaaagcggcaagcgctctggacggcatggctattataccaatatctaaattgttagggaactataacgaataacggcatatctttaacgaaatattattataccaatatctaaattgttagggaactataacccatgtctcgaatacagaaaagtgtgctggattataccaatatctaaattgttagggaactataactcagcaatgttctttagctcgtcgtctgtgattataccaatatctaaattgttagggaactataacagggaagacattatcctcgctccaccttgtattataccaatatctaaattgttagggaactataacgctgatcagcaacgtgtcgccataataccaattataccaatatctaaattgttagggaactataactagtgatgccgttggcttttaatccttcgaattataccaatatctaaattgttagggaactataacaatgttgccataacaatctcctaagcacatattataccaatatctaaattgttagggaactataaccaagatgaacgtcaccactttgacgatttcattataccaatatctaaattgttagggaactataacccgttttaagtttggtattagcaataatcaattataccaatatctaaattgttagggaactataacaaacctctgctcatcatatccagtaagagaattataccaatatctaaattgttagggaactataacctagtgtaattcttgaattttggctcgccaattataccaatatctaaattgttagggaactataacagcgtcgccataaaattcgttacagtcaaggattataccaatatctaaattgttagggaactataacgcgcggccatcatcacgtatgatcaagagaattataccaatatctaaattgttagggaactataaccgtttttccgtccattcatgtttcgccgcgattataccaatatctaaattgttagggaactataacaatccagccctgtataatgtatgaccaattattataccaatatctaaattgttagggaactataacaccagaggcgcaagtctgttggctcgctcaattataccaatatctaaattgttagggaactataaccccgggtgaggagaagctcgatccgtggatattataccaatatctaaattgttagggaactataaccaggcggacgaactcgccacgctcagcaaaattataccaatatctaaattgttagggaactataacctctaagcgaaccagatgaatcattctgcgattataccaatatctaaattgttagggaactataacgcttagagtccatcatttttttaggcactgattataccaatatctaaattgttagggaactataacgtaaaaatatagaaattatattacctagccattataccaatatctaaattgttagggaactataactgagcagtggcacgcccatataattcagctattataccaatatctaaattgttagggaactataaccgatgttcacgatgattttggttttttcgtattataccaatatctaaattgttagggaactataacattctgaagatcgatttggtgatatatctgattataccaatatctaaattgttagggaactataacgaataacggcatatctttaacgaaatattattataccaatatctaaattgttagggaactataacgactactatcaacaagtttccagaactcttattataccaatatctaaattgttagggaactataacgcttcatagcttcaacactcgacagtgcatattataccaatatctaaattgttagggaactataaccttccagaacttcatgcttttttccttgttattataccaatatctaaattgttagggaactataactaactgagagtctttattttaggtgtattaattatctcgtccattacgatactctataactaagtcaattatttgctcaaaacttaaggatcggatagccttgtctttctcgtttttggtacgtccatctaccatttcaagtaagtcttggtacgcacccttaagaaacttggcagcctgttcctgttcatccatagtcaactcactaactggtttgagtaaaatatccttaatattcatattctctcctcttatatattatatagggaaactaattaaaagtcagatctaacgtagattatactaatttaggcaactatcataaaatatattaaatataacttgattttcgtaatttgatattatttgataaacaaatcactggtctggttgcttaataatacagttggattgttaatagacaactcgctgataattttacaatcactacgaccatttaaatagatcagcgtgagtttctgcattattttataaggtagtggctatctttaatttaaataatatacgctatactcataatatgacttgtgatgtctcgtttaagatagcaaagcttgccgagggtaacgaatcctacgctgcctttaaccagcgcattgttaataccaagatgccggtcatcggcgtgcgtgtaccggatttgcggcggctggcgagggaattagcacctaatataagtgcagcggatattagcaaattactaacggcacaaaatgaatcatttgactacgtgctgctgtgcgggctgctgatcacgcacgctcggcttgatgatctagtggcgattgacctaactaagcaatacctgctgcacgttgattcatgggcgcacattgatacgtttgtcgagaaaaagcggcgctttgccggcgaaatatggtgggattttacgctggaatgcttgcaaagtaaagctgagttcacagtacgttacggtgtagtttctttgatgactaatttcctagacgaagcacacattgatcaggttttcgcggcgctgcgaaaagttacaagcgacggatactatgtcaaaatggcgctggcctggctgtatgccacggcggcagtgaatttttttgaaaaaacgctggctgaactggaaaataggcaaattgacgcctggatgcgcaacaaagcttaccaaaaaatgcgcgaatcgcggcgatttacgcctaggcagcaacagattatactaaaaaacaagcgagcgagcagttgatggctggggtaacggcgctcttattcattatcgctatttttattgttgttaaaatttttcgcgttcatagattacgagaagccgaaaaatatcataatccaaaattcctcaaacacttgcaaaatattgatgagtttttggcgcaaaccgacggctttgatggctacataacctggaaaaatcgcgacgaaatcctgaaaaaatacgaaaaaactcataacttctttcagggaaaatctaagtattataaaaaggagcctcgagttcgccagtttaacgatatttacgaagattttgctgggtttattaaagactacaaccgaaaatatgtcgctgagcaaaaacagcttaactgcgatttctttcgcgatattgaaggcaagtcgctggacgatcagcaacagcaagcgatcattaccgatgagtattccaacctaattatcgctggcgctggttctggtaaaacgctgacgattttagggaaagtcaaatatctggtcgagaaaaagaatattgatccagaaaaaatccttctactgtcttttactcgcaaaactgtcgaagagctgaacgagcggctgcgcaatttgcgtttgaaaactcaagcgacaacttttcataagctgggttatgattatattaagcattttcagaaaaagccgccggctgttgccaatgagaatttgctgcaccaaaccatcgtgcaatttttgaaaaacgatattttacatcatgattctgcgcttaaatcgtttgtgcagtttatggcttgctatctgaatattcccgaggaaaatgacgcgtttgattcgcttggcgagaagcttgatgttaaaaacggcatagattttgaaacgttaaagtcgaaatattatgccaatacttccggcagccggcggattagtaaaaacaaacttgatacattttctggcgagcgcgttaaaagcgtcgaggagctgatgattgctaatttcttattcttaaacggcgtgaattatgaatatgaaaaaccgtatccgcacggcgatcatatgtaccggccggatttttatctgacggattatgatatttggttggagcatttcggtattgataagcatgggcgtgccaaatggctatcggagtttcaggaaaagcagtatataaaaaacatgcataaaaaacgtgtcaagcaccgcttgtgtagaaccaaacttttagagacgtattcgtggtataatcgcgataatattttgctggataaactgcgggaaatactggagaaatcgggcgttgtttttcagccgctgagcgagcaggagatttatcataaaattatcaagcaggattcgtcatttggcgcggagattattagcttaattactagttttatcaatttgagtaaatcgcggggactggctgctgatggtttgcgaaaatttatggaagacagcggaaccgataaccaattcctgagcgctcgccggcagctgtttttagattttgcgctgccgattatagagaagtataacgctgttttatcagcgcgcggtgagattgattttaacgacatgattaatcaagctgctaatctggtgcggcaaaagggcgccgccaaagcgtatgactatatcatcattgatgaatatcaggatatttcggcggctaggtttaagttaattacggaaattcgccagtgttcgggcgcgcggttggtttgcgtcggtgatgactggcagtcaatttatcggtttacaggcagcgatatttcgctgttcagtgattttggcaagtttgttggcgagcatgaaaaattattcattgaaaggacgtatcgcaattcgcagcaactgatcgatatttccgccaaattcatccagcaaaatccgcagcagctggctaagaatcctaaatcttccaagcagctggattgcccggtggagtttgcagcgtacgatcagaataatgcttctacggtgcttgtcgagcagattcgtcaaattgttgccgaatacggcgtaggtcagcatattttactgttgggccggcatagttttgacctggattatgtgatttgtctgagggatgataagggaaaagttattaaaaaccagttgagaaaggaagttaagagatataatgaagtcactggcgcgctgatacttactggctttgaaaatgttgatatcaaatttatcaccgtacataagtccaagggtctggaggcggataatgtgatcgtcctaaatttgaaaaacgacttgtatggtttcccgaataaattaaccggcgacccgattatatcgctgctgctgagtgcaccggaagcttgccgtttcgccgaggaaaggcgcttgttttacgtggcgcttaccagaacgaggaataaggtctatctattaacaccggaaaatgaatcgctgtttaccaaggagattaaacgatattccaattatctaatccaaggacgttacggcgaatcggaattggttaactgtccgtggtgtaaaaccggcaggctgattatccgccagaatagccaaactggcaagagtttcgttggttgctcgcattatccgcattgcagccagtcgtataataacgtcgaaattttaagtaagccaatattgtgtccagcttgccaaagcggctttttggtgcggcggcacggcaggtatggcgaattcttaggctgcactaattatccggaatgcaagcatacgctgcagttgagtaattagcaatttttaagaatgtatctcggggtaaatttggctgtcaaataagcataaggtataataattacaaatagacggaggaattatggacaagccaaatattgcggttaaagacatagaatcggcgctaaaatttcggcgggcgataaaaagtttcgactcgaaaaagaaaattagcgataaagatattgaactggtcttagaggcaattcgcctagcgccgacatcgtacggttttgagccgtttaatgttatcgtggcgcaagacgccgatcttcgtaaaaggattgaaaaagctgccggcgttaacgctgcgaggtttgccgccagccatctgttaatttttactgccaaaaccggacaggaattgacgcgaaaagacggtcatatcgatcatatgttgcgtgatgtggcgcagatgaacgcaattgtcaggactggctataaaacgttttggaaaaaatgggcgaagactgattttaagattctgggcgacgacgataaactccatcaatgggcggcgcgccaagcatacattgctttgggatttgccatgatgacagccgccgagcggggggattgattcatgtgccatggaaggattctcgattgataaacttgcggaaatattggaagaacttaagttgattgaccgcgagaaagatctgccagtggtgatgctggctctgggctacggcaacaaagaaccgcatccgcaaacccgccgagatattaatgaaataatcaaatattgttaatccattaattttattaagatataattatagaattaaacaagtgctataataaattttatgcaattaaataggcttagtaaattaacaacaggacttgttgctcttgctttgtttggtgtttgttttcaggcgcctatagccgtttttgctgatacgtcgttttcatcttttgctttgattataaaatcttggaaggaaatactctttggtgtagcggcaattattttgatttttataatttggcaaaagaagcttcaatatgaattatatactgataaattaatttgggtttgtttagcggttgctgccttaaatgtatttttattggctatattgccaaataatcagttgtctgaggttgcggcactgattataaatctaagaatttatttagcttttatagtttgttatattttagttaaaatatatccacctgctaaaaaaatattattaaaatccattggcgcgggtattgctttggtttgtattattgctttgttgcaagctacaattttaccaaaagatatacttaaatcgcttggctattctgatcttacaattaaaccttatttaacagtagatcaaaataataattttgttagaattaacagtaccttgcgcggtccaaatccactaggagcttttgcggtaattgccattagcttaatggttgtattttggcggagatatcaaaaaatcagcaaaccctgcttaattttaggcattgtagttttatgcggcgctcttgtggcgctctggtttagctattcgcgtggcgcttggctagcgatgcttgtatcaattattataattccacttatctatcaagctaaaaatggcacaataaatcatcgcctgttattaatagtgccaatcatgactgtaatattaattacactaatcgggttaaattcacaaagtagttttgtacaaaacgtaattttccataataaccctgaaagctcaagtgtaataaaatcaaatcatggacatatgcaatcaatgactgatggtgtaagtacagtcgtaaatcatccatttggttttggtttaggtagtgttggctcgccttcattactatctggcagtccaaaaattattgaaaatcaatatatttatatggcaattgaaactggtgttcttggtctagttttgcagatgatggtttttagtatagtactttggaaattatattctcaccgagacaatctaagtattggtgtcttagtttctgggattggtatggttataatcggtatgtttttaccagtttgggcagatgatacaattggcataatctggtggagtcttgctggtttaactattgctacaaataaaaagaaagataataaaaaggaactagcaaatgcgtgaaaaaacaacgaagaagcaacgtgaattacttagttatatagaaacttttataaaacagaatgatttttcacccagttaccgcgaaataatgaaagctatgggatataaatcggtctcaacagtggctaatcatatcgataatttaattgaacgtggctatattaaaaaa

SEQ ID NO: 1915 - DNA, 16663 bp, synthetic construct
  source 1..16663: mol_type = other DNA
  misc_feature 1..16663: note = Synthetic
caagtcccgcgaaaagacactgagattcaaccctcggactgatatccccaccatccccaacgctatgagtattgctggcgcggttctagccttgcgcggcgccaaacgcattgataccactgctggtatcgcacaggttgccgctggccggttcattgacgttctagacggcatcgtcgcccgcaaaacagggtaaacaagcgatttcggcgcgttgctggatgctgggctagacaaagctgtcactgccatcatcctttatgagataaaaagcaaaaacctcgcaccaacggaaataatcgctgccatcacagcttttaatggaatcaacgccgttgccagcgccaaaacgatagttgaagctggcgatgaaaccgtgcgtccagaaatctctggcaaattggcgctagcgctcgaaaccagctcattgctagcccacctagtcggcagccgtctcgaaaccaccggccagagccaactcgccagagttgctcgcggtatcggcaatttagcattcgccgtatcgctaccgttcgcagttaaatcaacggcctcatatatcaagcgcgcctggccatcaaaacgccgaaatgataaataaacaggcaaaattggcgatttgcggcttgaaagagatttttggctattttgttgcaaaaaatagtaaattattgcaaaactattgacaccgccgtccatatgtgatatatatatcagctttttgctcaaagtactgtaaataaagggcaagaagtagcccttttgctttgagtgaaaacacttccctaaggaggggaaatgagacatcttttcgagacggcggcgcgcgctttgcgcgcccgccgcgagatggcggtcgcaatcacgaccgccgccgtcgccgccatcctcatcatcggcggccagggcaacctggctgccatcatcgccgcgggcgcggctggcctgatgggcggccacgccaagcggtaccgtctggaggccaatgagctcttcagagagctcataaagactaaggtacaggccgccgacagcgccaccgccgaggcggagcgccaccgacttgaggtgggctcctggcgccgccgcctggcggcgttggtcaaggagaccagagagcacctctcctatctcgagcgtaatgccacatcatacgagtggtacgctctccatcttagatgggagatcaagcgagccgaggagcggctcgctcgcactggcctgctcagcgagcaggtccaacttatcgatctcctcccacagggagaggccgacaagttttacagcgacactgaggaggtgaacaccaccgacgccgccgaggagtaatcctcctcggcgaaaaaagggcttttaagcccgctagaaaatagcccgccagagctctaaggctcggcgcaaggcctttctggcgggctattttctttggtttattatcctcagcagccaacactaatttggcatttttagcaaatcggtttactattatataagtatgaagaatctggttatcgtcgagtcgccagccaaagccaaaactatcgagaagtatctcggcaatgattttcatgttttgtcaagcgtgggacatatccgcgctatcgccaaaaaaaccaaagacggcacgccgccaattgatatccagcacggcttcaaaacgacttacgaaatcgacccggaaaagaaaaaagtaattaccgagctaaaaaaggccgtcaaagaagtaggcgccggcaacgtttggctggctaccgatgaagaccgcgagggcgaggcgattgcttggcatctatgcgaagtattgaaactcgaccccaaaaccaccaagcgcattactttccatgaaattaccaaatcggctatcgaggaggcgatcaagcatccgcgtaccgtcgatatgaaattagtcgaagcccagcaagcccggcaaatcctcgaccgcatcgtcggtttcgagcttagcccggttgtctggcagaaggttcctggcggcaagtcggccggccgcgtccaaagcccggcggtgcggctgctagtcgagcgcgagcacgaaattgacgcctttgctagcagctcgcagttcaaagtaaccgccatattcgccgctggcaaacaagaactaaaagccgagctaaaacagcgtttcgacagcgaggacgcagcccgagctttcctcgaatcgctggctggcgctactttcaccgttaccgatatcagtaccagcccgtcaagccgcaacccagccgcgccgttcacgaccagcactctgcaacaagaggccaacagcaagctcggcatgggctcgcgcgctaccatggccagcgcccaaaaactatatcaagagggccgcattacttacatgcgtaccgacagcgtcaacttatcgagccaggccatcgctgctagcgccgattacatcaaacgcttatacggcatcgaatactcgcatgtccgcaagttcaaaactaaatccgctggcgcccaagaagctcacgaagcaattcgaccgaccgacattactcgcgagtcagtcagcggcagcgactatgaccagcgcctctacgacctcatccgccgccgcacgctggccagccaaatggcgccagccaagctagagaacacgacaattacaattagtattaacgacgaggaagagcaaaacagctcaagcaaaaccaacgacaagctcgtctttgaggccaaaggccaagtcgtcctgttcgacggtttcctgcgcgtctatggcggtggtaaagatgacacaattttgccaaccgtcaaatctggcgaccagctgcagcgccacagcgtcgaagcccgccaagttttcgcccggccgccagcccgttataccgaaggtacgctagtcaaaaagcttgaagagctcggtatcggccggccaagtacttacgccaccatcatgaacaccatccaaacccgcggctacaccgaaaaaggcgattccgaaggcgtaccgcgcgatgtcatcttattgcaacttatcgacaataaggtcgagcgcgagattgtccaagaaaaaaccggctccaacaaaggcaagctcgtgccgacaccagccggcgagctgattagcggctttttaaccgaccatttcgaccgcgtcgtcgattatggtttcaccgccgacgtcgagaaagatttcgacgatattgccggtgaccgcttggcgcgcaacaccatgctcgagaaattctacgtgccattccacgcgctgattgagcaatctggcaatattgaccgccgaactgtcggcgccaacagagaagtcggcattgatccgaaatctggcaaaccaattattgctcgcttcggccgcttcggaccaatgctgcaactaggatcaagcgacgacaaagccgacaaaccgcaattcgcgccgctacctaaaggtgccaagattgaaaccgtcaccttagagcaagctttgcatgcctttgagctgccgcgactagtcggccaaaccgaggacgggcaagacatcaaagctaacgtcggccgtttcgggccatacatccaaatcggcaaactctacgtcagcctgaaagatatcgacccgcgcgaagtcacccaagagcaagcacgcgaactatacgccgccaagctcaaagccgaggccgagaaaaatatcgctgactttggcgacggcatcaaggtactcaacggccgcttcggtccatacgttaccgacggcagtaaaaacgccaagattcccaaagacaccgatcccaaagatattactcgcgaccaagccgtagaattgctcgccaacgccccgcaaaaaaggtcggcgcggcgccaaatacgacgaaagaagtaaacatggcaatcaaactccaacaagtccgacgtgtccgccgctggatgatgattttgctgctcgtagtaatgattatcgttgtcttctcgctaaatgttcacaggtcgtaccgcaccgataatcatccacgcctgggcaatgtcgctaatgtcgactctgatattccgtattgcgccggccaagacaaacagaagttcgatttgtacacgccgatcaacagcctactcaatactcatacgacaccgtacccgctagttatttatatccacggcggcggctggcacaaaggcgataagcgcaattcgctgcttgactattacggctctagtttgacagcggctggttttgcggtcgcctcggtcaactaccgcctagcgcccaaataccactatccaatacaaaataacgacgttgcctgcgctatcgataccatcgccaaactcgccagctcttatgacatcgacaccaacaatgtaattctttttggcgacagcgctggcgggctcttggctagcgattatgttctgactcgccaagacagcccaattactgtccgcggcgtgatcagtttttatggtaccaccgacctggtcaaccaattacagcgcaccaagcgcaacccaaatgcttacaaattcctcggcacccgcaatgtcgatactgcccgcgtcgccagcccactataccaaccgattaccaaaacgccgccgccgtttttgtttttccacggcaccaaagacagtattgtgtcgattgagcaggcttacaagttctaccagcgtatcttggcctaccagccgagcagccgctttattcgcgttgccaatgccggccacggcttcgacgacagtgggcgcaaaaccaagccgaccagcgatgaaattcgccgcacacttacactgttcgccctcaagcatatcaacaacgaacagtcagaaactcaggcgcaaaccacgccagaaaaagtccagatattattagacaatgattaagctgtttaatcagctaattattcattggtgttttgaataagctttgctcaataaacaattatattttgtgataaaccgttagattaaccagcatcgataccgccttaacaccttaaactttgacaaaaataggtattattgttagcctagacattattctttattaaaaaaagtagcaaaaaagtatttaccataagcgtctatattgtgatacaatataactagttagtatttgatttgacaatctaactactatgtattataatcagatatgaaatcacgatatcaaactaaaatcactctcgaggggcggggagtggagataaaaggataaggatcgcatgaccgaaactaccggtacacctgctgtggagactatcaagacagcaattgaggacattcttaagactatagaccaagaacgcgaacgcgaaattatcacgcgccgttttggcctatatgaacgccgggaaacgcttgagcaaatcggcgaactgctcggcatcactcgcgaacgtgtccgccaactcgaaaaagccatcctagcccgcctcaaaaccgctgccgccgacggtaaaatccctgtcattagcgacgctgagcgcctgattatccgcgacctttccgaaaacggccgcgtcggccgcgtccaagacgtcgccgaccgcctctcgaaagacaaagcttccaataacacccgagctcacgttgcctttatcggcgagctgtcgccacgctttgttttaatcaacgaaactgacaattatcaccagggcatcagtatcgccgaaaacggtaatgagaagaaaatccgcggcgacatcgatagcattgttaaaaccatcaaaaaccacggccaaccaatcgacatcgagagcttgcacggcatattgactttcgaaagtccgtcccagatccgcggcctggccagcttatccaaaaaactagccaatctcaaagacgtttggggtctagctaagtggccgaccgtcaatcctaaaaacatccgcgataaaatctacgtcattttggcaggcaatggcaagccgatgcacttctccgacatttctaaagccatcaaagaaagcgacttcaagcgcagaaacgtcaccactcaagctatccacaacgaactcatcaaagacaaacgcttcgtcctaatcggccgcggcatttacgccctcgacagctggggctatagcaaaggcactgtttcagatattatcgccgacattttgcgcaaagcaggcgagccgctccaccgcgacgaaattgtcaggcgcgtactcaagagccgccaagtcaaagaaacaactattctgcttaatctgcaaagcaaatcgatgttcaagcgcgtcgctaaagcgacttacaccatcgccgaaccacagcaataatctatctgcggattccgcttaatcttgcaaaaataacagaggtatgatataatggaagtatagctatgtcatttatcacttctgttattgctctattgttgcaatggtatgtctgggggccgttggttattgtgctgttatatctaacttggcgcaattatcgcagtattgatgtaataaagaacgttgagagcgtcttgttaaccctcgagattccaaagaccaacgataagtccgagctggccgccgagcaaatgttcgctagcctccatggtattttgcgcgatgcccgcgagctgaaagccaacaatggctatcaggagcatctaagcttcgagattgcctcggtgggcgggcggattcaattctacgtatggacgccgaaatcgttgcaaagcttcgtcgaaggccagatttacgcccaatacccgcaggtacaaattcataaggccgaagaagattacgtcgctcacgaacgccaccacagcgtagtctatacttcagagattaccttaaccgacaaggaatttttaccgatcaaaacctttcagagctttgaagttgacccgctagctggcatcaccggcacgctcgccaagctcgaagataccgacgaagaaatttggatacaaatgctagtccgcccggtcgccgacagctggcacaaagaagccgacgcctggattcaatcggtcaaagcgggcggtttcaacctattcggtaccgatggtataggcaagtggattgccggattgtttgccgctttgtggcaaccgcccgagcaagtaggcgctagcggcggtccagaactgtcagagcgcgacaaaactcgcatatctgaagctgaaaaaaaggcgaccaaacttggctatcaagtcaaaatccgcgtcgcttacctaggcgagcgcaccagcgacgccaaattacgtatgcaaggtatcatcggcaccttcaagcagtttaattcaactaacctcaacggtttcaagatgtcgaacgatagcttcgccaaagaggcgctcgctaaatacaagacccgcctctttgccgaccgcggttatctgatgaatattgaggaagtcgctagcgtttaccatttgccgcacactaacgtcgaaacgccgaacattgtctgggctagcaccaaaaccgccgaaccgccgccgaagctgccagtcctaactggcgacccagcgcatgatgagaatatctcggcctttggcatgactaatttccgcggcatcaaccaccaattcggcatgctgcgctacgaccgctcgcgccacgtctacatcatcggccagacgggagcagggaagagcggcttactcgagttattcgccctcagtgatattttccacgggcaaggctacgccatcattgatccgcacggcgactttgccatcaataacatgcgcttcatcccaggctcgcgcctgcaggatgttgtttactttaacccggccgacacgcagtatccgctcggtttcaacccgctagaggtcactaatccgtcgcaaaaaactaatatctcatcagaagttatcggcgtgctgaaacgcatgttcggcgactcttggggtccacgcctcgagtatatcttgcgctataccattttagcgctactagaccggcccgagactaccatgctcgatattactcgcatgctcactgacaaaaagtttcgcaaagacacgctcagttactgtaaagacaccgtggtactgcaattttggaatgtcgagtttgctagctggaccgacaagttccaggctgaagccatcgcgccagtcctcaataaagtcggtgccttcaccgctaatccagttatccgcaacattattggtcagccgaaatcgacttttaacatccgccaaattatggatgagggtaagattctcgtcgtcaatttgagtaagggtctaatcggcgaggataacgctggcattctcggctcatttttggtcaccaaaattcagctcgccgccatgagccgctccgatatccctgacatcaaggaccgccggccattttatctatatgtcgacgagtttcaaaactttgctaccgactcattcgctacgatcctatccgaggcgcgcaaatacggtctcaacctgaccgtcgccaatcagtacattagccagatggaagaaactgttcgcgatgctgttttcggcaacgtcggtaccgtaattagcttccgtgtttctgctgatgatagtccgattctcgccaagcaatttgaaccacagttcgagccaaatgacttactacagatgcacaatcgtaactttatcatcaacatggtcatcaacggcgagaaggctccagcttttagtgccaagacgcttaatctgccagccgcgcaagacgacaacaccggccggattatccaatggacgcgcgataattatagccgcaaccgcagcgatattgaagccgatatagccaatcgaatcctaccgccagaaaacctagtcgtcaaaaaacctggtcctgcctatacgccaccaaaaacacccgaacagcgagccgccgatcgcgccgcgcgccaagccgctaagcaaccgcaagaccagacccaaccaattgccaaacagccatcagtcaaacttgacaaaggagctgttggtttgctacaaatagaccacggtcaaaacagcaaagacgctgcaaaagccgcggcggctaatgactctggcgcatcaaatgcagctgctaaagccgctgctgacagagaagctacaaccgctactaatagcgatgacagcaaaccaaaacgcaaacgcactcgcagccgccggcgcaaaactccagcgacagctacttccaattcgtaatcaactattgctatgcctctaccgttagaaatagccaccacgtcgcatgctcatgacgctcaagttggcgagattattgatctattatgcaagcccagtatctgcggcccaatttcagacatactaggccgagatactttcatggaagcagctaccgacctaacgcagcgtttatacttgggtgagtacgccgctgcactggccagatacagcgatgaaagcagcaatactatcaaaccagttggcacaattatctatagccaggactcaaacgatcctaaaataacaaatttggaactaatcgtcgtacgagaaaaataccgccaccgaaaagttggtacgcgattattacaactagtcgagactgaaacagcattacgcggcgcaacgcaattacaaacactagcgccccagaaaataccaggcctacagaacctcttggcaaaaaacggcttctatttcagctgcatgaaagaggacgggggtttgtttttgcggtatcggaaaaggttaaaggtaccaaggatattgcaaaaaaataaaaaaccgcgtattataaagctacagtcccttaagtaaggattgtaccaatatctaaattgttctaggtttctataataatctggcggtaaaaatccgctgtaaagtatatgaaatactggagcaaagctctaatccgcccactcgttgggcggattatcttttttatgattaattccgcttatactttcaattactgtcttttgattatataataacaggtagctatcgggattaccaggcgagttaacccggatagccgtatatatcgatcaaaacataaaggctgtttttgaaaatagaaaggctattttgcaaaacataaaggcggttttatcgaatagataggagtataattatgctaaaagacatcataaaaaggacttctcaatgacgcaaagatcttcatattcaccgaaaaaatattcgctagggctagatataggcacgagctcaatcggctgggcagtgctagacttggataaagaacgtattcacgatttgggagtaaggatttttgagcgaccagaagatcctcaaaacggtgattcactcgccaaacctcgccgcgacgcacgttcagcccgccgccgtctgaaacgccgtcgccaacgtctcaatcacctgaaacaatttttcgtcgaccaaaatattctcacgaaagatcgagtcgaggaagttctaaattacaagtctgatttcaacaaattagacgtgtatggtctacgagcaaaagcactcaccgaggagttatcgcctgaagaattactcaaagttttatatcagattgccaaacgacgcggcttcaagtcgaaccgcaaggtcgtggaagagtcagacaaagaaggtggtcgtgttactagtgcacttaagactaacgagaaattcctcgccgacaacaattacacgaccgtcggcgaagcgctgagttgtgatgaaaaattcgcaccacacaagcgcaataagcgtgacgactataccaacagttttgcccgcgatgactttttgcgtgaactagaggccattattaaaactcagcaaaattataccctgaaaaatgttcccgaacagaccattaacgaattgatttatggaattaacgacgaacaagtcatcaacgtaagtgccatcatgtaccagcgtccatttataactaaagagctaatcgaaaagatggttggcaactgtacgtttgaaaaaaatgagaaacgagcgccaaaagccagctataactttgaggtgtttcgtttggcaagcgatttgtcgcatctcgtattcattcctcgcgacgccagcaaacgccaagccaagcgtgaaaatctagaggtaagattgtcttcagaacaaattagcaaagtcattgatctagccaaaaaccaaaaaagcttaacctataaaaaggtgcgcagtaccgcaggaattagtgaagactacgtgccaaaagatgtacacggcaagaagaaagagggtgacaaattcggcgaagacaatacttttggcggcctaaaagcatataacgacatcaggttagcactgaaagatttaccagaagattgggcgaaaattgataatgaatcggcgatcaatcaaatcgcctacatccttactacgcaaaaagccgacgagggtattcgtgccgaactagattcactgccgctttccgacaaagccaaagaagctattgtcaaaattaagccaaccaacttcaaagcattcggacatttatcaatcaaggctttgcaaaaaatcacgccacacatcctcgagggcatgacctacgacaaagcctgcgaggcagctggctacgacttcaaaaagcaatctgccagcctagagcaaatcaccaaccctgtcgtcaagcgtgccatcacccaaacgctgaaggttgttcgcgccattgagcgtaaatacggcaaaccatatttcatcaaagttgaaaccgctcgcgacctcgcgaaaaacttcaaagatcgtaatgcaatcaaaaaagaaaacgaagaaaatcaaggatataatgaagatattagatcaataattacagatgggtatgaagtatcgcctaaaaccaaaggcggtaagcagctcctcagccatctcagggagcttaacgtacgcttgaataaaaatgctgattttaatggtcagcagattattaaggtcaaactctaccgcgaacaaaacggtgtttgtttgtattctgataaagaaattgattttgagactatgctgcgcgatgacaacgcctatcaagtcgatcacatcgtgccgttttcacgctccaataacgatggaataaccaacaaagttctggtattaacagaggaaaatcaaaagaagggcaatcaaacgccatttgaatattttggtgcagacgaaaaacgctggaaagagtatgtagctcgagtagaatcgacttatcaaacgcgagaagttaaaaaaggtgacaaagatactggaactaactataaatataatggttatgccatgaaaaagaagcagaatctattgctccaagactacaaaaatgacagctggaatgtgcgcgccttaaacgatacacggtatattacacgatttatccaaaactatttgcgccagaatgttgatttcgccgagggcgaagaaaaacagcgcgtaatcgcgccaaacggcacgacaacagcgtatttacgtaaacgctgggggctagcaaaggatcgtgccgaggatgtattgcaccacgccaaagatgcggcagtcgtagcggcaattgacccaaaaattgtctatcaagcaaatctcttctcaaaagaacaggagatgaaactgtatctaaataatgctaaaacaattgatgaaaaacggcaaattttgttacaatctaccgacgaaaacactggcgaaattaccgatgaagtggcgtttactcgggcacaaaaagaactcgcgcaagctgaatatttcaagctgcgcagcgatgaagagacgaaaaaccgctttccaagcccatggccagattttagcaaagaaatcatgaaacgcactctcaataccgatatcaccacactgcaaaatgaactgtgcgggcttgataattacgacgaagaattccgcctgagcgtaaagccaatcttcgtttcccgcatgccgcgtcgcaaagctgtcgctcaagcacataaggagaccgtccgctcaccaaaggtcaaagataatgataagcgaaccgtacgaatgccgcttaataaagttaagcgcaaggatatcgaaaactctgtacttaaagaatctgataaatggctgtacgacaaattacttgagaggttaaatgctcatgataataatcctgaaaaggctttcactgaacctgtttacaaaaatgacaaaaaattcgataaaaacggcaaacaactgtcgccagtctcgaatatcaaagtatattcgacgcaaccaagcggattttatatcaacaacggtaaagctttcgtcaacaatgggtctatggtgcggcttgacgtatatcaaaaaccaaacaagaaaggaaaaatcgagcactttttcgtgccagtttacgcccatcaagttggtaaaaataagcccacaccaacaaagatcctaccagcaccaaaagggttcactgatgtagatgaaactttcactaaagtctgctctttgtatccgaatgattatgtgagatgctattttggtaatgaaattaaagaagggtattatgtgaaatatggcattaataatggagctatgcaggtgatagctcatggcactgctagtaaagataaggatcaccttatccaaatctcaccccgctcagcgaatctcatcgaacgctacgacatcgctatcctcggcgataattacaggtggttataaatggcctggcgtgtcgtagctatcgaaaatcccgccaggctaagtttgcgcgacaaccagctagtaatcgcgcaagaaactgaggcgactttgccaattgaggatattgatgcgctcattctggacggctatggcatgactgcgaccacaaatctactcacagcgctggcgaccaaaggcaccacaactgttatttgtgacgaaaagcatctaccaactagcgtacttctgccgtattcacagcactcacggcaggccaaagtttcacgccaacaacttgccatgagccaaccgctcaaaaagcaattgtggcaacaaattatcatcagcaaaatcaccaaccaagccgatgtcttacaatctatcgggttagacaacaccgccttgcgtacccatattagcgatgtcaaatcaggcgacactagcaatcgcgagtcgctagctgctcgcatatattttgaccagctgcttgatgatgccacgcgccgtaagccaatttggcataatgccgcgcttaactatggctacgcaatggtccgcagtcatatcgctcggcacattgctgcccgcgggctagtcgcttcgcaaggaatctttcatcacaatgagctcaatagttttaatttagctgacgacttgatagaaccttaccgtgccgccgttgatttatatgtactagaaaaagtcgccccgcttcacgtcggcgaccgcgacgctagcctcactaagcatgaccgtcaactcatcattgacatattaaattattgtgttataattgactgtaagaagtttactgtaaagcatgcgatcgagcgaacagttgaaagctttatcgaatgtattgaggtaaaggaggcgcgtaagcttcttttaccaaaaatcgcctcctaacagggaagggatgtcatatagaatcatgagggtcgcggtatttttcgatttgccgaccaacactaaagctgagcgcaaagccgctacgcaatttcgcaagttcttgctggatgacggttttgatatgctgcaatatagcgtatacacgagattatgcccaaaccgtgatgttgccgaaaaacacatgatgcgcgttaaacgccatgcaccagatagcggatcagtgcgattactgtacttaaccgaacatcaattcacgcacatgtacgttattgtcggcgagaaaactgtccaggaaaagactgttccggtcggccagttggcatttttctaaccaaaaatccccctcgtaacagagggggatttgaggaagtattataccaatatctaaattgttagggaactataactaatcatcatgttgtacagatatagattgcattataccaatatctaaattgttagggaactataaccgtgttgccgttcctaccgccgattcttccattataccaatatctaaattgttagggaactataaccgtgccgctccagtgatcaaacggaatactattataccaatatctaaattgttagggaactataacgtgctttctaccggctggaattgacttattattataccaatatctaaattgttagggaactataacgccagtgtcggtcatgaggaggtcggcaaaattataccaatatctaaattgttagggaactataacggattcgtcctctttggatttatcaactttattataccaatatctaaattgttagggaactataactcttcagataattgaccaacaacggacttgattataccaatatctaaattgttagggaactataacaaagcggcaagcgccctggacggcatggccattataccaatatctaaattgttagggaactataactcgctggttcgactttgaacccaccatctgattataccaatatctaaattgttagggaactataacggtaatcatattggcattgtcgccagtgagattataccaatatctaaattgttagggaactataacattatgcaacgccatttgtggcaatgcgtaattataccaatatctaaattgttagggaactataacgaggaaacgttcgtcgctgtggaagccatcattataccaatatctaaattgttagggaactataacccatagacccttgataaggtttgagccaatattataccaatatctaaattgttagggaactataacataataccaaatttgtttaatcaatgctctattataccaatatctaaattgttagggaactataacttcgcagtcaatgagcttatcaatcggcagattataccaatatctaaattgttagggaactataactaatcctcaaacctagtctcgctaaatccaattataccaatatctaaattgttagggaactataacgcttttcaatgaggctatgtacctcggccaattataccaatatctaaattgttagggaactataacaacggttgcatagcctttgtcgccaaccgcattataccaatatctaaattgttagggaactataactttcgatatcgtcatagcctaattatagcaattataccaatatctaaattgttagggaactataacgcactaccgttttaagagaccaaccgtgatattataccaatatctaaattgttagggaactataacacttttcaaccgctcttttaagtacgctcgattataccaatatctaaattgttagggaactataactaggttggctggcttttttcgtggaataggattataccaatatctaaattgttagggaactataacttgaggtacgggtgaggtctcgttccttttattataccaatatctaaattgttagggaactataactttcgtggtattttttcttaaactcctcaaattataccaatatctaaattgttagggaactataactaagtgggaatttagagcttataaacgacaattataccaatatctaaattgttagggaactataactactaccagtcatgaaagatttgtagtaagattataccaatatctaaattgttagggaactataaccgaggacgataactgggactatcttcatatattataccaatatctaaattgttagggaactataaccaatccgtgttctacccgatgatgtagacaattataccaatatctaaattgttagggaactataacaggaacacccgactagaggctgggtgagcaattataccaa

SEQ ID NO: 1916 - DNA, 15531 bp, synthetic construct
  source 1..15531: mol_type = other DNA
  misc_feature 1..15531: note = Synthetic
cgtttatctttctagcaacgaaactggttaaattagataataagaaaaagccatggatgtcagctattattgttatctcctgtacgatatacacattattaggtttgatgttttctgtgtttactgacggtttcatgccacaaattatgagtctccatttgctgcttttggttatagccttactatttttatattgcaaggaaagcgatattacacaaaagtatacctacgggctattagcaaccttttctgttattggtgttggtctatcctattttttcctacttccagttgcgttgggtatatttatctttactttagcggctgattatttttatagtaatcaaaaagcaaagttgtcaaaacttttgctgggcagtcttttgtttattgtcagttttagctttgtacagggggctatttatgtattacttgagagggtgacatcagataaaattaatgatcagggtggggtgttggtttttgacgtattctacgtgctaagtttggcggtgtttgctatggcatatttttggcacaatcataagaagcgaacagttaatcctctaactattgggctagttgtgtcattagtattttctctggcgttatttatatttcaaaaaatgaccaatggtgaagtcagctattattatcataaatctgtattaagtttactcctgttgactagcttggttatggcaatgctaactatgtcgcttatagacaaagcgcggtcaagtggcgtcaagattttaatgattctaggtattataatgatggccttttcaaacggggttggtgtgtttggagtttatttgcagggtaaggtaaaggcagcgtttaccgcaccagagttatttgaccatgcgattactatagctgagagtccaatctgtcgagaaaagtctacggctatactttcagttagaagtgatcagaaaactgatggtgatatattttttaatagatctatgatgactctgactggacagtctactactacacaggaaataatttccaggtggtcaactcctaatgctgacatacatagtgcaaagcaggttatagctaagactttgctcgaggacaaaaatataaccccagaatctcgtctcctgattttgacgcgtagtgacgacataaaggctatatttattgaggttttaggtaatgaaagagtattatttgctgaccccagcaacgtatcaaaggatagcttgagtgggatatgcagcagattacgaggcatgttttagcttgattgacaatctactctaactagatacttgccataaccagatttcttgagcggctcagcaagcgtgttaagttgttctcggctaatccagtcatttttgaaagcgattttttctgggctaccaatgatgcggccagttcgtttttggatgacgcgaacgaaatcagcggcatcagttaggctgtcgatggtgccggtgtccagccaaacatcgccattatctagagtctggacttgcaatttactgcggcgcagatattcagcattgatggaggtgatttccagctcgcctcgtgctgaaggctggacgtttttggcgatctcaataacatcgttatcataaaaatataacccgaccacggcgaagtttgattttggctcggctggtttttcttcgatggagatggcttgattttgctcatcaaactcgacaacaccatatcgctctgggtcagaaactttgtaggcaaaaaccgtaccgccgtcaggattggtacactcctgtagggactcatctagccgctcaccgtggaaaatattatctcctaggactagagccactttgtcgttgccaatgaattcttcaccgataatgaaagcctgtgctagaccttctggtttgggctggacagcatattccagattgataccccattgcgaaccgtcgccaaggagtcgctgaaaaccggcttgatcatccggtgtggtgatgattaaaatatcgcgaattcctgcttgcatcagcgtagtaagcggataataaatcatcggcttgtcatatattggcattaactgtttactaatcgcttgggtaattggccaaaggcgcgtcccagatccacctgctaaaattattcctttcatcattattcctctctaatttactaatactatgatatcatatcaattaatggatgtaggaggtgctatatatgggtaaaagtaataaaattaacgtaggtcttgtgggtacgggatttatagcagagggttttgtcaatttggcgaaaactctcgatgatatagaggttatatctgtgttaacgcgccgtcctgtatcttccttagggaaggcttttagtgatgttaatgtatgtaataatatagaaaacttcttaaatcatcatattgattgtgttgtagagtgttcgggcgatccaatttacgccacggaagtaataggtcgtatttttgaagatgatatcccagttattactatggatgctgaacttcagatagtatctggaagttggttatcgcaaagaggtgtgattagtgaggctgaaggagaccagcctgggtcgttggctgcactggctgaagaagtaagatctatggggttccagccagttgtatatggtaatataaaaggatttcttaataataaaccaactatacaggacatgaatttatggtcaaagaagcagggtattagtcttgataaggttacctcatttacagatggcacaaagattcaaatagaacaagcattagtggcgaatggacttaatgcagatattattaaagatggcatgctggggttgactgccgacactcttgagcaaggagtgtctaaaatgtcaaaatatattgagagcatagataggcaagttagtgattatttattatcaccaaaattgccagctggtgtttttatatttgccaaacacgacgtatgtcatagtaggttcttgaagtattataagatgggtaacggtccatggtatatattcctaagacctttccatctgtgccacctcgaaataccaaaaacaatacgacgcataatgcgtggaaatggggtactattaaataatagcagtattccaactatccaagtatatggtattgcaaaaagagatattgcaaaaggagagaaaatcgacagagcggctggtagttttactattcgcggcgaggcgatgcctattaaggtcaataaggataaagtcccaataggattaattgcgaatgctacatttaaaagagacattaaagagggcgaaattatttcgtttgatgatgtaaaaatacctaaatcattagctcgtactgcatgggaagatactctaaaatgtctgtagctatcgacaaacagcacaatcgaacgattaatcattttctcgctgatacctggtggtatggtttgacggatagaatttcaacagacgagttttataggttagcacaacagcgcaaagatgagggcttttcagctattcaattagtaatgggtatacctcctgaggttgctatcgatagccctcaatctcatggcggtggcaagccagccttctatttacaagagtcgaatttaattataaatcaagattatatagctgctgcacttgaaaagatagaaatactaaacaagctgcatttaaaaccaataatatatggtggttggggtccgcaaattggtcggattggtcgaaataatatgattgaatggtggaggagaatagttaaagttacagaaaaatttgatccaatttattgtctaaccggtgaaattgatttgcgggttcatactcagtctaggaccataatgggaaaagtttttaataaatttaacatttcttcaataaaacgaaaaagacaaatagcagaatggttgcaagtgtataaagaagttaaaaagacaactagactgccagtaatttgtcatactacacctaatatggatagctggtctatcagtcgagatttttctgctattaccgcacaaacagggcactcagagcgttctcgtagctgtttatggatgctgcctatgaaatacagtttttccaaaaaaccatttataaacctggagccttggtatgaaggtattagcaattcgttttttgaaagcgatcaaatatttgctttttgggtaagtatactatcaggtgctagtgcgtattgttatggcagccatggtatttggaatgttggtgatggaaatttcttggctcactggggtcggcgcacttttcaggaagctaaaaaatctgcagtgccattaaaaataggaaagtcgaatagattgtttttatgtgctaagggttttatgcaggggaatataaatagtaaggctagcggcgttggagataatgtttctattcaaatgattgacaagagaggtcgcaagataatttatgcacctaagggttactcggattttactgccaaagatttaatatatgacccaagtcaatgtaattttatcaaagaaaacataccagataagacggttgtattatctggttttacccatatagagaataagcttttgaggcagtctgttaatagtgttaaataggctaactttagtttatttaatgatgaattcacttaaatcatctacccaattacgactagtaaatctagtatcatgtaacttgtccaagctcatatcactaccaagcggtcgcggtgcaattccatctttgccggcaaaatattcagccgttgtcgtattggtaacggttaggtcattgcgcccagctagctcaaaaattcgcctggtaatatccgcccagctttccagcgggccatcatttgtggcattgtatgtgccgaatggtgcttgagttgatagcaggtggtcaataattctcaccaattcacgagtaaaggttaatcggccaatttggtcatgaacaacagttggtgaaatgttcttttccgccaatcccagcatagtgcggacgaagtttttaccttcgccaatcacccaagtagtgcgcagcaagtaaaaattatcgagttgctcgactaataaatctccagctgcttttgaggcgccataaacgctcaatgggctgaagtcttcattttcaaaatgaggttcttttgttccgtcaaatacgtaatcactagaaatatgtactaaagtcatgttgtgagtgcggcaaactcgggttaggtttgcaaccgctgaggcgttaaccttccaagctgctacgcgaccttctggtgtttcagcgccgtcaacattagtaaaggctgctgcgtttaaaacgatcgatatccctgaccagtcgaatgactcaactgattggcggtcagtgatatccatctcgtctatgtcggcgaaccgtgcttctggatattgttgacgaagtgctcgtcctagttgaccatttgctccgacgataaaaatgttatttgaattcatattaaacctccattggaattacatttgtaagtagtggatgagcggcgtctttttcggaaatgatcgcttgctcttggctgattggccagttaataccgagtgctgggtcaaacagattgacaaaggtgtattttgcgtctggtgaccagtgtgcgtcaaccaggtatgtgtaggcgatgttatcgtcaagtgtttgatagccgttggcgacgcctttcggtacgaaaattgccgtgccaggattgatttcatgtgtgaaaactcgaccgaagctgtcgcctttgcgcaaatcgcaccacgcaccaaagacgcggccattggcggtggagataaatttattccatggctcagcatgcagaccgcgggtagcgccggctttatcgttgaagctgatgttgttttgtacgatgtcaaacgacggcagacccagcgcttccatcttttctttttggtagttttctttgaaccagccgcggttgtcgccatggacgggcagttttaccacaaacagcccagggatgggggattcggtgacggttagtttattatagttatttggatcaaaattcataaaatctcctttaatttagcaaaaccttgcttaatatcttcgcctgacagcatctcaaaactaatctcgtcaggagatagtgtcactatttcggaaacatcatcatgtggctttagctgtacaccttcatgaattactgcccagaataaagttgaaataactggtatgttttcgccttgataatagtaatttgaaggtgctgagcagaggtaaacaggtgtactgtaatggtcttgtgttaactctgtctcctcggtaatttcgcgacgtacagcatcttcggcactctcgtttatttccataaaaccgcctacacaatccagtagacctttatttgggtcaaatttacgcctggcaagtatgatactttgcttatttggcgttagaaagaatatacctgtagctggtacaggactattgaaagtactgtgttgatttttacatttccaatattcttcggaaatcttgtttagggttgtgccacatcttcggcaaaaatttatctcacgttgcttagatctgtctgcgtgtggcatggtttattgcccctgttttgcatacgctgcttcgacggcgtctttttgctcttgccaccagctttggttgtcgcggtaccattcgatggtttgcattagaccatcgcgcataccagtttgattgtcagtgtactcaggttgccaacccagctcacgtcgcagtttgctggagtccatggcgtagcgcatgtcgtggcctggacggtcgttgacatgctcgtaccaatctttgcctttacccatcaattcgcaaatcagctcaatcaccattttgttgttgacatggtcgttgtcggcgccgatgatgtaagtttcaccaagcttgcccttttccaggatgaggtgaactgccgagttgtgatcgtcaacgtgaatccagtcgcggacttgctcgccagtaccgtacagtttgggcttgatgtcgctcaaaatgttagtaatttggcgcggaatgaacttttcgatgtgttggtatgggccgtagttgtttgaacaattggaaatggtggctttgatgccgaagctgcggacccaggcgcgcactagcatgtcgctagaagctttagtgctggagtagggactagacggattgtacggtgtgtcttcggtgaagcggtttgggtcgtcgagctctaaatcgccaaacacttcatcagtcgagatatgatgtagacgtttgccatgcttgcggacagcctcaagaatggtgtaggtgccgatgacattggtctcgacaaacggccacggattacgcaaagaattatcattatggctttcagcggcaaaatgcaccacaatgtcagtttcagatactaatttatccatcaactcggcgtcgcaaatatcgccttctacgaaattgatctggtcagctactggctgtaaattggcgcggtttcccgcataagttaacttgtcgataacggtgatgtcatattctggcttgtgtttgacggtataatgcacaaaattcgagccaatgaatcccgcgcctcccgtgactagcatctttgtcatatttatattgtaacaaattaatatattaaaatatatttttagtctgcaaagccatttggattatttgactgccacttccaactatcggcacaagcttgttctatagaataaacagtttgccagtcaagttctttcttggctttacttgcgtctgcataagaagcggcaatatcacctggtcttctatctgttatttcataaggtattggctttcctgcagctttactaaatgcatcaattagctccaatactgagacacccttacctgaacacaaattataaattgcaacacctggcttactgtggtttaaggctgctgtgtgtcctgatgctaaatccatgacgtgtatataatcgcgtacacccgtaccatctggagtgtcgtaatcatttccaaatacaccaacctttgcgagtcttcctacggctacttgagtaatgtaaggtaaaagattatttggaatgccatttggatcttcgccaattaaaccagatttgtgcgccccaactggattaaaataacgcagaatagtaacttcaaaatctgggttagctgtggctatatctgttaatgtctgctcaatcataaattttgtccatccgtaaggattagtaatgccgacaccagcttgatcagattcagtaattggtaatttttttggtgttccacatactgttgccgagctagagaatactattttattgacatcaaatttactcataacatcaagtaaaactaaacttgattctagattatttaaataatattttagaggttgttcaacagattcaccaactgctttaagtcctgcaaaatgaattacagcatcaggcttttccttttcaaagattttttctaacttagatctattacgaatatcagcttcgtaaaatggaatttctgttttagtaattttattaagcctattaataacttcctttgatgaatttgagagattatcaacaatgactatatcatttccattctctataagctctattgcagtatgtgaacctatgtatccagttccaccagtaagtaaaatcttcataaaacgaatcctttctataatgtaattgtaactactattatataatgtaaatatgataaccgtaattatagctggtggcgctggtactagactgtggccactttcaacgccaaacaatccgaaacagcttttgactctaactagcgagcgaactatggttcagcaagcttatgatcgtgcctctagactaggggatacggtatatattgttactgaatctagtcatgcagataaactacgcgatcaacttccagaactccctagtgatgcctttttaatagaaccagggcgtcgaggtacggcacattgtattatttttgcacttgattatattacacgcaatcataaaactaatgaacctgttgcctttattcattccgatcataatgtccgtaatattaaaggctttaagcaatcttttcaatcggcggctactatatctcagcagaatgattcaatcgcgctagttggcattgaacctactgcaccgtcaactggttttggatatattgaatgtggtgatttaatcgataaaagtaataatgcatatacggtaaaatcatttaaggagaaacctgattatgaaaccgctaaaaaatattttgcttctggtgattatttatggaacggcggatattttgttgggtcagttgatatttttgtaaaacaaatgcaacaatttgcgcccactttgatggaagattacaataaattaagattcttatctcacttcgctagtgaggaatattacaaaacatatcttagttttgatgttcaagcaattgatacagtcttgatcgaaaagatgtcgaacttatttatgatttcggctagttttgattggatggatattggaaattttaaagatttatatgatgtccttataaaagatgaaaagggtaattattgcaaaggcgaaaatatttatattttagatactgatacggcttatgtccgtaatgaagagccagataagccagtcgcggttatcggattagataatattgttgtggttaatacgccggacggtgttttagttgcaagaaaggatatagctgctaaaacaagtgaaattactaagatgttgaataaaaaaataaattaagatccatattgccatttaaaatgtagcgtgatatatttgaattacagtcccttaagtaaggattgtactaatatctaaattgttttaggtttctataataatttagcaacttagggcgacgatcttgatcgtgcagctacggttgagaattctattgtgaatctaaagcaaagctctaatccgctcactagttgggcggattatcttttgtgcgtttcgattcctcttatactttcaatcattatcatttgattatataatataatcaacaacgacattataaaaggggcttctttatggcacaaaaatcttcatattcaccgaaaaaatattcgcttgggctagatatcggcacctcgtcggtcggctgggcggtattagacctagacaatgagcgtattcacgacttgggagtgaggatttttgagcggccagaggatcctcaaaatggcgattcgctggctaaaccgcgacgcgacgcccgatcggctcgtcgtcgtctgaagcgtcgtcgtcagcgcctaaaccacctgaagcaatttttcgtcgatcaaaacatcctcactaaagatcgagtcgaggaagtcctagattacaagtctgatttcaacaaattagatatatacgccttgcgatcaaaagctctcaccgaggagctatcacccgaagaattgctcaaagttttatatcaaattgccaaacgacgcggcttcaagtcgaaccgcaaggttgttgaagaatcagacaaagaaggcggccgcgtaaccagcgcactcaagactaacgagaaattcctcgccgacaacaattacacgaccgttggcgaagcgctgagtcgcgatgaaaaattcgcaccacacaagcgcaataaacgcgacgattatactaacagttttgcgcgcgatgattttttgtgtgagttagaagctattattaaaactcagcgaaactacgccctgaaaaatgtccccgaaccagctattaatgaattgatttacggcattgacgatggacaagtcaccaatgtcagcgccatcatgtaccagcgtccatttatgaccaaagagttaatcgaaaagatggtcggcaattgtacttttgaagacgatgaaaagagggcgtcaaaagccagctatagtttcgaggtatttcgcctggcaagcgatttatcgcacctcgttttcattcctcgtgatgccagcaaacgccaagctaagcgcgagaatctagaagtaaggctatctccggaacaaattaaacaagttattgagctggccaaaagccaaaagagcttaacatacaaaaaagtacgcagcaccgcaggaattagcgaagattacgtgccaaaagatgtgcgtggcaagaaaaaagatggtgatgaattcggcgaggaaaacgtcttcggtgggctcaaagcctacaatgatattaggcttgcgctaaaagatctaccagaagattgggcaaagattgataatgaatcggcaatcaaccaaatcgcctatatcctcacgacacaaaaggccgacgaaggtattcgtgccgaactagacatgctaccactttctgataaagccaaagaagccatcatcaaaatcaagccaaccaacttcaaagcattcggacatctatcaatcaaggctttacaaaaaatcacgccacacattctcgatggcatgacttacgacaaagcctgcgaggcggctggctatgacttcaaaaagcaatctgccagcctagagcaaattaccaaccctgtcgtcaaacgcgccatcacacagaccctgaaggtcgttcgttctattgagtgtaaatacggtaagccatatttcatcaaagtcgaaaccgctcgcgacctcgcaaaaaatttcaaagatcgtaaggcaattgaaaatgaaaataaggaaaatcaagcacgcaaccaaagcattattcagacactaaacgagaacggcatagtcaccccaaccggtcagcaaatcattaaagtcaagctctaccgcgaacagcagggcaagtgcttgtactctggcaatccaattgactttgaaaccatgctgcgcgacgacaacgcctaccaagttgatcacatcgtaccgttttcacgctccaataatgacgggattactaacaaagttttggtattaacagaggagaaccaaaagaaagccgacaggacgccatttgaatattttggcgcggacgaaaaacgctggaaagagtttgcggctagagtagaatcaatatacaaaacacgcgacgtcaaaacttctgacaaagctacaaacgccatcaactacaaatacaacggctacgccatgaaaaagaagcaaaatctattgcttcaagattacaaaaacgacagttggaatgtgcgtgcgctgaatgacactcgatacatcactcgatttatccaaaattatttgcgccagaatgttgactttgccgaaggcgaagaaaaacagcgcgtcatcgcgccgaatggcacaacaacggcatatttgcgtaaacgctggggattggccaaagatcgcgccgaagatgtactacatcacgccaaggacgcggcagttgtggcggcaatcgatcagaagattgtcatgcaggcgaatttgcacgccaaacgccacgaaatcaaagcactgctcgcggcgaccaaaacaatggaagaaaaaaccgacaagctcactggcgaaatcaccgatgaagacgagttcgacaaagcacagcgacgtaaagccgccatcctcgtattgtcatctaaacatttccctcaaccatggggtgactttagcaaggaagttatgaagcgcaccctcaacgctgacattgcaacactacaaaacgaattacgtagacttgaaaattatgatgacgagttccgcttgggtataaagccaattttcgtttcgcgcatgccacgccgcaaggctgccgctcaagcacacaaggagaccatccgctcgccaaaggtcaaagataatgatcagcgaaccgtacgaatgccccttaataaagttaagcgcaaggatgtcgaaaactctgtacttaaagaatccgataaatggctgtacgataaattacttgagaggttagatgctcatgataataatcctgaaaaggctttcgctgaacctgtttacaaaaatgacaaaaaattcgacaaaaacggcaaacaactgtcgccagtctcaaccatcaaagtatactcgaccaaacccgatgatagtggaaaatatatcaataatcgacgtggttttgtcgataatgacagcatgataagagtagatgtctatatgaaaaatatcgacggaagagagtatccatttttcgtccctatatacgcacactccgtaaaccatcctacaagaaagatcagaccaactcttaggggattttccgaaattgacgagacattcaaatatatatgcggcttacatccaaacgattatgtaaaaatcaagtttgatgatgaaagaaaaaatgttgaaggctactatattcagtacggaagttcaaacgcagccatagatctgttgcctatgtatgcgtcggggaaagatcaacgaatcacatgttcagcaaggctggccattaaaatcgagcgttacgacatctccatcctcggcgacaactacaggtggttataaatggcctggcgtgttatagctatcgaaaatcccgccaggctaggtttgcgcgacaaccagttagtaattgcgcaggagactgaggcaactttaccaattgaggatatcaatgcgctcattctggacggctatggtattaccacaaccgcaaacctactcacagcacttgcgaccaaaggtactacaactgttatttgcgacgaaaagcacctaccagctagcgtgcttctaccgtattcacaacattcgcgccaagccaaagtttcacgtcagcaactcgccatgagtcagccgctcaaaaaacagttgtggcaacaaattattatcagtaaaattaccaatcaagccgatgtcttgcggtcaatcggattagacgatgccgccttacgcacccatattagcgatgtcaaatcaggcgacactagcaatcgtgaatcaatcgctgctcgcatttattttgaccagctactcgacgacgccacacgtcgcaaaccaatttggcataatgccgcgctcaattatggctacgcgatggtgcgcagtcacatagctcggcatatcgccgcccgcgggctagtcgcttcactggggatttttcatcacaacgagcttaacagctttaacctagccgacgacttgattgagccttaccgtgccgccgttgatttatatgtcttagaaaaagtcgccccgcttcatgtcggcgaccgcgacgccagcctcaccaagcacgatcgcgagcttattattgacatattaaattattatgttataattgatggtaagaagtttactataaaacatgcggttgagcgaacagttgaaagctttatcgaatgtatcgaggtaaaggaggcatgtaagcttcttttgccaaaaatcgcctcctaacagggaagggatgtcatataaaatcatgagggtcgcggtatttttcgatttgccgaccaacactaaagctgagcgcaaagccgctacacaatttcgcaaatttttgctggatgacggttttgatatgctgcaatatagcgtatacacgagactgtgcccaaaccgcgacgttgctgaaaagcacatgatgcgcgttaaacgtcatgcaccagacagcggatcggtgcgattactgtatctgaccgaacatcaattcacgcatatgtacgttatcgttggtgaaaaaactactcaggaaaaggccattcctgtcggccaactagcatttttctaaccaaaaatccccctcgtaacagaggggaatttgaggaagtattataccaatatctaaattgttagggaactataacgccaagattgtagttagcgggatattattgattataccaatatctaaattgttagggaactataactaaattactgccatctgctatataaaaattattataccaatatctaaattgttagggaactataacatggcatcaaatactgcccttaactcacccattataccaatatctaaattgttagggaactataacctcttgttaattatcatagtaccactgtttattataccaatatctaaattgttagggaactataacaagcaccacgtcatcaatgtctggctcgttattataccaatatctaaattgttagggaactataactaaattacctccatctgctatataaaaatattataccaatatctaaattgttagggaactataactctcctttgtcgcttttacctccattgtttattataccaatatctaaattgttagggaactataacggggctttacttcagaaaaagataagagcaattataccaatatctaaattgttagggaactataaccaatattcatgttctggtttatcgcaacccattataccaatatctaaattgttagggaactataacagattttcgtaagttaccagataaaccgctattataccaatatctaaattgttagggaactataacaacgctgcacccttaaataatacagttgggattataccaatatctaaattgttagggaactataacctcaaaatctacttatataaaaaattctttattataccaatatctaaattgttagggaactataaccggtcaaaattgttgtatatttatcaacccattataccaatatctaaattgttagggaactataacacactgagagtctttattt

SEQ ID NO: 1917 - DNA, 14822 bp, synthetic construct
  misc_feature 1..14822: note = Synthetic
  source 1..14822: mol_type = other DNA
taaaaatttagtcatcgtcgagtcaccagccaaagctaaaaccatcgagaaatatctcggtagtgattttaaggtgttatctagcgtcggtcacatccgtagcatcgccaaaaagaccaaagacggcacaccgccaatcgacatcaaaaatgacttttttgctacttatgagatcgatccagataaaaagaaaatcatctctgagcttaaaaaatcagtcaaatcagtcggcaaagacaatgtctggctggctaccgatgaggatcgcgagggtgaggctatcgcttggcatctctgtaaagtgctcgatcttgatccagaaaccactaaacgaatcgtttttcacgagatcaccaaacaggccatccaagccgccattgaaaaaccgcgcactattgatatgaatttagtccaagctcaacaagcccgccaggttctggaccgcatagttggctttgagcttagcccagtagtttggcaaaaagtccccggcggcaaatcagctggtcgcgtccagagtccggccgttagactattggttgaacgcgaaaaagagatcaacgcttttgaaaacagccatcaattcaaggtcacagccaatttcatcgaccaagaccaagaattcaaagccgaactcaaccaaaaattcgacagtgaagatgaggctaaacaattcttagataatctaatcggcgccaaatttgtagtctctgacatcaccagaaccccaggtagccgcaacccagccgcaccatttaccaccagcaccctgcagcaagaggccaactccaaactcggctttagctccaaagccaccatggcagcggctcaaaagctctaccaagccggaaagatcacttacatgcgtactgacagcgttaatttaagcgcccagtcgatagccagcgccaccgatttcatcaagcgactttacggacctaaatacagcacagttcgaaaatataagaccaaaaacgccagcgcccaagaggcccacgaggcgatccgcccaactgacatcagccgcgaaaccgttagctctagcgaatacgatcagaaattatacgacctaatccgtcgccgcaccctggcttcccaaatgagcccagccaaattagaaaaaactactgttactatagacataaaatcagctaaatcgattgataaaaagctacatttcgaagccaaaggcgaagttatcacttttgatggtttcttgagagtttacggtggtggcaaagaaaaccaattaccaagcctcaaatcaggcgacagcctagaaactcatcaagtatcagctaggcagactttcgctcgaccaccagctcgctacaccgaaggttcactagttaaaaagctcgaggaattaggtatcggccgaccaagcacctacgctaccatcatagacaccatccaaactcgtggctacgccgaaaagggcgatggcgagggcgaaccgcgccaagttatagttttgaatttcaacggcgaagcagtggatagggaagtcgtcgaagaaaaaactggctcaaccaggggtaaattattaccaaccccagctggcgagttgatcgctggattcttgaaagatcacttcacccaagtggttgattatgattttaccgccaatgtcgagcaagaatttgaccaaattgccgctgataaactagctaaaagcgacatgctacatggtttttatacgccatttcataaactgatcgaaaaatcaggccagatcgaccgcagcactgtcggcaccaaccgccaagtcggcatcgatccaaagtcaggccagccaatcatcgctcgcttcggtcgttttggtccgatgctgcaactcggcactactgatggagatgaaaagccaaaattcgcgcctttaccacgtggcgccaaactagaaactgtcaccctagaacaagccctagagatgtttaaattgccacgaatagtcggtcagactgaagacggtcaagatatcaaagccaacatcggccgctttggtccatacatccaagtcggcaaattattcgtcagcatcaaaccagaagatccgcacaccatcactctagaaaaatctctagaattatatgctgccaagctaaaagctgaggctgaaaagaacatcgctgactttggtgacggcataaaagttctcaatggacgcttcggaccgtacatcaccaacggcactaaaaacgtcaaaattcctaaagacactgatccaaaatcgatcacacaccaacaggctaaagacctgatagctgccgcgccagccaaggctcgtcgaaccactcgaaaaaagaccaaaaagaaagcttaagcactagccatagcgttatacaatataaacaccacgctgtatataattgttactatgtattgcaaaaatagtaaagaacatgctataatttataggaattgacaaaatgtttgacataatatagctaaaatgttattatagaaaacatcaaatcatagtaaaatcattaatattctgaggtgaggcggagaggaagacgcacaggttatgagcgaatcaacaaaaactgacatttcgacaactttggtagattcagtcaagaaaattttagccgatatcaatcaagagcgtgaacgtgagattatttctcgtcgttttggcttgtatgatcgtaaagagactctagagcagatcggcgatatgctgggtattaccagggagcgagttcgtcagttggagaaggctatcttgtctcgcgttcgccaaaacgttagcgaaggcaatatgccagttgttaacgccatggaaaaaactctgactgctaagctatcagagatgggccgagcagctcgtatccaggacttggctagcgaactactaggtcaggcgccatcaccgaccgagaaagcccacatagcattcctagctgaattagcaccaaacatcaccgttatcggtgaaaatgacgattatttccagtcagccgccatcagctcattgggtgacgctagttcaatcaagaaaaagattgaagaaattgttaaattcatcaaaaagcacggcgagccaatcacagctgatgctatgcacgaacagatgaaatacgagcatccatcaaacatcgccgctctagccagccttagcaaaaaactagctcagctaaagggtaattggggtttgatcaagtggccaactgttaacccaaagaacattcgcgacaagatctttgttatcctagaagacaacggcaaaccaatgcacttttcagccattgccaagtcaatcaaacagagcgatttcaagcgaaaagacgttacgactcaagcaattcacaacgaattaatcaaagacaagcgtttcgtcctaatcggccgcggcatctacgcactaagtgcctggggctactctcgtggcacagtaactgatatcatcactgaagttttgaaaaaatcagacacacccttgcaccgagacgagatcgtcaaacaggtcttgaagagccgacaggttaaagaagaagaaaaaagttaagttgcaaactttcatcaggggtgagataataaaactagcatgaactttatctcatggatatttaacctgttattgacctggtatatctggataccgctggtggctattctatcgtatttaacctggagaaattacaagcaggccgatgatctcggggaagttgagagtgtcctattagtactggaaattccaaaagccaatgataaaaaggagttggctgctgagcaattattttctagtttgcacggaatcttacgcgacaaaaaagaactgcgcctgtctgggggcaggcaagagcacctcagttttgaagtagcatcaatcaatggtcagatcaggttttatgtttgggtaccaaagactttgcagagtttcgttgaaggtcagatctacgctcagtacccaaccgtccagatctacgcttctgatgaagattacaccgatcatgagcgtaattattcaaccgtttataccaccgagctaactactaccgcctcagaatttctaccgattcgcaccttccaatcttttgaggttgatccactagccggcatcactggaacattggctaagttagagtcaaccggtgaggaattatggatccaggttttggtccgaccgataccagatgattggcaaaacgcagccgatcgttggattagcggtatcaaaagtggccgtagctcagtctttggtgctggcggtggtgctttgcagtgggcaggtggcgttttgggcgctctatggaaaccaccagaacagggcgactccaaggagagtaaaggaccagaattatcagaacgcgacaaaactcgcgtagctgaggcagagaagaaggctacaaaactaggctacgaggttaaaatccgcctagcatatctaggtgacagtcaggctaatgccaaactgcgcacccaagcactagtcggaactttcaaacagttcaattcaaccaaccttaacggtttcaaggccaccaaatcctcactcggtagggaattcttagataattatcgccgtcgatcattcagcggcaataatttcatcctcaacaccgaggaattagcttcagttttccatttgccgcataccaatgttgaaacaccaaacatcgtctgggccagctctaaaactgccgaaccaccgtccaaactaccagttctaactggcaatgacgcctcagatgaccagatatcagcctttggtgtgaccaatttccgcggcatcaatcatcagttcggtatgctgcgatttgatcgttcacgccacgtttatatcatcggtcagactggatctggtaaaactggactgttggagctgttcgcgctaagtgatatttatcataatcaaggctatgccgtcatcgatccgcacggcgatttcgccatcaataatatgaaatttatacccggcagccgcctcaaagatgtagtctatttcaacccagccgatacggcttatccactaggttttaacccattagaagtcaccaatccaaatcaaaaaaccaacatctcatcagaggtgatcggcgtgctaaagcgcatgtttggtgattcttggggcccacgactagaatatatcttgcgctataccatcctggctttgctcgatcgaccagagactacaatgctcgacatcacccgcatgctaactgataaaaaattccgcaaagaaaccttatcttactgtcaggataccgtcgtactacaattctggaacgtcgaatttgccagctggtctgataagttccaggctgaagcgatcgccccagtgctcaacaaagttggcgcctttacggctaatcctgtcatccgcaacatcattggtcagccaaaaagcaccttcaacatccgtaaaatcatggatgagggcaaaattattatcgttaatctatcaaaaggtctgatcggcgaagacaacgccgctatcctaggttctttcctggtcaccaagatccagctggccgccatgagccgctcagacataccagatattcgtgatcgtcgaccgttctatctatacgttgacgaatttcaaaacttcgccaccgactcatttgccaccatcttatcagaggctcgtaaatacggcctcaacctaaccgtggccaatcagtacatatcccagatgagcgaaactgttcgtgacgctgtatttggcaacgtcggctctatgatcagctttagggtttcagctgatgatgcgccaatcttggccaaacagtttgagcctaattttgaagccctagatctgttacagatgcacaatcgtaacttcgttatcaatatggttatcggtggcgaaaagactccagccttctcagctcgcactctggaactgccaccgccacaagctgataacactagtttgattatcgaaaattcacgccgtacttactctaggaatagggaagaggtcgagcaagagatcgacaaactagtcaggccacagcagcagaaccaacctcagaatagccaagcaaaaaagccaaaactggccactaaaaattcagctcaacagcagggaaatgccagcagcgcttcagacgccaaaccaaaacgaaaacgaaccagaaatcgtaagcgtaaatcaaacgccccagaggcgcctaaaaccaccaaacaagcaacaaaagacgacgacccaactctattatcgcttagataaaaaaccaggttgtaatatttatgaaatttgaatataataacaactgatcccttaagtaaggatcatacagttatttgagttgttttaggtttctataataatttagtagaaatactaaagcaaagctctaatccgctcggctcgtccgggcggattatctgtttagtaaaggattggtttgcctcagaaaacattgtataattaagcacatgaataaccttaaatactctcttggactagacataggcacaacctcagttggttgggcagtaatcgatttagaaaaacaacgcattcatgacctcggcgtgcgcatctttgaaaggccggaaaaccctaaaaatggtgactcgttagctaagccacgtcgcgatgctcgttcgactcgtcgcagactccaccgtcgccgtcaacgactaaaccatctcaaacagttttttatcgaccagtctatactgacagatgaccagattaaaaacattctagaacccaactctgacttcaataaactcgacgtctatcatttaagagctgaggccctcaaacgcgagctaaccccagaggaattatttaaggttctataccagattagcaaacgtcgaggttacaaaagtaaccgcaaagtcgacgaagagtcggacgctgagggcggtagggtaataaaagccctcaaagtcaaccaacagctactagctaacaataaataccaaacagttggtcaggcactagctgaagacaaggcttaccaggcgcataaacgcaacaagcgcgacagctatacaaacagcttcgcccgagccgactttttacacgaactagaagagattatcaaaactcaaaaaccatatgcacttcgtaatgtcagccaacaggatatacaaaagctagtctacggcgttagcaatgatggcgaactaactgaagttgatgctattatgtaccaacgaccatttatgaccgaagagctaatcaaaaaaatggttggcgaatgcacgtttgaggtgggtgaaaaacgcgccccgaaagctagctatagttttgaggtatttcgcttcgtaagtgacttgtcaaacctggtttttatccccaaagatgccactaaaagacaggctaaaaaacaaaatttacacctaaagcttagtccagaacagatagaggcagttctagacgaagccagaaaagtcaggtcgatgacttataaaaaagttcgcaaaacagccggaattagcgacgactacgcgcccgaatacgtgcgaggaaaagtcacgcaaaaagaccctcacggcgaaggcaacaaatttggcgaactaaaagcctatcacgatatcaggtctgctctcaaagattttccagatgactggcaaaaagtcgacaacgaagatacgctaaaccaaatcgcctacatcctaaccgtccagcgcgtcgacgatgctatcaaaaaatcgctcgagccgctgccgatttctgagaagggcaaagaagctctactaaaagtcaaaactgccaactttaaagcatttggtcacctgtccattaaggcgctgaaaaagataacgcctttcatcctaggcggcttgacttacgacaaagcttgcgaagcagcaggctacgattttcgtaaaaaatccgccgacctgagccaaataaccaacccagtggtcaagcgcgccatctctcaaaccaacaaagtcgtccaggcgatcattcgcaaatacggcaagccgtactatatcaaggttgaaaccgtccgcgacttagccaaaagctacaaagaccgcaaaaccatagaggccaaaaacaaggaaaaccaagccaataaccaaaaaattatagaattgctgaaagagcatggctgtgtcgcgccaaccggcatacaaatcgtcaaattcaagctgtataaagaacaggacggcaaatgtttatactccggcaagcctatcgacttaaaaacgatgctcgccgacgataacgcctaccaggtcgaccacatcgtgccattttcgcgttcaaacaacgatgggttgaccaacaaggtattagttttgactgccgagaaccaaaacaaagccgaccacactccatacgaatactttggacacgacgagcagcgctggcgatcatactgtgctcaggtcgaagcaacatacaaaacccttgatattaaagccgcccaaggcaaagacaaagcagccaactacaaatacaatggctacgctatgcgcaaaaaacaaaacctactaatccaggaatacaaagacgacagctggaacgtcagagcgctgaatgatacgcgctatataactaggtttgtacaaaattatctccgacagactgtcgagtttgctgatggcgacgaaaaacaacgtgtttttgcgcccaacggcactctaacgagctacctccgtaagcgctggggtctatccaaagatagagaagaagacgttttacatcatgcaaaagacgcggccgtcatagccgcaattgaccagtcagttattctcagagctaatctatattccaaaaaaggagaaatagccaattatttgtatgctgttaaggctatggaagaaaaaactgacagactaacaggagagataaccgacgacttcggctttgaccaagcacagcgccgtaagagcgcgttagaagtgctgtccagcaatcatttccccgagccatggccagacttcggcaaggaagtgcgtaaacgcactctgctcaaggacaccgaaactctgcagaatgaactagtcggactagaaaattacgatgaagctttccggcggcgagttaaaccaatctttgtatcccgtatgccacgccgcaaagcaaccggccaggcccaccaagaaactatccgttcgccaaaaattaaagacaacaaccaacgcactattcgcatttcactaaataaagtcaaaaccaaagatgttgagaactcagtattaaaagagtcagacgcatggctgtacaatactcttaaagaccgtttaaagcaacatgacgacaaccccgagaaagcctttgtggagccagtgtataaaaacggtaaaaaacaggacaaaaacggtcaaccattgtcaccggtatcaaccatcaaagtctattcgactcaaccatccggtttttatatcaacaacaataaggcttttgtaaataatggttcaatggtccgactagatgtttacaaaaaagccaacaaaagaggtaaaactgagcatttcttcgtaccagtttatacccaccaggtcggcaaaaaccgcccaaccccaactgagatattacctaaaccaaaaggctttagccatgttgacgaaacatttactaaggtttgttcgctgtatccaaatgattatgttcgctgtgtgtttgatggcagtagagccgaggaaggatactatgttaaatacaatattagcagtggagcaatgacgctaaacggacactattcagccagcaaagagcaagttaaatcagtatcagcacgctccgcatctgtcatccaacgctacgatatctcaatcctgggcgataacgctccgaggtcataactatggcctggcgagtaatcggcatccaaagccccgctagactaagcctgcgcgacaaacagctagtcatcgctcaggacgatgaggttagcttgccgatagaggacatcgacgcgctagtaatcgatagctacggcgtaaccacaactgccaatctactcaccgaactagcaatcaaagcaacaacagttgttatctgcgaccagaagcacctaccagctagcgttttgctgccatattcacagcattctcgccaagccaaagtatcacgtcaacaactcgcaatgagccagccgctcaaaaaacaaatgtggcaaaaaatagtacacacaaagataaataaccaagctgatgtactaaattattttggcttagatgataaacagctcagacaatacgccaaggacgttaagtcaaatgattcgactaatcgagaatcgttagcggctagaatatattttagccaattattagacgacgcgaccaggcgcaagcctatgtggcataactctgccctcaattacggttacgctatggttcgcagccacatagcgcgtcatatagccgcaagaggattgatcacctcacaaggaatatttcatcatagtgagcttaacggctttaatttagtagacgatttgatagagccctatcgtgccattgtagataagtatgtaatagagttaatagcgccatcacatataggcagtgatgactctagcttaaacaaggaagacagaaagattctagttgacatattaaattatcctgttataattaataataagaagtttactataaagcatgctattaacataactgtagagagtttcattgatagcatttataaaacggaggccagtaggcttctgttgcccaaaatttatacctcctagaataggaaaggaatgtcctacaagcttatgagagtggcggtaatgtttgatttgccaaccaataccaagtctgaacgacgagcagctacgcagtttcgaaaatttctattaaacgatggtttcgatatgctacagtacagcgtatatactcggctgtgtccaaaccgtgatgtagcccaaaaacacctgctgcgcgttaagcgtaacgccccaaatgttggatcggtgcgagtattatatataactgaacatcaatttacgaatatgcaaatattgactggtgataaaactgtccaggaaaaggctataccaacaaaacaattggcttttttctaaaccaaatccccctctttaacagagggggatagtgataagtattatacagttatttaaattgttagggaactataactcgttgttcgtccagacggcaggacacttattatacagttatttaaattgttagggaactataactctactgggcttatgatgctaaaaagctagattatacagttatttaaattgttagggaactataaccacgtgtaacatcaaacgttaaaaactggaattatacagttatttaaattgttagggaactataactctttattataactcgcacgcttacgcattattatacagttatttaaattgttagggaactataacttaccaattagtggttcacgaccaaatccaattatacagttatttaaattgttagggaactataacactcatttgggctgccgttacgttatatttattatacagttatttaaattgttagggaactataactatgcgatctgttatctctatagtgttgcattatacagttatttaaattgttagggaactataacagcatgcggtagatcctttagtagtttataattatacagttatttaaattgttagggaactataactgctactgttcgggtgtcgctcttggctctattatacagttatttaaattgttagggaactataactcaagactacgggtttcgatactggtgccgaattatacagttatttaaattgttagggaactataactagtagcctgagtacaaagaccagtcgtgcattatacagttatttaaattgttagggaactataactggagttatatctaattatgttggcggtgcattatacagttatttaaattgttagggaactataacctctacagcttcttctcgttcctatcgatcattatacagttatttaaattgttagggaactataacgaattatcggacaaaccctacagtactttaattatacagttatttaaattgttagggaaaactgtcgcagctaatattgccggaaactataaatagctgtatcatatgatctgcatggcttgaacatccatgctctctttccaccctcagtaatgggggtggattttatttaccctgctattgcgctaggaataagtactcaatcaagttatatatttagttcgctttttgttctcttttttataaacgcctagggaccaagactatcacagatgcacataatcacacgcccagaagccacgccagaccaacaagccgcacataggcatacgagccagcaagcataaaaataaagccggagttaatacaaaaagcagccaaaatccaaaaatgaagagacataggataatagaaggtagtagacaaacaaaagggcaaataacagattagaatcgtcaaaaacataaccataaagacgacgacaacccatgttttgaatataagtttaatgtcgcacaatgtaccttttacgtaacataataagtaagcctaggttgattgccgatacataacttttaacactaacattgctatgtcaggggactttgactgctatgctaaaccaaatcactctttaaaagttttttattgatattaattctacttttgttcgactttttctattttttattcccctacttcccttgtttgtgatatttgcattatttgactttttgtattttagtatgaataatatacttttttgacctatccctaaattagaacaaaaagcgaacatagcccactagagcagaagcctgccctcgttggctctacttataaaatatccgctgatctaccctaacatcgatataagccggcctacgaccacgctgcttgatatatctaatacccttgatcgcctggtcaacttgcggcttagcttccctatctagggtcatcttgattttatagctaaccccctttaggccgatctctacctgtctaaccgtaccaaacggtagcgagacctgatctaccaccatattattatccttaaataacgctaccacacgccccagaaagctcaagaactggcgattgataacttcctggccttgaccggcttctataccgctctgatccttcacagtcactgagggcttatcaaaataattcttttcaaatgtgataccttgatcatcaacaaagtaggtaacaccgccagaagaccactggatgactggttgtcggaaagttaatttcaaattagctttagctagaccaccactttcaattcgaaccgttctgacctctggagcatgatctagaaaatactgcttcagtaaactatgcttagtcaaaaacagcagtcgatcagtcggacgaatcgccaaataatcatcgataatttttagataatgttggctctgcttggcggtcttagctccaggtacctgcaaattaacctgaatagcagactggaacaaaactatcaacaccaacaccgccagcaagcccaagccaaccagaatatgggttaatctacgacgctttttcatcgactgatgagcttttaggcgctcagaattctcaactggtgaatcagccgttcgactatttaaagtcttgttacgacgataagcactggcgctagccatctgctgagccttcatctcagtctgacgctcagccgctaacgaacgacgatcaggtattttcttcgatttctttcgccttaacactactttttacctcgttttgataagacttgtttgataatcttggacatgtctttagccgcatcaggcttagcaaatttagcgaagttttcacctaattctcgacgaattttagacgctctgactagatcgagtattttgctagacaagacgctagggtcttttaccatttcgttctcatcaaccaccaccgccgccaaagcatcctgataaactttggcattctttaactgatgtccagccgtcaaacgaccatttggcacgataatcgttggcttatgtagagccgctaactccgatagagtagtcgcccctgccctagtcaccacgatatcagccgccgccaatacctgatacatatcttcatgaataaacggctcgattcgccacccctgacgctgctctaccctgctgtttaattcttcaaattgtagattacccgagatcaaaaataccgaagtttctggtagtaatttatctagcgaatcaaccagagcattgttgatccgaactgcgcccagtcctccaccagtcactaccaccaaaggacgctcggcgtcaaagcctaattgctgcttaaattcagctcgccgctggtcgctatactgatgaaaatcagccgccactggtatgccaacatactcagcttttgaggctggataattataataatctagcggcgcaccggtgccgatcttaaccgccgatggcgccagcaaacgattggttaggcctggatgagcgtctgaatcatgtaaaactatcggtatgcctagtagttttgccgcgtagccgactggtagacaaacgtaaccacccttcataaaaatcacgtctggccgccaagccaaaagcttgaaaaagctttgcgccaaacctgcgcaaaccaagaaaaagtctctgatatttggaaatagtaccgacggtgctagatgcgcccaaaagcctaatttatgataacggcgcagttttccagaggcgatcacctcaactggcaaatcaggatcatacttggccatgatgcgcttggcttgcttagaaaatttacgatcacaccaaaactttagctgatgctggtctttttggtctaattgattaaagactgcgaccactggcgtaacgtgtccgcccgagccgccgccgactgctagaatcttggccacttccctctccttcaatt

SEQ ID NO: 1918 - DNA, 14779 bp, synthetic construct
  misc_feature 1..14779: note = Synthetic
  source 1..14779: mol_type = other DNA
gcggacgctcttgattggcagattgaacatttgggaattcggcatttgtttgaaaagattttgtcgggccatagtgacacaaaagagggaacgctactgaaaaaagcggatattgtcaggcaaacagtggacaatccaagtgaagtcgttatcattggtgataccgaagcagacgttgcagcggctcagcagcttggtgcgactagtattgccctactgagcggtattcgtaatgaggagtttctctcagttatgtgcccaaactatcttgttgacggtattggtgatgtgaacaatatcaaactgtagcttatttcttaaaattgttgctctcattagagacatcaatagtgagcgctgtcaagactagctgtacacttaaaacaaacggtaatacagctaacatgacactgccggcggtcggtgattgatgagcaaataatttaacacacaataagaaacctgcaatcagtaatgagatgatcaaaaagaacatgccagtaaacaaaaacagtgctactggatggaaaccgtacagaacgtacttgtagtaaattcgtcgccaaaaacctttccatacggccttgaggttacgccaagcggttgggattagtttaatagttgatttctcatcaccgtagtgagctggtacggcgtggtcaataactttagcattgactatggataaggcggtcagcatgctggtttcatagtcgtagcgcttttcaactatggagaaatcgaccttttcaattatgtcgcggcgtagccaaccgcagccattagtgatgtctgtgatagaataatatccagtcgagaattttgttagcaatgatatgaaaatattgccgaattgccggtattttggcatagtcttaaaggcttctcggtggaagaagcggctagctttcacgtaatctgctgattgatcgataaaatcgtctagcattgcttcgaggtatgttgagtcaaactggtcgtcgcccgccactatccctatagcggtcgctttggtgtgctcaatagcgtaattatatcctgcgatgagagcgccgccaacaccttgatttgttttgttgtcaacgacaatcagtcgattattttgcttttttaatttatttagaacgccaatggtgtcatcagtgctggcatcattaacggctataatatggtcaatgtactttggtaatttcttgatcgttttagtgatcattttttcttcgttataacaaggtataacaactgcggtctctaattttctgtacatacctctcattatactataaatatggtattatgggttagttggttagtatgaaaaagtttgttatacagatatttttatttggcattgtcggtgtgacgacgctagcggttgatacattagttacctccatattgtactatatagctaaaatgccagcttttatggcgagcggcattggtttcttatcggggttttgtgttaattttcctatgaacaggaaacgagtttttaatcacagcaaagacgatcgattttcattaaaatcacaaatttgcttatatgttttgctaagtttttttaatttgatggcgacctctacggctgttgatttattagtaaaaatgaatatcctagagattcaatgggcaaagattgtcacaaccattgtatttgctatttggaattttttggtctttaagctatttattttttcaaagaaagtatcgcacgaagagaagcaggatgtgtaatactctaataaataggctacatgaccgtaggttatatataacagcttatattgtagttattattctcggtgttgtattcaatcaagccttaattttaataatggctgcaacagttaccgcagtagtatttatgccgactagacgactaggtcttatgggtcgactatttgttactctttcggtttacataagtattaatactttgttggcttttataccatgggtactcaaggtgccgatgtcaatatggctctttgcctggactgtcggtgtatttaatctaggtcttgttgtattttgtcgtttcactcctcccagcagatggttcccattaagcgagattattagttctctagtgagccttactgtatttatcctgatgctgacgcaatctttttctagttttcagagcgccgatcttttaagagtggctaacggctcaggggtagataatatatctcatcttagttttatagacactatcgagaggcaaaagggctatgtctatggttcaagaggtaaccagttgccgattaactctatgctaggctctgctgccaacaattaccctcagggctatcatataaatgcttgggtttttaatgaggctgtacaaccgtttatgagtaggtttactgacattaataaaaagctagttagctttttattatattcgataattaactatgtatttttggtgtttgcgtttatctttctagcaacgaaactggttaaattagataataagaaaaagccatggatgtcagctattattgttatctcctgtacgatatacacattattaggtttgatgttttctgtgtttactgacggtttcatgccacagattatgagtcttcatttgctgctttcggttataaccttactatttttatattgtaaggaaagtgatattacacaaaagtatacctacgggctattagcaaccttttctgttattggtgttggtctatcctattttttcctacttccagttgcgttgggcatatttatctttactttagcggctgattatttttgtagtaatcaaaaagtaaagttgtcaaaacttttgctgagcagtcttttgtttattgttagttttagcgttgtacagggggctatttacgtattacttgagagggtaacatcagataaaattaatgatcagggtggggtgttaatttttgatgtattctatgtgctaagttgggcggtgtttgctgtggcatatttgtggcataatcataagaagcgaacagttaatcctctgactattgggctagttgtgtcattagtattttctctggcgttatttatatttcaaaaaatgaccaatggtgaagtcagctattattatcataaatctgtattaaatttactcctattgactagcttggttatgacaatgctacctatgtcgcttataaacaaagcacagtcaagtggcgtcaagattttaatgattgtaggcattataatgatggccttttcaaacggggttggtgtgtttggagtttatttgcagggtaaggtaaaggcagcgtttactgtaccagagttatttgactatgcgattactatagctgagagtccaatctgtcgagaaaagtctacggctatactttcggttagaagtgatcagaaaactgatggtgatatattttttaatagatctatgatgactctgactggacagtctactactacacaggaaataatttccaggtggtcaactcctaatgctgatatacatagtgcaaagcaggttatagctaagactttgctcgagagcaaaaatataaccccagaatctcgtctcctgattttgacgcgtagttacgacataaagtctatatttattgaggttttaggtaatgaaagagtattatttgctgaccccggcaacgtatcaaaggatagcttgagcgggatatgcagcagattgcgaggcatgttttagcttgattgaaaatctactctaactagatacttgccataaccagatttcttgagcggctcagcaagcgtgttaagttgttctcggctaatccagtcatttttgaaagcgattttttctgggctaccaatgatgcggccagttcgtttttggatgacgcgaacgaaatcggcggcatcagttaggctgtcgatggtgccggtgtccagccaaacatcgccattatctagagtctggacttgcaatttaccgcggcgcagatattcagcattgatggaagtgatttccagctcgcctcgtgctgaaggctggacgtttttggcgatctcaataacatcgttatcataaaaatataacccgaccacggcgaagtttgattttggctcggctggtttttcctcgatagaaatagcttgattctgctcgtcaaactcgacaacaccatatcgttctgggtcagaaactttgtaagcaaaaactgtaccgccgtcaggattggtacactcctgcagggactcatctagccgctcaccgtggaagatgttatctcccaggactagagccactttgtcgttgccaatgaattcttcaccgataatgaaagcctgtgctagaccttctggtttgggctggacagcatattccagattgataccccactgcgaaccgtcgccaaggagtcgttgaaagccagcttggtcgtctggtgtggtgattatcaaaatgttgcgaattcctgcctgcatcagtgtggtaagcggataataaatcatcggcttatcataaattggcattaactgtttactaatcgcttgggtaattggccaaaggcgcgtacccgatccacctgctaaaattattcctttcataaaaactccttctagttcagtatataatcttttagatcatgtgtccaatcatgactagtgaacccggtagaatgtaatttatcaagactcatatcgctacctagtggtcgaggggctatgccatctttgccggcaaaatattcagccgtcgttgtgttggtaacggtcaagtcgtcgcggccagccaacttaaaaatccgcctggtgatgtccgcccaactttccagcggaccatcattagtggcgttatatgtgccgaatggcgcttgagttgatagcaggtggtcaataattctcaccaattcacgagtaaaggttaatcggccaatttggtcatgaacaacagttggtgaaatgttcttttccgccaatcccagcatagtgcggacgaagtttttaccttcaccaattacccaagtagtgcgtagtagataaaacttatcaagctgctcaacgagtagatctccagctgcttttgaggcgccataaacgctcaatgggctgaagtcttcattctcaaaatgaggttcttttgttccgtcaaatacgtaatcactagaaatatgtactaaagtcatgttgtgagtgcggcaaactcgggttaggtttgcaaccgctgaggcgttaaccttccaagctgctacgcgaccttctggtgtttcagcgccgtcaacattagtaaaggctgctgcgtttaaaacgatcgatatccctgaccagtcgaatgactcaactgattggcggtcagtgatatccatctcgtctatgtcggcgaaccgtgcttctggatattgttgacgaagtgctcgtcctagttgaccatttgctccgacgataaaaatgttatttgaattcatattaaacctccattggaattacatttgtaagtagtggatgagcggcgtctttttcggaaatgatcgcttgctcttggctgattggccagttaataccaagtgccgggtcaaataaattgacaaaggtgtacttggcgtctggcgaccagtgcgcgtcaaccaggtaggtgtaggcaatgttgtcgtcaagcgcttgatagccgttggcgacgcctttcggtacgaaaattgccgtgccaggattgatttcatgtgtgaaaactcgaccgaagctgtcacctttgcgcaaatcgcaccacgcgccgaatactcggccattagcagtggagataaatttattccacggctcagcatggagtccacgggtagcgccggctttgtcgttgaagctgatgttgttttgcacgatggtaaatgacggcagtcccagtgcttccattttttccttttggtaattttccttgaaccagccgcggttatcgccgtggacgggcagttttaccacaaacagcccggggattggcgattcggtgacggtgagttcattatagttatttggatcaaaattcataaaatctcctttaatttagcaaaaccttgcttaatatcttcgcctgacagcatctcaaaactaatctcgtcaggagatagtgtcactatttcggcaacatcatcatgcggctttagttgtacaccctcatgtattactgcccagaataaagttgaaataactggtatgttttcgccttgataatagtaatttgaaggtgctgagcagaggtaaataggcgtactgtaatggtcttgtgttaactctgtttcctcggtaatttcgcgacgtacagcatcttcggcactctcgtttatttccataaaaccgcctacacaatccagtagacctttatttgggtcaaatttacgcctggcaagtatgatactttgcttatttggcgttagaaagaatatacccgtagctggtacaggactattgaaagtactgtgttgatttttacatttccaatattcttcggaaatcttgtttagggttgtgccacatcttcggcaaaaatttatctcacgctgtttagacctgtctgcgtgtggcatagtttattgcccctgttttgcatacgctgcttcaacggcttctttttgcgctttccaccagtcttcgtgctcgcggtaccagtcaatagtttgcagtaggccgtcgcgcatgccagtttggttgtcagtgtactgtggctgccagcccagctcacgtcgcagtttgctagagtccatggcatagcgcatgtcgtggccggggcggtcattgacatgctcgtaccaatctttacctttacccatcaactcacaaatcagttcaatcaccattttgttattgacgtggtcattatcagcaccgatgatgtaagtttcgccgagtttgcctttttccaagatgaggtgaactgccgagttatgatcatcgacgtgaatccagtcgcggacttgctcgcccgtgccgtacagttttggtttgatgtcgctcaaaatattggtaatttggcgtggaataaacttttcgatgtgctggtagggtccgtagttgtttgagcaattggaaatcgtcgccttgatgccgaagctgcgaatccaggcacgtactaacaggtcactggaagctttggtgctggagtaggggctggatggattgtacggggtggcttcggtgaaacggtttggatcgtcgagttccaaatcgccaaatacttcgtcggtcgagatgtgatgtaggcgcttgccgtgcttgcggatagcctccaagatggtgtaggtgccgatgacattagtctcaacaaacggccatggattacgcagggaattatcattgtggctttcggcggcaaaatgcaccacaatgtcagtttcagccaccagtttatccatcagctcggcatcgcaaatgtcgccttctacgaaattgatcttatcagccactggctgtaaattggcgcgattgcccgcatatgttaacttgtcgataacagtgatgtcgtattctggcttgtgtttgacggtataatgcacaaaattcgagccaatgaatcctgcgcctcccgtgactagcatctttgtcatatttatattgtaacaaattaatatattaaaaatatatttttagtctgcaaatccatttggattatttgactgccacttccaactatcggcacaagcttgttctatagaataaacagtttgccagttaagttctttcttggctttacttgcgtctgcataagaagcggcaatatcacccggtcttctatctgttatttcataaggtattggctttcctgcagctttactaaatgcatcgattagctccaatactgagacacccttacctgaacacaaattataaattgcaacacctggcttactgtggtttaaggctgctgtatgtcctgatgctaaatccatgacatgtatataatcgcgtacacctgtaccatctggagtgtcgtaatcatttccaaatacaccaacctttgcgagtcttcctacggctacttgagtaatgtaaggtaaaagattatttggaatgccatttggatcttcgccaattaaaccagatttgtgtgccccaactggattaaaataacgtagaatagtaacttcaaaatctgggttagctgcggctatatctgttaatatctgctcaatcataaattttgtccatccgtaaggattagtaatgccgacaccagcttgatcagattctgtaattggtaatttttttggtactccacatactgttgctgaactagagaatattattttattgacattaaatttactcataacatcaaataaaactaaacttgattctagattatttgaatagtattttagaggttgttcaacagattcaccaactgctttaagtcccgcaaaatgaattacagcatcaggcttttcttgctcgaaaatttcttccaatttggatttattacgaatatcaacttcgtaaaatggaacttttgttttagtaattttattaagcctattaataacttcttttgatgaatttgagagattatcaacaatgactatatcatttccattctctataagatctattgcagtatgtgaacctatgtatccagttccaccagtaagtaaaatcttcataaaacgaatcctttctataatgtaattgtaactactattatataatgtaaatatgataaccgtaattatagctggtggcgctggtactagactgtggccactttcaatgccaaacaatccgaaacagcttttgactctaactagcgagcgaactatggttcagcaagcttatgatcgtgcctctagactaggggatacggtatatattgttactgaatctagtcatgcagataaactacgcgatcaacttccagaactccctagtgatgcctttttaatagaaccagggcgtcgaggtacggcacattgtattatttttgcgcttgattatattacacgccatcataaaactaatgaacctgttgcttttattcattctgatcataatgtccgtaatgttaaaggctttaagcaatcttttcaatcggcggctaccatatctcaacagaataattcaatcgcgctagttggcattgaacctacttcaccgtcaactggttttggatatattgaatgtggcgatttaatcgataaaagtaataatgcatatacggtaaaatcatttaaggagaaacctgattacgaaaccgctaaaaaatattttgcttctggtgattatttatggaacggcggatattttgttgggtcagttgatatttttgtaaaacaaatgcaacaatttgcacccactttgatggaagattacaataaattaagatccttatctcacttcgctagtgaggaatattacaaaacatatcttagtttcgatgttcaagcaattgatacagtcttgatcgaaaagatgtcgaacttatttatgatttcggctagttttgattggatggatattggaaattttaaagatttatatgatgtccttataaaagatgaaaagggtaattattgcaaaggcgaaaatatttatattttagatactgatacagcttatgtccgtaatgaagagccagataagccagtcgcggttattggattagataatattgttgtggttaatacgccgaacggtgttttggttacaagaaaggatatagctgctaaaacaagtgaaattactaagatgttgaataaaaaataaattaagatccatattgccatttaaaatgtagcgtgatatatttgaattacagtcccttaagtaaggattgtactaatatctaaattgttttaggtttctataataatttagcaacttagggcgacgattttgatcgtgcagctacggttgagaattctattgtgaatctaaagcaaagctctaatccgctcactagttgggcggattatcttttgtgcgtttcgattcctcttatactttcaatcattatcatttgattatataatataatcaacaacgacattataaaaggggcttctttatggcacaaaaatattcatattcaccaaaaaaatattcgcttgggctagatatcggcaccagttcagttggttgggcagtactggatttagataaaaagcgtattcaccatttaggagtgaggatttttgagcggccagaggatcctcaaaacggcgattcgctggctaaaccgcgacgcgacgcccgatcggctcgtcgtcgtctgaagcgtcgtcgtcagcgcctaaaccacctgaagcaatttttcgtcgatcaaaacatcctcactaaagatcgagtcgaggaagttctagattacaagtctgatttcaacaaattagacgtgtatggtctgcgaacaaaagcactcaccgaggagttatcgcctgaagaattactcaaagttttatatcagattgccaaacgacgcggcttcaagtcgaaccgcaaggttgttgaagaatcagacaaagaaggcggtcgtgtcactagcgccctcaaagccaatgaaaagtttctcgccgataacgattacacaactgtcggcgaagcgctgagtcgtgatgaaaaattcgctttgcataagcgcaataaacgcgacgattatactaacagttttgcgcgcgatgattttttgtgtgagttagaagctattattaaaactcagcgaaactacgccctgaaaaatgtccccgaaccagctattaatgaattgatttacggcattgacgatggacaagtcaccaacgtcagcgccataatgtaccaacgtccatttatgaccaaagaactaatcgaaaagatggtcggcaagtgtacttttgaagatggcgagaagagagcaccaaaagccagttacagcttcgaaatatttcgcctggcgagcgatttatcacacctcgttttcattcctcgtgatgccagcaaacgccaggccaagcgtgaaaatctagaaataaggctatctccggaacaaattaaacaagttattgatctggccaaaagtcaaaaaagtttaacgtataaaaaagtgcgcagcacggcaggaattagcgaagactacgtaccaaaagatgtgcgcggcaagaagaaagacggcgacgaattcggcgaggaaaacgtctttggcgggctaaaagcttataacgatattaggcttgcactaaaagatttaccagaagattgggcaaaaattgataatgaatcagcaatcaaccaaatcgcctatatcctcacgacacaaaaagccgacgaaggtattcgtgtcgaactagacgcactaccactttctgataaagccaaagaggctattgtcaaaattaagccaaccaatttcaaggcgttcggacatttatcgatcaaagctctacaaagaatcacgccacacattctcgaaggcatgacctatgacaaagcctgcgaggcagctggctacgacttcaaaaagcaatctgccagcctagagcaaatcaccaaccccgttgtcaagcgcgctataacacaaaccctgaaggttgttcgtgctattgagcgtaaatacggtaagccatatttcatcaaagtcgaaaccgcccgtgatttggcgaaaaattttaaggaccgcaatgcgattaaaaaagaaaacgaagaaaatcaaggatataacgaagacattaaatcaataattacagacgggtacgaggcatcgcctaaaaccaagggcggtaaacagctccttagtcatcttaaagaatttaacgtacgattgaataaaaatgccgattttaatggccagcagattattaaggtcaagctctaccgcgagcaaaactgtgtctgtctatattctggaaaacctatcgattttgagacgatgctacatgacgataatgcctatcaggttgaccatattataccgttttcacgttccaataacgatggaatgacaaacaaagttctggtgttaactgaggaaaatcaaaagaaaggtaatcaaacgccatttgaatattttggcgcagacgaaaaactctggaaagagtatgtagctcgagtagggtcaacttatcaaacgcgagaagttaaaaaaggcgacaaagatgctggaattaactacaaatacaacggctacgccatgaaaaagaagcaaaatctattgcttcaagattacaaaaatgacagttggaatgtgcgtgcgctgaatgacactcgatacatcactcgatttatccaaaattatttgcgccagaatgtcgactttgccgaaggtgaagaaaaacagcgcgtcatcgcgccgaatggcacaacaacggcatatttgcgtaaacgctggggattagccaaagatcgcgccgaagatgtgctacatcacgccaaggacgcggcagttgtggcggcaatcgatcagaagattgtcatgcaagctaacttgtacgccaaacaccacgaaatcaaagcactgctcgcggcgaccaaaacaatggaagaaaaaaccgacaagctcactggcgaaatcaccgatgaagacgagttcgacaaagcacagcgacgtaaagccgccatcctcgtattgtcatctaaacatttccctcaaccatgggataactttggcaaggaagttatgaagcgcaccctcaacactgatatcgccacattgcaaaatgagctacgcggacttgaaaattatgatgacgagttccgcttgagcataaagccaattttcgtttcgcgcatgccacgccgcaaagctactgctcaagcgcacaaggagactattcgctcaccaaaggttaaagatggtgatcaacgaaccgtaagaataccgttaaacaaactgacgcttgatactctcgagaaatcggttttagtcgaatctgacagggtactcttcaatcagctgaaagatctattagataaaaccgctacttatgataaaaaaggtaaacgaaccgatcaccctgataaagctttcgctgaatctgtttacaaaaatgacaaaaaattcgataaaaatggcaaaaaactgtcaccagtctcaactatcaaagtatactcaacgcaaccaagtggcttttatatcaacaacggcaaggcatttgttaataacggatcaatggtacgacttgacgtatatcaaaaaccaaacaagaaaggcaaaattgagcacttcttcgtgccagtttacgcccatcaagttggcaaaaataagcccacgccgacaaagatactgccagcaccaaaagggttcactgacgtagacgaaacattcactaaagtttgttcgttgtatccgagtgattatgtgaagtgttactttggcgataatgttgaggaaggttattatgtaacctacgattctggatctgggcgaatcactgtcatggatgcggcttctccaaataaagaaggtataaatcggcaccgtatttcacctcgttccgctactcttatcgagcgttacgacatcgctatcctcggcgacaattacaggtggctataaatggcctggcgcgttgtagctatcgaaaatcctgccaggctgagtttgcgtgataaccagctagtaattgcgcaagatgtcgaggcaactttaccaatcgaggatatcgactcactcattctggacggctatggtattaccgcaaccacaaatctactcacagcactagcaaccaagggtacaacgactataatatgtgacgaaaagcacttaccagctagcgtacttctaccgtattcacaacattcgcgccaagccaaagtttcacgtcagcaactcgccataagtcagccgctcaaaaagcaattgtggcagcaaattattatcagcaaaattaccaatcaagccgatgtcttgcggtcaatcggattagacgatgccgccttacgcacccatattagcgatgtcaaatcaggcgacaccagcaaccgcgaatcaatcgctgctcgcatttattttgaccagttactcgacgacgccacacgccgcaaaccaatttggcacaatgccgcacttaactatggctacgcgatggtacgcagtcatattgctcggcatatcgctgctcgtgggctagtcgcttcacaggggatttttcaccacaacgagcttaatagttttaatttagctgacgacttgatagagccctatcgtgctgccgttgacttatatgtcctagaaaaagttgccccacttcatgttggcgaccgtgacgccagtctcaccaaacatgatcgacagcttatcattgacatattaaattattatgttataatgagtgataagaagtttatgataaagcatgcggttgagcgaacagttgagagttttatcgaatgtatcgaggtaaaggaggcgcgtaagcttcttttgccaaaaatcgcctcctaacagggaagggatgtcatataaaatcatgagggtcgcagtatttttcgatttgccgaccaatactaaagctgagcgtagagccgccacgcaatttcgtaagttcttgctggatgacggctttgatatgttgcaatatagcgtatacacgagactgtgcccaaatcgtgacgttgctgaaaagcacatgatgcgcgttaagcgtcatgcaccagacagcggatcagtgcgactgctttatctcactgaacatcaatttacccatatgtacgtcatcgttggcgaaaaaactgtccaagaaaaagctgttcccgccgcccaactagcatttttctaaccaaaaatccccctcgtaacagaggaggatttaaggaagtattataccaatatctaaattgttagggaactataaccgtcgtggccgccatgttg

SEQ ID NO: 1919 - DNA, 14342 bp, synthetic construct
  source 1..14342: mol_type = other DNA
  misc_feature 1..14342: note = Synthetic
ctacatatatttaatattatcctttcttttatggagcgcgtacttaaaaacccagtagattcaacaagagacgatgataaaaaaccattttttaaccgtaaaggcattctaccaacggccgtcagtattactggtactatcggatcaattgtcggcataagaaacattgataaacgctggggcttcccaactctagtcgccagttcgttatgtgatgctgctgacggaatgttatctcgagatgaaattaatattaagaaaataatcgaaaaacttacgagaaaatgtgaagtctctttagatagtccagaaccggaaaataaagagactggcgagacgagactcggcgcacttactgaccacataggcgataagattaagatggctgctattctatacgagttatacaggcggagcgctgcaccaaatattgtattgggcggtattgccgtgtctaatacgtttaacgctggaatgaccgtaattaatacagttcgccatcctggagaatcccgcccagtaaaggctggcaaaataggcatggcgtgccaggtcgcgtcagtcgcactttatggcggcggacatacattggagatccacgggagaactaaatctggaaaaatcctgcgtacacttggtgctgttgcattcattgctggtgtaccattcatggtaaaagccggcaaagaatacactgaagaggctttcaagaaataacactaccaataagagatttttattattggcggttgtggttgcgaggtgatttgatataatatagagttatgaaaaatctcgtcatcgtcgagtcgccagccaaagcgaaaaccattgagaaatatttgggcaaggatttccatgtcttgtcgagcgtggggcatattcgctcaatcgtcaaaaaaaccaaggacggtacgccaccgattgatgtggcgaatgatttttttgccatttatgaagtcgatcctgagaaaaagaaagtcatcaccgagctaaagaaaaacgtcaaagccatcggcaaagacaatgtctggctggccaccgatgaagaccgcgagggggaggctatcgcctggcacctctgtaaagtgttggacctgccgattgagacgaccaagcgcatcgtctttcatgagatcaccaaagacgccatcactaacgctatcaagaacccacggactgttgacatgaatctggtgcaggcgcagcaagctcggcaaatcctcgaccgactggtcggctttgagctcagccccgtggtctggcaaaaggtgccaggcggcaaatcggctggccgcgttcagagcccggcagtacggctattggtcgaacgcgaacgagaaatcatgaaatttgaaggcagctcgcagttcaaggtgaccgccatattcatccacaacaatcaagaattcaaagccgagctcaaccagaaatttgactctgaagcagccgctcacgaattcttgaacagcctcaagccagccacattcaccgtcagcgacatctcaaagacgccaggcacccgcaacccagccgcgccgtttacgacgtcaactctgcaacaggaggccaactctaaacttggttttagctccaaagctaccatggcctcagcccagcgactctaccaagacggtaaaatcacctatatgcgtactgactcggtcaatctgagcgggcaggccatcgccagcgcgactgatttcatcaagcgattgtacggcccggattactccaccgttcgcaaattcaaaaccaaatccgcctccgctcaagaagcccacgaagccatccgcccgaccgacattacccgcgaaaccgtcacctcaaacgaacacgaccaaaaactctacgacctcatccgccgccgcaccctggcatcgcaaatgtcaccagcgaaattggagaagacgacagtgactatttgtattatgggcagggaattatctgctaccgacaaaacatctgcacaaacccgagaattgaatgacgatgaggcgcggcgaggcgaggactgtctgagcgaagcgcgttccgcagccgcccgagacgaatcggagagagaatctcggcgtgcggaagccgttttgaagggagcggataattctttcgggcgtttccactttgaggccaaaggcgaagtcatcacctttgacggcttcctacgcgtctacggcggcggcaaagacgaaatcttaccaaaactccactctggcgacacacttgaaacccacgacatcaccgcccgccaaaccttcgcccgtccaccggcccgctacaccgaaggctcgctcgtcaagaagctcgaagacctcggcatcggccgcccgagtacttatgctaccatcatcgacaccgtgcaaacccgcggctacgtcgaaaaaggcgacagcgaaggccagccgcgcgacgtcatcgtcctcagttacaacggcgaagaagtcagccgcgacgtcgtccaggaaaaaaccggctccacccgcggcaagctcatcccgacaccgagcggggaactgatcgctgactttttgaccgaccatttcacgcaaatcgttgactatgatttcactgccaatgtcgaaactgaatttgataaaatcgctgccgctgacctagctaaaagcgccatgctgcacggattttacacgccattccataaattgatcgaacagtcaggcggtatcgaccgcagcaaagtcggtgctaaccgcgaagtcggcatcgatccaaaatctggcaaaccaatcctggcgcgctttggccgctttggcccaatgttgcagctgggcgccaccgatgacgaggacaagccgcgctttgcgccgctaccgaagggcgcgaaaattgagaccgtcaccctagaacaagcactagaaatgttcaaactaccgcgcgtcgtcggtcaaaccgaagacgggcaagacatcaaagccaacatcggccgctttggcccgtacatccaagttggcaagctcttcgtctccatcaagcccgaagatccgcacaccatcaccctagaaaaggcccgcgaactctacgccgccaagctccaggctgaggccgagaaaaacatcgctgacttcggcgatggcgtcaaagtcctcaacggccgctttggcccgtacatcaccgacggcacgaaaaatgccaaaattcctaagggcaccgatccaaaaaccatcacccacgaaaaggcactggaattgttaagtaaaacagccgcaaaaccaacccgcaagagaacaactaagaaaaaatagagatattttctatactatccaacaattttggataataaaaactctcacatcatctattgcaaaaatagtaaaatacatgctataatttatatgaacaattatagcatttacctattgacatttatcaaatgcaattgtataattaaaaacatattttaatcaatgtaacctgtggtgaggcagagaggactttcctaatagcatgaacgagacagcaaaaaccgaaagaatcgacaacttaaattctgccattgatactattatttccaaaataccgcaagagcgcgaaagggaaatcatctctcgacgattcggcctgtctgaccggaaggaaacgctagaaatgattggcgatatgtttggtatcacccgcgaacgagttcgtcagctggaaaagtccatcctaacacgacttagggttgctgttagcgaaggagctctaccgtcagttactgctatagaaaaggaaataacctcaagcctatcagaaatgggtcgagtagcccgtatacaagatttagcgtcacatttcctgggcaaggaagcctcatcaattgaccgctcacgtgtggcgtttattggagagttggcagaaaatatcaccatcatcacagaaaatgacgactactatcaagcagcggccattgacactctgggtaacgaaaaacaggttaaagtaagagttgaagaagttgttaagacgattaaaaaacatggcgagccaatcactgcggaagatctacataaaaaattagactacgagcatccgtcaaatattgcagcattggctactgttagtaaaaaattagctaacctgcacaatcaatggggactagctaaatggccatcagttaacccaaagaacatccgcgataaaatctatgtcgttcttgacaccaacggctcaccaatgcatttttctgacattgctaaaggtattcgtgacagcgagttcaaccgacgaagcgttactactcaggcaattcacaatgaacttattaaagatagtcgatttgtgctgattgggcgtggcatttacgcgctggccagctggggatatagtcgcggtaccgtctctgatattattaccgacatcttgaaaaactctgagtctccattgcaccgtgatgaaattgttcgtcaagtccttgataagcggcaggttaaagaaactactattctactcaaccttcaatcaaaaccgcagttcaagcgtgtcgcgaaagctacttacgtttttgacgaagctgtttaagctaagttgcaaacttacttcagaggtgagataatttacatatcatgcagattatttcttggattattggcacgttattacaatggtatatttggatgccaatcgtagcagttctggtatttttgacgtggcgaaattatcgaagaatcgaagaatttacccccgttgagagcgtactattagttttggaaatcccacggaccaatgacaagcaagagctagccgccgagcaactgtttgcctcactccacggcatcttaagggataataaagagttgcgcttatctggtggacagcaggagcatattagttttgagattgcctcggttaatggtcaaattcgcttctatgtttgggtgccaaaaactctgcaaagcttcgtcgagggtcaaatttactcgcaatatccaaccgtccaaattcatcaagccaacgaagattataccgagcacgagcgtgatcacgaagttgcgtattcaaccgaactaactttaactacggatgaatttttaccaattcgcacctttcagaattttgaagttgacccgctagccggcgttaccggcacccttgccaaattagagactaccggagaagaactatggatccaggtgctagctcgaccaattcctgacgattggcaacatgctgccgacagatatataaataacataaaaagcggacgcggcttgtcgctgccagggctcggcggtagcatgcagtggatagtcgggatacttggtgcactctggcaaccaccggagcagggagtcagtcagtcgacagctgttgagttgtcagaccgcgacaaaactcgcatttctgaagcggaaaaaaaagcaacaaagcttggctatgaagtaaaaatacgactggtttatatgggcgaaagtaacaccaacgcaaagctccgcatgcaagctctggtcggtacatttaagcaattcaactcaaccaaccttaacggctttcgcgcagtcaagggcgcattcggtaaagaattcctggagaaatatcgtaagcgagcattttatggcgacggctttatcttaaacattgaagaactagcttctgtctttcacctgccacacaccaatgttgaaacaccaaacattgtctgggctagcgccaaaaccgccgaaccaccgtccaaactaccagtcttaaccggcaacgacgccaatgacgaccaaatctctgcctttggagtcactaacttccgcggcattagtcatcaattcggcatgctacgctacgaccgctcacgccacgtttacattatcggacaaaccggtgccggaaaaagcggactgctggaattatttgccctcagcgatatcttccataatcaaggttacgctatcatcgatccacacggcgacttcgctatcaataacatgaagttcataccgggctcacggctaaatgacgtcatctatttcaacccagccgacaccgcttaccccttaggattcaatccgctagaagtcactaatcccaaccaaaaaaccaatatttcatcagaagtgattggcgtcctgaagcgcatgttcggcgattcgtggggtccgcggctggaatacattttacgctacactattctggcgctacttgaccgaccagaaaccaccatgcttgatattactcgcatgctaacagataaagaattccgcaaagagacgctgggctattgtcgcgacactgtggttttgcagttctggaatgtcgaatttgccagctggaacgataaatttgttgctgaagcaatcgcaccggtgctgaataaagtcggcgcctttaccgccaacccaatcatccgcaacatcattggccagcctaaatccaccttcaatatccgccagatcatggacgaaggcaaaatccttatcgtcaatttatcgaagggcttaattggcgaagacaacgccgctattctgggatccttcctaatcacaaaaattcagctcgctgccatgtcacgatcagacattcctgacgttcgcgatcgtcgtccgttctatctctatgtcgatgagttccagaatttcgccactgattcatttgccaccatcttatccgaagctcgcaaatacggtcttaatctgactgtcgccaatcagtatatttcccaaatgagtgaaaccgttcgtgacgccgtttttggtaacgttggcaccatgatttctttccgcgtttctgccgatgacgcaccaatcctagctaaacagtttgagccaaactttgaatcaattgacctactacagatgcataatcgtaattttgttatcaatatggttatcggcggcgaaaaaactcccgcattttcagcgcgcagcctggagcttccaccatctcaggcggacaatacgccacatatcatcgaacattcaaggcgcatgtattcgaagagcagggaggatgttgagagagaaattagcgccattatcatgccaaaaagaaatcagaagaagcaggccgccccacagccgaatccgcagaccaatagtcaaccaaataaagcacaaccttctacagatagcggagaggttgtcttgcaaattcgtggcaatagtgaattagacaagcctaagtcatcgtcagaagttgtaaccgcacctgaatcaaccgcgaccaccgcgccaaaaagacgacgccgacgacgaaaaaagagcaccactcaataaatcattgaactctagttataataacgccactggcgcatatcagcattataaacatcagttatccgcggagagatcagcgtagagacgggacccgacggaactgaaaccgcattatttttagttaaaaaagtaagtagcttctgattctgataacgcaatccttttggtaaaggctgactcatcacagcatcagcatttggcgctgacagcacaaaaccccactcaccaaatgacggcacattcaccgaaaacgccactatgtgtcgccccggatgagcggatttcatggtatttgtcaccatataaaaagcctgcagagaaaagaacgaagaagttgcttgcgttaccattacgccatgctctgttaaaatattgccgacttgacggtatagctgttcggaatagagcttggccagccgttcattcgaagggtcaaccaaatcaatcaacacaacatcatatttatcctgcgtcaaaaaagcaaattgaaaagcgtcttgattaacaatattaacgcgagaatcatgaagtgaccgctgattaatgtcagttagcaggtgattagtctttgctaaattagtcattgactcgtcaatatcaaccagagtaacatgctcaacgctcgggtatttcaacacgtcacgcgtcaacagaccatcaccgccacccataatcagcactcgccttggactggcgaccgaggacagggcagaggcagacagggtttcatgatagcgcgcctcgtccagactagaaaactgtagattgtggtttaaaaatagcctggtgtctttcttatacctggttagtacaatcttctgatatggcgtttgctgctgaaacattaccggatctctataggtccgcttatcaattgctttttcaatttctgtagcataaacaaacagtccagacaggactatcgttgctacaatactaactatcatcacaaccctagaagctttcatctgccttaaaatcaatacggccacagcgatattcaacgccgctaccaaataagcactacgcatcaaaccaaggtggggcaacataatcagggggaataataaggacgccactaacgcaccaaaataatcaagcgccagaatcttactaaatagcctaactgatgatttacgaccaaatttctgaaacatcttcactagaagtggaatttccagaccaatacaaatgcctattgctaggctgatgattgcaaaaataacccagtgcagtcgcgtaaaaacaaatcccgtatacatcaaaagtaccgaattaccaccaattaatcctaggacaatctcattggttgcaaaactagtcgctggatgtattttaatgtaattaaccagcagcgaaccaatacccattccaaataaagttacgccagtcgccaaactaaagcttaagattgaatctccgaccaagtaagacgcggccgcgcccaaaatcaattcatagataatgccgccaatcgccactaatatcgccgccgcgaataaagccacctgctcacgtttatgtatttcaaatcgcggcactaaaatatcctactttccaaatccgccactactgccaccataaacaccacgcgctccgctactgtgcccatcgctggagctattatccaaaaatgtaaatataacagcagcagcaataaacactataaatataatcatccaccaattaatcggtgtaattatcctgccgaatattcgcttttgctctttagcgtctagcttcactttacgataagcatcatactcacgattattatacttctcaatagtaattagctggcgccccttcggcgctttactgtcccgcagtgtggcgtaggccatcatttcttttgggaaaacttgataagtgtttttacctttaatattcacaatttcgcccacgccaacttcatcaacaactacaacatgatccgttccgtcctgctcggaaagagtaaaagattggcctttttttagctgctgtggatcaattgacctagtaaaccgaattggctcatacaaagatacaacctcgtcactgtggtcatactcaacccaagtatcataatcagctaggccagtgatttcccattcttcccagtagtaaaagcgtttagctttctcgctccactcacgaaatagcagacaaccaaccactcgtagatttgtcttctttccagtcaaaatctggttaatcttcaggcgtgccttagtacgtttcatattataaatctacctttttcatagttatgtcttcggccgctagttcctgaccgactaattcctgtatttgttgaatagtgacatcattcaagggtttacaagtagtcattgatatataggcagtaccactttccggccatgtgtgaactgcaatatgcgactcagacaaaagcagggcagaactaaccccctggggcgaaaacttatgagttaccgactctaatgggtgtaagctagccgcctcgacaatgtcgcgcatcagtttctgtaacccatccatgttatcaagcagggcgtagttagatccgctcaccttaatggcgatagactgtatcccagatgtgttcatattagtaattatagcactatttaaccagacacttgcgcaatcataataagtgcgctaaactacaattacagtcccttaagtaaggattgtaccaatatctaaattgttttaggtttctataataatctggcggtaaaaatccgctgtaaagtatatgaaatactggagcaaagcactaatccgctcacttgttgggcggattatctttttatgtggtaaaaaaacttatgctttcaattaccactctttggttatataattatgccaaaagacatcacaaaaaggacttatttatgactgaaaaatcttcatatttaccgaaaaaatactcgctaggtctagatatcggcacctcctcggtcggctgggcagtattagacctagataaggaacgcattcacgatctgggggtgaggatttttgagcggccagaagacccgcaaaatggcgactcactcgccaagcctcgtcgtgacgcccgctcagctcgtcgccgtctgaaacgccgtcgccaacgtctcaatcacctgaaaaaatttttcgtcgaccaaaatattctcacgaaagatcgagtcgaaaaggtgctaaattgcacgtctgatttcaacaaattagatgtatacggactgcgctcaaaagcactcaccgaggaattatcgcccgaagagttgctcaaagttttatatcaaatcgccaaacgacgcggctttaaatcaaaccgcaaggtcgtggaagagtcagacaaagaaggcggccgcgtaaccagcgcactcaatactaacaagaaattcctcgccgacaacaattacacgaccgtcggcgaagcgctgagttgtgatgaaaaattcgctttgcataagcgtaataagcgtgacgactataccaacagttttgcccgcgacgactttttgcgtgaactagaggccattattaaaactcagcaaaattataccctgaaaaatgttcccgaacagactatcaacgaattgatttatggaattaacgacgaacaagtcatcaatgtaagtgccatcatgtaccagcgtccatttataactaaagagctaatcgaaaagatggttggcaactgtacgtttgaaaaaaatgagaaacgagcgccaaaagccagctatagctttgaggtgtttcgtttggcaagcgatttgtcgcacctcgtattcattcctcgcgacgccaacaaacgccaagccaagcgtgaaaatctagaagtaagattatctccagagcaaatcagtaaagttatcgacgtagccaaaagccaaaagagcttaacctacaaaaaagtgcgtagtaccacaggaattagtgaagactacgtaccaaaagacgtacgcggcaagaagaaagagggtgatgaatttggcgaagacaatatttttagcggtctaaaagcatataacgacatcaggttagcactgaaagatttaccagaagattgggcgaaaattgataatgaatcggcgatcaatcaagtcgcctacatccttactacgcaaaaagccgacgagggtattagtgccgaactagattcactaccgctttccgacaaagccaaagaagctattgtcaaaattaagccaaccaacttcaaagcattcggacatttatcaatcaaggctttacaaaaaatcacgccgcacatcctcgagggcatgacctacgacaaagcttgcgaggcagctggttacgactttaaaaagcaatctgccagcctagagcaaatcaccaaccctgtcgtcaagcgtgccatcacccaaacgctaaaggttgttcgcgccattgagcgtaaatatggtaagccatattttatcaaagtcgaaaccgcccgcgacttggcaaaaaacttcaaagaccgtaaggcaattgaaaatgaaaataaggaaaatcaagcgcgcaaccaaagtatcattcagacactaaacgaaaacggtgtcgtcactccaaccggtcagcagataattaaagtcaagctctatcgtgaacaaaacggcgtctgtctatactccggaaagtcaattgattttgagacgatgctgcgcgacgacaacgcctatcaagttgatcacattgtgccgttttcacgctccaataatgacgggattactaacaaagttttggtattaacagaggagaatcaaaagaagggcaatcaaacaccatttgaatattttggtgcagatgaaaaacgctggaaagaatttgtggccagagtagaatcaatatacaaaacacgcgatatcaaaacttccgacaaagctacaaacgccattaattacaaatacaacggctacgctatgaaaaagaagcaaaacttattgcttcaagactacaaaaatgacagttggaacttacgagccctcaacgatacgcgatatatcacacggtttatccaaaattatctacgccaaaatgtcgactttgccgaaggcgaagagaaacagcgtgtaattgcgccaaacggtacgacaacggcgtatctacgcaaacgctgggggctagccaaggatcgcgccgaagacgtcttgcaccacgccaaggatgcagcggttgtagcggcaattgacccaaaaattgtctatcaagcaaatctcttctcgaaagagcaggagatgaaactgtatctaaataacgctaaaacaattgatgaaaaacgacaaattttgttacaatctaccgacgaaaacactggcgaaattactgatgaagcgacatttactcaggcgcaaaaagacctcgcgcaagctgaatatttcaagttgcgcagtgatgaaaagactaaaaatcgcttcccaactccatggccagacttcagtaaagaagtcatgaaacgcacgttaaataccgacattgcaacattgcaaaatgagttacgtgggcttgataattacgatgaggacttccgcctgggcgtaaaaccgatcttcgtttctcgcatgccacgccgcaaggctgccgctcaagcacataaggagaccattcgctcaccaaagatcaaagataatgatcagcgaaccgtacgaatgccgcttaataaagttaagcgcaaggatgtcgaaaactctgcacttaaagaatccgataagtggctgtacaataaattgctcgagagactagatgcttacggcgataaccctgataaagctttcgctgaacctatttataaaaatgataaaaaatttgataaaaatggcaaaaagctgtcaccagtctcaaccgtcaaagtatactcgacgcagccaagtggattttatatcaacgacggtaaggcatttgtcaataacggatcgatggtgcgacttgacgtatatcaagaaccaaataagaaaggcaaaattgagcacttcttcgtgccagtttacgcccatcaagttggtaaaaataagcccacaccaacaaagatcctgccagcaccaaaaggattcactgacgtagatgaaactttcactaaagtctgctcgttgtatccgaatgattatgtacgaatttaccttaaaaataaaatactagagggttattattctggctacgacatatcagtgggaactttgatactatatccacactttacaccgtctaaagacattaaagtagccaacagagtctccgcacgttccgccaccctcatcgagcgctacgacatcgctatcctcggcgataactacaggtggttataaatggcctggcgcgtcgtagctatcgaaaatcccgccagactgagtttgcgcgacaatcagctcgtaatcgcgcaagaaactgaggcaactttgccgattgaagatatcgatgcactcattctggatggctacggcatgactgcgaccacaaatctgctcacagcactggcgactaaaggcactacgactgttatttgtgacgaaaaacacctgccggccagcgtgcttttgccatattcgaaacactcgcgccaagctaaagtctcacgacagcaacttgctatgagccggccactcaaaaagcaattgtggcagcaaattattatcagcaaaattaccaatcaagccgatgtcttgcaatctgtcggactagacgatttcaccttacgcacccatattagtgatgtcaaatcaggcgacattagtaatcgtgagtcaatcgctgctcgcatatattttgaccagctactagacgacgccacgcgccgtaagccgatttggcacaatgccgcacttaactattgctacgcaatggtccgcagccatatcgctcggcacattgccgctcgtgggttggtcgcttcgcagggaatcttccaccacaatgaactcaacagttttaacctagccgacgacttgattgagccttatcgcgccgccgttgatttatacgtcctagaaaaagtcgcaccgcatcacatcggtgaccgcgatgctagcctcaccaagcatgatcgacagctccttattgacatattaaattattatgttataatcaatggtaagaagtttactgtaaaacatgcggttgagcggacggttgaaagctttatcgaatgtattgaggtaaaggaggcgcgtaagcttcttttac

SEQ ID NO: 1920 - DNA, 14290 bp, synthetic construct
  misc_feature 1..14290: note = Synthetic
  source 1..14290: mol_type = other DNA
agagcaggatgaacagctgccggggacttagcttcatgccgtataaccaactagcctggtagctggtagctggtagctggtaggccggtatttcttgcggcacagtttacaccacagatatttgttgcaatagttttcatgaagacccttatggcagcgaggataagacacctcatcgccaaagactagtttgttaaggatctgccagtatttcttgttactggcaaactttggtatggcaggcattaggaacatcccctttcacttagttgctattcactcctaagtttacggggtgttctggtttaggttaatggatcgacgttaaagtcaatactttttactaaaattatgtcataatattaaaatttataattataactattacacttaccggaaactaacttccctagtatcacagtaagatatacgttacagtgtgagtaatgaaatatgatgaagatggaggagagtgatagtgcgagggtgtgggtatttactatgaatacgctttgatataaaaacttgcacactcaagcgaatgtgcagtataatagcaaatacagtcccttaagtaaggattgtatcaatatctgaattgttttaggtttctataataatttagctacttaggatttatgtcttaacataaattacggtagagagttctattgagaatctaaagcaaagctctaatccaccctccgatatccgctgggtggattatcttactcagtagtgtttatgcttggaatttagcaaaaatcattatataatttatacatgaaaccttcaaaatactctcttggacttgacattggtactacctccgtcggctgggcggtcattgatttagaaaaagaacgaattcatgatttaggcgtgcggattttcgaacgaccagaggatccacaaaacggcgactcgctcgcaaaaccgcgccgcgatgcgcgctcagctcgccatcgactcaaacgccgccgccaacgcttaaattatctgaagcgattctttgttaatgaaaaaattttaacgcaggcacaaatcgcagaaatacttgatccgaaatcaacatacaataagctagatgcgtatgcactgcgcgataaagcccttaatcacaaacttaccgccgaagagctgtttaaggtactctatcagattagcaaacggcgaggatttaagagtaatcgtaaatctgtagaagaaacagatcgtgaaggtggtcgtgttagcaaagcgttaacaataaacgaacagctcttggcagaaagaggctacaaaaccgttggacaagcactcgcgcaagatgaaaaatatactgagcacaaacgcaacaaacgcgatagttatactaatagttttgcgcgagcagacttcattcacgagctagaagaaattataaaatctcaacgaaaatatgctctaaacaacgtgagcgacgaagccctacacagccttatctacggcgtcgactcagacggtttattgaccaacagtagtgctatcatgtaccaacgcccgtttatgacggaagagctaatcaaaaagatggttggcgagtgcacctttgagaagggcgagaaacgcgcaccacgagcaagctatagttttgagatttttcaatttgcaaataatttggtgaatctcgttttcgtaccgaaaaatacgaatagccgccaggcaaagcgcgaacactttagactaacgctgagcccagagcaaatcgcagctgtcgttgctgaagcaaaaaagactgcatcaatcacttataaaaaagttcgccaagtcgctggcattagcgaagaatatgctccggagtatgttcgcggaaaaataaataaagacgacccgtatggtgagaagaacgagtttggcaaactaaaagcctaccacgacatcaaaaaagcactaaaaagcacacctggagattggatgaaggttgataacgagtcaatgctcaataaaatcgcctacattctaacaactgaacatgaggacgttgagattcttaataaattaagcgaattgccactttcagatgaagcaaaatgtgcaattcttaaaatcaatccgaagaactttagatcatttggacatttatcgatcaaagctttacaaaaaatcacaccgcatattttgagcggattaacctacgacaaggcgtgcaaaaaagttggttatgattaccgcaaaaaagccgccaaccttgaacaaattaccaatccagtcgtcaagcgggcaatcgcgcaaaccaataaagtcgtgcgagcagtaattcgtaaatacggtaacccgtattttatcagagtagagaccgctcgagacttagcaaagaattttaaagatcgtaaagcaattgaaaatgagaataaagacaatcaagcctttaactcagaggtaaaggagattattgagcacggctacaacgtaaagcccaagactaaacgcggcaagaatttacttgagttcttgagagaaaataatgtgccgctttcgcaaaatattgacgcaaacgggcaaatgataactaaagttaaactttatcgagaacagaacggtaaatgtttatattctggcgatccaattgactttcaaaccatgatccacgatgataacgcgtatcaagtcgaccacatcgtgccattctcgcgctcaaacaacgacggcttaacaaataaggttttagtgaaaactgaggagaaccaagaaaaggcgaaccgcacgccgtttgagtatttcggcggtgacgagacgcgttggaaacaatttgtagcacgtgtcaatgcaatataccaaacacgcgacgtcaaaaccagtgataaagcaataaatagcgaaaactataaattcaacggctatgctatgcgcaaaaagcagaatcttctcatcgaggaatataagaacgacagctggaacacgcgagcgctgaacgacacgcgctatattactcggttcgtacaaaattatctgcgccagacagttagcttcgccgaaggagacgataaacaacgtgtgcttgcgccaaacggcacgataacctcgtatttgcgtaaacgctggggtttgagtaaggtgcgtgaagaagacgtgctgcatcacgcagccgacgcggcaattgttgcggcaatcgacaatagaatcatctgccaggccaatcttttctcgcgtgatcaagaactgaagttatacacacaaaccataaaatcaattgaggaaaagaaacgtattttactcaagagcacagaccaagagacgggagaaattactgaggaagatcagttttctcaagcccaacgcgaaaaagcagagcttgaatatattaagcagagcatggacgaaaattcaaaacaccgttttcctgagccgtgggtgaactttgctaaggaaattcgcaagcgcacgctggacaccgacacagaaacgctgcgaaatgaattgtgtggcttagagggctatgacgatgaatttcgctcacaggtgcaaccgatttttgtatcccgacgacaaaaccacaaaattaaaggatccttgcacgacgaaaggattagatctagcagaaatagagaaagaaaaaatgttatccgtatcagcttacaagaattgacgctcgaaaaactagatagatcaatcgctaaagaggaatacgatacacaaaagaaacattcaggcgattccttatatgaaaggctactcaatcgactcaacgaatatgctacttataacaataagggcaaacggacagatcatccagacaaagcatttacagaaccattttataagagtaataagtccgaagacaaaaatggcaagataattgcgcccgttagatctctgaagatatacgataagcaaacaataatccgcctcgatagaggtactgcgatggccgagatgacgagattgcgcatctacaaaaagaataagcagatctacataataccagactatgcaataaatatattaaaaggtagagagtctatgagtttactaactccgctaaaaggtgtgtcgtgcatcgactcttcatacgcatttgtaggatttctttacaagaaagattgcatgttatttcgaaagggcaaccatatgtatgcaggctattttgtccaatttgaaagcgacaacagaataactatcaaacgccatctcgccccagattctaatcgctcgaataaagagatggttatgcgcacaaagatatcagggataagtgatctgaaaatatgtcatgttgatatattaggggacaaaagaccggagacgggcatagtatggcctggcgcgtaattggtattcaaaatccaagtcgcctaaacctacacgataatcagcttgttattacacaagacaaagaagtaagcctgccaattgaagatatcgacgcactgattcttgacagctatggcatcaccacaacagcaaacttactaacagagcttgcgaccaacaacacaacggttgtcatttgcgatgaaaaacacctaccagctagcatattattaccgtactcacagcactctcgtcaagcaaaagtctcacgcctacagttaaacatgagtcaaccgctgaaaaagcagctctggcaacgcatcgtcatgcaaaaaatttccaatcaggctgacgtacttcagtgctttagcctaaacgatatgccattgcgtcaatacgctatccaagtaaagtcaggcgatagcactaaccgcgaatcaatcgccgcccgtgcctattttgaccagctacttgacgacgccacgcgccgaaagcctatctggcacaatgcggcacttaattatggttatgcgatggttcgcagtcatattgctcggcacatcgccgcccgcggattagttgcctcgcaaggtatttttcaccatagtgagttgaacggtttcaacctagcagatgatttaattgaaccgtaccgagcagtcgcagacctatttgtgcttgagagacttgcgccactccatataggtagacaagacacaagtctcaccaggcaagaccgtcaaatgctagttgacatattaaattattatgttataatacaaaacaagaggtttactctgaaacacgccgtcgagaaaacggttgaaagcttcattgaaagtacgggagtaaaggaggcaagtaagcttcttttaccaaaaatcagcgcctcctagcagggaagggatgtcatataaaatcatgcgagtggcagttttctttgatttgccaacaaatactaaagctgaacgccgagcagcgacacaatttcgcaagtttctacttgacgacgggtttgacatgttacaatacagcgtttatacaagactatgtcctaatcgcgatgttgccgaaaaacatatgatgcgcgtacgacgcaatgcaccagatagcggctcggtgcggttattatatttaaccgagcaccaatttactaatatgtacgtaattgtcggcgagaaaactgtacaagaacgagcaattccagccacacaactagcatttttctaaatttaaatccctctcacaacagagagggatttaagtaagtattatatcaatatctaaattgttagggaactataactagacggcgtgaggtacacatgagccgagaattatatcaatatctaaattgttagggaactataactaaattatgtcatactatagtaaagagtctattatatcaatatctaaattgttagggaactataactagctgtagtaaacatcgtcagcgacaattattatatcaatatctaaattgttagggaactataacaaatctctggtgtttatggcgttactttggattatatcaatatctaaattgttagggaactataacttcttgaagttgtcaacaacgcgttcgcccattatatcaatatctaaattgttagggaactataaccatcaacagacttattggcctcagcaatctattatatcaatatctaaattgttagggaactataacccagtacgctgaaagtttgtgcgcacatcgattatatcaatatctaaattgttagggagttgccaccttctgtgctaaatctgggaactttgcttcaactaggcgaagacgcttatcaagagattcgtagttatgtttctgctctttgaagactgtttcgtctgcttcttcacgggacccttcttcaataaagatgtcatgacggagaccagtgatatttgcacggatagttaattgtcctgcttccaatgtttcgaagcgtctttcaaagcgtagttccatgtctcttactatgtttgtaaggttcttatggtcactgcggatgtcggagagttggatgtcgattgattcgaagcgttggtcaatctggttaaatcgttcatcgatttgttcaaacctcttatcaatctgttcgaatctcttgtcaatctgctcaaacctcttgtcaatttgcttgaacttagtattcatcgtctcagcaagcgttttaacagcacttgcaagatcctgaacctggacagttagatcttttacttgcgtagaaagcccttcgttcgtcatggttatatttaatcacagataggaagtaaaaacaaaacggttcagtcacctagcgtaaaatcattattgcaaaatagcggggggggtaatctcattaccgttaaaaaaagaacctcctttataagccagaaacgtcagaacaaaatacgaactaaactatagttatccggtcaatgccatcagttaaataatatatcgtttgactttcgtcagagaccttaaattcaaaattagatggtctatctttatttagaaccttaaggacaagccgatcataggcgatagatttattgaaattgtcagcaataaatgaatattgtgaaaaataggtgcgggaagggtgatgggacttaaggctgtctggtaattctattggtagttgcatagggaaacctccggtttaaagtttattaataaatatatactatcataacgtcgcacaatatagcttttacgacttataataccgtacgagaagatgaatcagcatccatctaatgtgagtgctaatttattctataaagaaccatttccatcttttgtaggggattgcgtagagattatacttttatatgtcactaacatacattaatacatcacatcttagcagctgcactcatacaactctcacttaattaaagaaatagcgccaaggctcttctgcgtaagtataacggcccgcaaacgacataatatacatttgtctttagaatcagtcatcatgcataagttatccacaaaaatatctggttaacgttaatttgcatttttattaaaaatattcccccactatcttttttttgcttttctgccctatttgatttttatacgattttatatttttatatagttttttctctcgttcgcttggattacataaaaacgaacaaaaatagaacatcccccaattggcaagagaagtgaccttttctatttataaaatgctcgcctactcacccgcacatcaagatatgctgggttaactgaatgttcagcacaatactgaatagcacgcaccgcgtcttcaacctggcttgctgccgcacgatcaatcgacaatctaaccggataccctaccccatcaagttttacctctatttgtcgagttgtgccttcaggcaaaattacgcttgaaacagtatatttttgcatagaaaaatacccaacaaccttaccgacaaactctaaaaaccgattactcacaagaaccttatttgtcgtcgcttgaacgcccgtacggtcaataacttgcacgacaggagactcgggtacattccggtaaaatgccgctccgctagagtcaacaaacacaagtgttgcgcccgcttgccatgacacaactggatgccgcatgacgatagaaaattttgcacacccaaacccagcaaaagcgactgtcggctcgacagactgaatctccggataatcatgctgtaagtagtcaataagggatttaatatctattagcgcgcgtagccgctcaaacggacgagccacgaggtagtcctgaattgctttttcatagcgctgcgtcgtttcagcagacggcgagtcaacgccaataagcgttacctttggcataacaactgattgatagagtacccatataagaccagcaatacccaccgaaagtacaaacaatcgtaatacgagcttacgacgatggtagcgtaatgtatgcacttgcacgcgcggcgacttaagatcggcgtggcgttcacttgggcttgcgatttcggaaagaagactgccagtcaacgtgcggttacgccgaaaagcatagcgacccgctgtcgttaaatcacccggctgcgccgaatcgtcgcgatcaatcgcacgccgacgcactggctgcggcgagcgtcgacgcagcacggcttttccgagtctccctaacatatatcttttattatatcacttacgcttagcggttcgaatgatcatatccgccatatcacgcgctgcctgcgggcgggcaaaggtcaaaaatgctgcgcccatacgcgccattgctgcacgatcagcgagcaacgtctcaatcatccgaacaagtatctcaggatgatcatctagctgcagttcatcaattactttcaccgcacctttttcctcgtacactgccgcattttttagctgatggccacccgttagatagccattcggtaccaaaatcgtcggcttagcgagtgctgcaagctccaaaattgttgtagcacctgcacgcgccacaacaatgtctgccgcaccaagcatatcaaccagcccactgctaataaaatcatgaatatgcacctgatcggtatcgttcggaacacgtgcgcgaatattgctatattgctgcgcgccggtgataagaataatattcgactgcttaacgagctgtggcaacgttgcaacgacagcgtcgttaattcgctgcgcaccaaggccgccgcccgtcacaacgataagcggtcgccttggatcaaatccaaactttgctttgttttcacgccgccgcccgtcactatacggtacaaaatcttccataattggcacacctacatactgcgatatttcgcgcggatacggataaaatttcagcggcgcgcctgtaccaattgcatctgcccagcgcgctaaaacgcgattcgtcaagccagggtgcgcgtcagaatcgtgaataacaagcggaatccgcagtacatgcgccgccaaaccgaccggcaaacatacatacccgcctttcgcaaaaacgacatccgggcgccacgcaactagcttgcacaagcattgtataaacccaatacctaccttaaccgcatcaatgatattaggcagcgtaatcgtacgaagtctcatcaactgatgccaccatttcaaatgatgataccggcgcagcttaccgctcacaattgtatcgacacgaattgaatcatcgtacccgcccatgacagtacgcgcttgtttttcaaatgcataatcaacccagaaccgaatctctatgtttggttctattttccgcaattcacgcaataccgcgacgaccggcgtaacgtgtccgcccgacccgccgcctgctgccaaaatccgcacgagcatcctccttcatagtaactgacttatgattagtataccgcgaaagttgaaatacgacacctaacgcgccgctcataaaaatcatgctcgttccaccgaaactgagtagcggcaatgtaatgcccgtgaggggaatcaacccaatcattgaagcaatattcatcacaacgtgcgcaagcaaccaaccaaacacgcccgctgctgcgattcgcatagacatatcgggaagctgatcggcaatacgcaaaatgcggaataacagaataccaaatagcccaatgatacaaatcgtgccggcaaacccaaagatttcacccatgattgcaaaaattgagtcatttaccgcctcgggtaaatatccagtcgcttgaatacttttaccaatcccgcgcccaaataaaccgcccgtccctaatgctatcattgcgtttttaatatggtaattattatcacgctcgtccgctgcagcaacgtcgttgccagaactaaaaaacgtactaatgcgctccatacggtgcggcgataacacaaccagtaaaagccctagaataacaccaacgcctgcaatttttgccaaaatcttccagttcatcgtactgacaataaacatggacacaaccgctgctgcgattgacacacccgtacccatgtctttctgaatgacaacaacgataagcaacaataacgccaagagccctgccatcggataaaccgtttcttttaagtcgtcaattttaccctgctgataacgactgctcaaaaacactgccatgaatataacaacagcaaacttcattaattcagacggctggaatccgccgaaactgccaagattaaaccaacgatacgcacctaacgtcgcctgtgcaaacgtatcgatatgtgcaacatttcccaccaaaaacagcaatgcagacgcaataatcgctgcagccataatttttgttgcttgattttttagcgtcgagaacggcacaagcgctaatgcgacgaacacgccaagcgcgagaagtaaactaacgaattgtttaaatgcaaaatatgtcgccgaatacgagccgttatatgccgcattcattacattagcgcgctgcggaccaatcgcatacatcacaaccaaaccaatgagcatcagcacgcccatacacatgatgatcatgtaatcgggacgatgccgccgctgctcccggctttttacacgaacacgagccgtttctcgacgtgatgaagctaaacctttcatgaggtaatatgtcccccgctcagcgccatcaacatgccaatgaatgctgctacgccagcgattacccaaaagcgcatcgtaacttttacttccggccagcctgtcgcttctaggtgatgatgaatcggcgctgagatgaatatcttacgatgaaatagtttcttgctgatgatttgtagtaaacttgaaccagcctcaacaacaaacaaaaccccgataatcggcagcaagaacaacgtattcgtcatcatcgcaacaacacctaagcttgtcccaaatgcaaagctgccaacatcgcccatgaaaaaccgcgccgggtaaatattaaaccacaggtagctcagtaatgcgcctactaccgtaaagcagaatcccgctagcttaatatgcccctgcagtagcgcaattacaccaaacgctgaaaaagacatcaccaacaacccgcccgccagtccatcaagtccgtcgctgatattcaccgcattacccgttgacaccaccgccaatacgaaaaagaaaataatccacgcgccgacttgccactcgccaagatacggtatatggatcgtattgtagccaagcttcgtatagaagaaccaaccgagcacaatgctcattgcagtaaccatcgcaaactttacccagctgcgcagcccggcatccttacgatttgagccaaacacattgagcacatcgtcgatcaacccgacaaatgctccgccgagtaatgccgcgagcggcaaccaggtctgtgcccggtcaaggttgcacgctaatgtaatcgctgtaatcgctgccactgcgatagtacctgccattgtcggaacatgccgcgcaatcttctctttgtgcagtttattaaaaatctttaacttctcccctgttaccgctgcgctgcgctgcgttttccaaaacttatacttatatgcaaaatgcgtataaaccggcgttaacatcatcgccaataaaaacgctgccacgcttaacgcaaaggtttggttcaattcgtttgagaaatttacgattgtcatgctatctagtataccccgtctagccctgtggcgttagcattaaatagcgaagcatccaatttgagatatcgttgaaaatcggcttcgcatcgctgccgccgcccatgtctttgccgtcagcagcgatttcaaccataataacgtaacgcggaatctgccctttttcgccgccgtaacccaaatatgttccaatcgtctgatcgctggcatacttaccattcacaatcgtttcagacgtgccagtcttgccgcccacaagatagcgatccgaaccgtcttttggattgtacgttgcataatgtgattggtgaaccatttcgcgcaccgtcgttgacgttgcttcagtgatgacgcgcgtttgcgtctttgcgcctgctggcgtaaaagcgccatcgtcgttaattgtaccgttaataatcgtcggcgcgaaatacgttccgccgtttaccactgcgcaaaagccgcttgctacttgcagcatcgtcgcatccataccttgcccgaataccatgttgctataacgtaccgcattgccctcttgctgcagcggtgagataatcgtgcctttcgcttcattcgcaagctcaataccggtcagttcgcccagcttaaatttgtcatgaaaatattcataaatcgtattgcgcgcagcacgcgtaatatatgtgccattgcctaaacgctgcgcgatcgtcaccatgccggtgttaagcgaccagttcagcgctgtttgcatcgtaatagtgcctgtcaccgccatactctttgttgcattgttaatagtaatgccttcaactttaatcttaccggtgttattgtaggtactatcgggtgtaatcacgccgcggtcaatacctgtcgcaaccgtaaaggttttaatatccgaacccggctcatacggacttgagactgtactgttattaaaaactgccacgtccttcacatttaaattagacgggtcgtacgtcggcacattcgccatcgcaagcactttacccgttcgcggatccatcacaattgcactcgcccgcgtcgcaccgcttcgctttacgcctgccataagagcttcttcaacttttgattgcacattgcgatcaattgtcagcaccatatttttgccattcacagctggttttttgatattcttgtcggtcacggtcagcggcacatcgcgtacatcagtcacagtttttagctcgccgtctttaccagagagtatctcgtcgtttgcttgttcaaaaccgtacttccccttcccttcactattcacgaagccaagcacctggctcgcaagcgctccctccggataaacgcgctgcgtcgatgcatcaaatccgacaccagcaagcttctcgtctttgattttctgcgcctgtatacggctaactttcgtcgcgatcacttggtagcgcgtatgctttgcatctaagtattgacgaaaatctttgcgtacattaccgcccgccacacggttcatcacatcgattactttctgcttgtctacgatgagtgttggatcaacccaaaccgtatacaccgtcgtattcatcacgagtttcgtcggcgtatcgccgtccatcgcgtagatttccccacgcgccgcgcggagcgtaaactttttgatatgctctttatctgccaactggacataatagctatgttgcagtacttgcacacgaaaaagctgcgctaccattaatagcagcgctataagcgtcaaaatacccaacgcgctaatccgcgcatcacctcgactacctatattcatacttacttatttgctcacatattgtgtatcagctggcgacgtcattgcttgcgcaacactgctccccttcaccgactgaagtgctgtcaaacgagcattctcgaccgctaaatcattcttttgttcagtcaacgacgaaattttatcagacatagtattcgccgcataatcatagctcgacgcgcgtgtcgcctgtgttaagtatatcagacctagaatcgtaatcatcaaagcaacgatcactgtatgcgacacgggaccaagcttgacagccgatgcaaaagcaactgtattgcgattacgcccataattaccttggcgccggctattaaattgtactgttcgatgatatggcatggtagtggaatgtttgttcttatgttaatactatggcaacgcgtaccggctgcccctttgtttcatcattctgctttatcagcagcttaagcaccccggaaggggcgcttaagcgtgaagtgcaagaagcttataccctacggcgtacaacaacgctgcgcacggcttcgttcttgtcttggacttggatgtgacgtgtcatagctacatccccctttctgtttgtgttatattttcacagcgacgcgcagcttagcgctacgcgaacgcagattgtg

SEQ ID NO: 1921 - DNA, 13962 bp, synthetic construct
  misc_feature 1..13962: note = Synthetic
  source 1..13962: mol_type = other DNA
taacagaggtcgccttcaaaaaagggcagttaaaggggttagtatgcgcgtaacgttgaatcgcaaaaagtggagggtaagaatacttaatgccattgcgcgcaacctaacatattagttagaatagggggtataaggtgcttttgattagcgctttaactaaccaatcgctcctgattatagcaagcatttgacaacatgtcaatactttttatcacaaaagtcatggaaatcaatagaatccgtccagatgagcataattttacccagaggttggcaagtattgccaatccaccgaaaagcttgtgtttcatgggagcattgccgacgagcagcgcgccagtcgtggcaatcgtcggttcgcgcaaaccctcggcgtacggccgggaggtgaccgagcagctggcgggcgacctagcaaaagccggctgcatcatcgttagcggcctggcgctcggcatcgacggcattgcccaaaaagccgccctggaggccggcggcacagtcatcggcgtcattcccaatgaactacctgacatctcgccgcaaaccaattacaaactagccatgaatatcataaaaaacggcggcgccatcctctccgagtggaaaaaaggtgacggtaaagttgtcaatcgctggagcttcttggagcgcaaccgcttggtctccggcctagctgacgccgtcattatcaccgaagccgccgagcgcagcggcacgctgaacaccgccgcccacgccttatcccaaggccgcgacgtctttgccgtgccgggcaacatcaccagcccgctgtctgccggctgcaacgcgctgctcaaacaaggcgccctcgttgccaccactgccacagacattctcaacgtcatcgccccgtcaaccactcaatctgccaccgaccaagccgtcatccccctcggtgaaaccccagccgaaaacactatcatcgacttactccgaaccgacctcagagacggtgaccagctacagcaacaatccggcctcaacccagccgacttcgccacggcgctaaccatgctagagatcaacggcgtgatcaagccactcggggcaaataattgggcgctgcgatagttgcgataatattgccaatttgacaaattgatgataggctacggcttatggaagagagccgggaactagtactcagcagcgaggcggatagtgacgatggtatcaccgccttgattagggacgccttgaccattcctaatgcgatgagtctagcgggcggaaagttgacatgggacggtgcggaaaaccttgaggaggtttctggcttggtgcgggtgatcattgggcgaacgctcgatgttgctgacggagcggtcgcccgcgcaacaggacaaacaagtgatgttggcgcagccgttgacgcaatcaccgataaagtagtcacactcaaactactctatgaaatgctaaaaaagggtgcagcaccaaaatcagttatcggcaccatcgccgtgttgaacacgacaaacgctatcgcaacgggcatcgccaattgtcgtagtgaacacaagggagaaacgcgcccaaccacatcaggcaaattagcaatggctggtgagatgctagcattatttgcctacgcgggcgcccacaccgccgaacagaacggtaaaccaaagctagccaaaaccctccgcggagttggccacactgcatttatcgcctcgttaccacttgctgctcatgcctcatggacctatatcaaacgagctatttttggcaataatagtgatgatgatacgccagaggcttgactttttatccaataattgatatatatatcagattttcgttcagagaacgaagattcgtccgcctagaaagtctgggtgttgacaatttggacagagagaaagaaggtcgacatgactgatgagattcgcttccttgttcatgaatacggtgataccttcaccatacgtactaatctgtacgtacggtactgtacccagaggatcagccgagtacctgggatgatagcgactgtggacgacgatggattcggaatcaacatgaatgtacaggacgggtgctcaccgagaaaggtgattaccgacgttctaaaggcactgtgtgatttctacgacatcaggcatcctcaagtagagggtatcttcgaagaagatatcggtcgtgatattgaaagacactaccacacaaagaaggaacgacagatccaagaggatttgttaaaggccctttacaagggtcaactcataggtcagcggatcaagaaactaagcaaaaagctgaggaaactgaggaagaggcgacaagacctggataaagcttcctagcccccgcgaggacagacccatctctctgtcctcgcaaccagagccaccgagaaacaccctcggcggttgtggttgcgaggtgatttgatataatatagagttatgaaaaatctcgtcatcgtcgagtcaccagccaaagccaaaaccattgagaaatatttgggcaaggattttcacgttctgtcaagcgtgggacatatccgctcgattgtcaaaaaaaccaaggacggcacaccgccaattgatgtggcgaatgatttttttgctgtctacgaagttgatccagagaagaagaaagtcatcaccgagctgaagaaaaacgtcaaggccgttggcaaagacaacgtctggctagccaccgatgaagaccgcgaaggggaggctattgcctggcatctctgtaaagtgttggatttgccgattgagacgaccaagcgcatcgtctttcacgagatcaccaaagacgctatcaccaccgccatccagaatccgcgcaccgtcgacatgaatctggtgcaggcgcagcaagcccggcaaatcctcgaccgactggtcggctttgagctgagccccgtggtctggcaaaaagtgccaggcggcaaatcggctggccgcgtccagagcccggcagtgcggctgttggtcgaacgcgaacgagaaattatgaaatttgagggcagttcacagttcaaggtgaccgccatatttatccacgacaatcaagaattcaaggccgagctcaaccaaaaatttgattccgaagcggccgcgcacgaattcttaaatagtctcaagccagccacattcaccgtcagcgacatctcgaaaacgcctggcacccgcaacccagccgcaccgttcacgacctcaacgctgcagcaggaagccaacgccaagcttggctttagctccaaagccaccatggcctcggcacagcggctctaccaagacggtaaaatcacctacatgcgtactgactcggtcaatttgagcgggcaggccatcgctagcgccactgattttatcaagcggctgtacggcccgaattattcaactgtgcgcaagttcaaaaccaaatctgcctccgcccaggaagcccacgaggccatccgcccaaccgacattacccgcgaaaccgtcacctcaaacgagtacgaccaaaaactctacgacctgatccgccgccgcaccctggcatcacaaatgtcgacagcgaaattagagaaaacaacagtgacgattgatattgagggtggggaattatctgctcacgacaaaacatctacacaaacccgagaattgaacgacgatgagacgcggcgcggcgaggactgtctgagcgaagcgagttccgcagctgcccgagacgaatcggagagagaatctcggcgtgcggaagccgttttgaagggagcagataactctttcgagcgtttccatttcgaggccaaaggcgaagtcatcacttttgacggcttcttgcgtgtctatggcggcggcaaagacgaaatcttgccaaaactccataccggcgacacgcttgaaactcacaacattaccgcccgccaaaccttcgcccgaccaccagcccgctacaccgaaggctcactggtcaagaagctcgaagacctcggcatcggccggccaagcacctacgctactatcatcgacaccgtgcaaacccgcggctacgttgaaaaaggcgacagcgaaggccagccacgcgacgtcatcgtcctaaattataatggcgaagaggtcagccgtgacatcgttcaggaaaaaaccggctctactcgcggtaaactcatcccaacaccaagcggggaactaatcgctgactttttgaccgaccatttcacgcaaatcgttgactatgattttaccgccaacgtcgagaccgaatttgataaaatcgctgctgccgacctagccaaaagcgccatgctccacggattttacacgccatttcacaaactgattgaacaatcaggcggcatcgaccgcagtaaagtcggcgccaaccgtgaagtcggcatcgatccaaaatccggcaagccaatcctggcgcgctttggccgctttggcccaatgttgcagctgggcgccaccgatgacgaaggcaagccgcgctttgcgccgctaccaaaaggtgcaaaaattgaaacggtcaccctagagcaggcactagaaatgttcaagctgccgcgcgtcgttggccaaaccgaagacgggcaagacatcaaagccaatatcggccgctttggcccgtacatccaagtcggcaagctcttcgtctccatcaagcctgaagacccgcacaccattactctagagacagctcgcgaactctacgccgccaaactccaggccgaagccgagaagaatatcgctgactttggtgatggcgtcaaggtcctcaacggtcgctttggcccgtacatcaccgacggcagcaaaaacgccaagatccccaaagacaccgacccgaaatcgattacccacgaacaggcgcttgaattcttgaaggtcgcccccgccaagcccgcccgccgcggccgctcctcagccaaaccatccaaatccccgaggaaaagcagtcgctcaaagaagtaattgacccacaaaataactcaatcaagccacatttcattagtgctgtatagaccacattcccataattcacaaaattaaaaactatcacaccatttcattgcaaaaattgttaaatacatgctataattatggcgtactatacgacttgcttgacacgaaaatattttattgtataatagcaatatcgtcatatatcaacataacttctgaggtgaggcagagaggatttaacataaagccatgagcgacacacaagaacagagcgcaccagacaagcagcttcggcaagcggccgaggatgttttggcgcaaattccgcaggagcgcgagaaagagattattagccgtcgctttggtttatacggcagcaaagagacgctggagcagatcggcgacatgctcgggatcactcgtgagcgtgtccgccaactggaaaaggctatcctcgttcgcctccgtctactggtggctgatggcggcataccaagtgcctcgacggccgagaagatggtcacctcacacctgtcggaaatgggccgagccgcaccactgcataatctcgccaagcatgtcctcggccgggatgtcaccgatagcgaacgatctcatgtcgcctttatcgccgagctcaatccatcgatcaacatcatcaccgagaacgatgactattaccactcagccatcatcggcacgccgaacgacgagaagaatatcaagaagcaagttgaagaaattgtcaaagccatcaaacagcacggccagccagtcaccgctgaggaactacacaaaacgctcaattacgagcacccatccaacattgccgcgctcgcttcgatcagcaagaaactagcccatctccgcggcctatggggcctgatcaagtggccactcgtcaacccaaaaaccattcgtgacaagatcttcgtcattctcgacagtaacggtcagccaatgcacttctcggacatcgctaaggccatcaaggacagcgatttcaaacgcaaagatgtcaccatccaagccattcacaacgaactcatcaaagacaaacgcttcgtcctgatcggccgcggtatttacgccctcgagtcgtggggttacgctcgcggtaccgtcgctgacatcattgccagcgtcctacgcgaggccggcgagccgctgcaccgcgatgaaatcgtgaagcgcgtcctcgacaagcgtcaagtcaaagaaaccaccattctgctcaacttgcaagccaaaccgcaattccaacgctccgccaaggccacctacattctggtcagcgaagcctaagtttgcatttatctataaggggtgagataatgaaatagcatggaaattatctcttcgatgattagttttttaacgcagtggtacgtctggatacccatcacagctgtgctgtcattcttgacgtggcgcaactatcagcgggccgacgaattcgaaccgaccgagagtgtgttattagtactcgaaatccccaaagccaacgacaagaaagagttggccgccgagcaattattcgccagcctgcacggcatcttgcgcgacaaacgcgaactcaaattatcaggcgggcgacaggagcatatcagctttgaaatcgcctcggtcaacggtcaaattcgtttttacgtctgggtaccccgaacactgcaaagtttcgtcgagggacaaatttacgcccaatacccaaccgttcaaatccacgtcgccagcgaagattacaccgagcacgagcgtgagcattctaccgtgtacaccactgagctaaccttgacagcgccagaattcttaccaattcgcacctttcaaacctttgaagtcgatccgctggcgggaattaccggcacactggccaagctagaattaaccggcgaggaactctgggtgcaggtgctcatcaggccgatcgccgacagctggcagcagtctgccgatcgctggatcgccagcgtcaagagtggacataaacttatccccggactcggcggtggcggtctgcaatggattggtacgctgctcgaggctctctggaaaccaccaggccagggaagtgatggcaaaaaagcgcccgagctatctgagcgtgacaagacgcgcgtttctgaagcagagaagaaagccactaaattaggctacgacgtcaagatccgcctagcgtaccttggcgaagatcaaaccagcgccaagctacatatgcaggcgctggtcggtgcttttaagcaattcaactcaaccaacctcaatggctttcgcgccgtcaagggtgcgttcggcaaggagtttctcgacaagtaccgcaagcgcgcgttttacggcgatggctacatcttgaacatcgaagagctagcttctgtctttcacttgccgcacaccaatgtcgagacgcccaacatcgtctgggccagcgccaaaaccgccgaaccgccgtccaagctgcctgttctgaccggcagcgatgccaatgacgaccagatttccgcctttggcgtcaccaatttccgcggcatcaaccaccagttcggcatgctgcgctatgatcgctcgcgtcacgtttacattatcggccagacaggagcagggaagtcagggttactcgaattattcgcgctcagtgatatctttcacaatcaaggctacgccatcatcgacccgcacggcgacttcgccatcaacaacatgaaattcatccctggctcacggctgaacgacgtcgtctatttcaacccggccgacaccgcctatccgctcgggttcaatccgctggaagtcaccaacccgaaccaaaaaaccaatatttcatcagaagtcatcggcgtcctgaagcgcatgtttggagagagttgggggccgcggctagagtacatcttgcgctacaccattctggcgctgctcgaccggccagagacgaccatgctggacatcactcgcatgctgactgataaaaacttccgcaaagaaacgctgggctattgccgtgacaccgtagtcttgcaattctggaacgttgaattcgccagctggaacgacaagttcgtcgccgaggcggtcgctccagtcctcaacaaagtcggcgcctttaccgccaatcccatcatccgcaacatcatcggccagcccaaatccaccttcaatatccgccaaattatggatgagggcaaaatcctcatcgtcaatctatccaaaggcctcatcggcgaggataatgccgccatcctcggctcattcttagtcaccaagattcagctggccgctatgagtcgctcggacactccagacatccgcgaccgccgcccattttacctttacgtcgacgagttccagaacttcgccactgattcatttgccaccattctgtctgaggcccgcaagtatggcctcaacctgaccgtcgccaaccagtacatctcacagatgaacgaaaccgtgcgcgatgcagtctttggcaatgtcggcaccatgatttccttccgcgtgtctgccgacgacgcaccaatcctggctaagcaatttgaaccaaactttgaatcagtcgacctcttgcaaatgcacaatcgtaacttcgtcatcaacatggtcatcgggggagagaagacgccagccttctccgcgcgtaccctcgagcttccgccaagccaagccgataataccctgcacatcatcgagcattcacgacgtatgtactcacgaaacagggaagacgtcgagcgagaaattgccgccgtcatcatgccgccgcgcccgcaaaaacagcccacccagccgccgcgcccacaagccgtcgccgcagctgcactagcccagcccgctcaggcggccactagtcaaccggcacagggaaccacggccactaacacccaacacccctcactacaacccgaacccgtcacagacagcggcgaagtcatcttgcaaatccgcggcaacagcgcatttgaatcagcagccaccgacaccaccacaccgaagaaacgccgacgacgacggaagaagagtgctgcataaggccattgcaataactgagactttcagctacaattaccttacagtcccttaagtaaggattgtaccaatatctaaattgttttaggtttctataataatttagcaacttagggcggcggttttggccgcgcagctacggttgagaattctattgtgaatctaaagcaaagctctaatccgctcacttgttgggcggattatctttttatgtggctaaaaatacttatgctttcaattattactttttggttatataattatgccaaaaggcatcatcaaaaggacttatttatgacagaaaaatcttcatattcaccaaaaaaatactcgctagggctagacatcggtacgagctcaatcggctgggcagtactagatttagacaaggagcgtattcacgatttgggagtgaggatatttgagcgaccagaagacccgcaaaacggcgactcactggctaaacctcgccgcgatgcccgttcagctcgtcgccgtctgaaacgccgtcgccaacgtctcaatcacccctgaaacaatttttcgtcgaccaaaatattctcacgaaagatcaagtcgaggaggtgttgaactacaagtctgatttcaacaaattagacgtatatgagctgcgagcatgagcactcaccgaagaattatcgcccgaagagttgctcaaagttttatatcagattgccaaacgacgcggcttcaagtcgaaccgcaaggttgtcgaagaatcagacaaagaaggtggtcgtgttactagtgcacttaagactaacgagaaattcctcgccgacaacaattacacgaccgtcggcgaagcgctgagttgtgatgaaaaattcgctttgcataagcgcaataaacgcgacgactataccaacagttttgcccgcgatgactttttgcgcgaactagagctcattattaaaacccagcgaaactacgccctgaaaaatgttcccgaacaagctatcaaagaattaatttgtggcattgacgattgacaagtcactaacgtaagtgccatcatgtaccagcgtccatttatgactaaagagctaatcgaaaagatggttggcgactgtacgtttgaaaaaaatgagaaacgagcgccaaaagccagctatagtttcgaggtatttcgcctggcaagcgatttatcacacctcgttttcattccccgtgacgccggcaaacgccaggctaagcgtgaaaatctagaagtaaggctgtctccagaacaaattagcaaagtcattgatctagccaaaaaccaaaaaagcttaacctacaaaaaggtacgtagcaccgcaggaattagcgaagattacataccaaaagacgcgcgcggcaagaagaaagagggtgatgaattcggcgaagacaatacttttggcagcctaaaagcgtatagcgacatcagctcagcgctaaaagagctaccagaagattgggcaaaaattgataatgaatcggcgatcaaccaaatcgcctatatccttacgacacaaaaagccgacgaaggtattcgtgccgaactaaacacactaccactttctgataaagccaaagaggctattgtcaaaattaagccaaccaatttcaaggcgttcggacatttatcgatcaaagctctacaaaaaataacgccacacattcttgaaggtatgacttacgacaaagcctgcgaagcagctggctacgacttcaaaaagcaatctgccagcctagagcaaattaccaatcctgtcgtcaagcgtgccatcacccaaacgctgaaggttgttcgtgctattgaacgcaaatacgataagccatatttcatcaaagtcgaaaccgcccgcgacctcgcaaaaaacttcaaagatcgtaaagcaattgaaaatgagaataaagaaaatcaagcacgcaatcaaagtatcattcagacgctaaacgagaacggcatcgtaactccaaccggtcagcagataattaaagtcaagctctatcgcgagcaaaacggcgtctgtctatactccggaaagtcgattgattttgagacgatgctacgcgatgacaacgcttatcaagttgatcacatcgtgcctttttcacgctccaacaacgacggaattactaacaaagctctggtattaacagaggagaatcaaaagaagggcaatcaaacgccatttgaatattttggtgcagatgaaaaacgttggaaagagtttgctgctcgagtagagtcgacatacaaaacacgtgatatcaaaacagccgataaagcaacgaacgccatcaattacaaatacaacggctacgctatgaaaaagaagcaaaatctattgcttcaagactacaaaaatgacagctggaatgtgcgcgctctgaatgatacgcgatatatcacgcggtttatccaaaattacttacgccaaatgattgactttgccaaaggcgaagaaaaacagcgtgtaatcgcaccaaacggtacgacaacagcctatttacgcaaacgctggggactagcaaaggatcgcgctgaggatgtgttacaccacgccaaggatgcagcggttgtagcggcgattaatccaaaaattgtttatcaggcgaaccttttctctaaagagcaggagatgaaaaaataccttacaaacgtaaagacaattgacgagaaacgagaaattttacttgcatccacaaacaaaaatacgggtgagatcaccgatgaaacaacttttacaaaagctcaaagagatttagcgatagccgaatactttaagctgcgcagcgatgaagagacgaaaaaccgctttccaagcccatggccagattttagcaaagaagtcatgaaacgtaccctcaagactgatattgccacattgcaaaatgagctacgcgggcttgataattacgacgaagaattccgtctggacgtaaagccaatcttcgtttctcgcatgccacgccgcaaggctactgctcaagcgcacaaggagaccattcgctcaccaaaggttaaagataacgatcagcgaaccgtacgaatgccacttaataaaattaagcgcaaggatgtcgaaaactctgtacttaaagaatctgataagtggctgtacgataaattgctcgaaaggttagatgctcatgataataaccctgaaaaggctttcgctgaacctgtttacaaaaatgacaaaaaattcgacaaaaacggcaaacaactgtcgccggtctcgactgtcaaggtatactcgacgcaaccaagcggattttatatcaacaacggtaaagctttcgtcaacaacggatcgatggtacggcttgacgtatatcaaaaaccaaacaagaaaggaaaaatcgagcattttttcgtaccagtttacgcccatcaagttggcgaaaataagcccgcaccaataaagatcctaccagcaccaaaaggatttactgatgtggatgagacgttcactaaagtctgctcgttatatccgaatgattatgtacgaatttaccttaaaaatgagatacgagaggggtattatgtaaagtacaatgtagccaatggagctatgcagctattgccaaactatgcaacaggaaaaaatcaaaatacttttgtacaagtctatggtaaaaatgctcaggctatcgaacgctacgacgtctccgtcctcggcgataactataggtggttataaatggcctggcgcgtcgtagctatcgaaaatcctgccaggctgagtttgcgcgacaaccagctagtaatcgcgcaagcaactgaggcgactttgccaattgaggatatcgatgcgctcattctggatggctatggcatgactgcgactacaaatctactcacagcgctggcgaccaaaggcaccacaactgttatttgtgacgagaaacatttaccagccagcgtacttctgccgtattcacaacattcacgccaagccaaagtttcacgccaacagctcgccatgagccagcccctcaaaaagcaattatggcagcaaatcatcatcagcaaaattactaatcaagccgatgtattgcggtctatcgggttagatgacgccgccttacgagcccatgttaatgacgttaaatcaggcgataccagcaatcgcgagtcgctagctgctcgcatatattttgaccagctgcttgatgatgccacgcgccgtaagccaatttggcataatgctgcgcttaactatggctacgcgatggtccgcagtcatatcgctcgacacattgccgcccgcggactggtcgcttcgcaaggaatctttcatcacaatgagctcaatagttttaacctagccgacgacttgattgagccttaccgtgccgccgttgatttatatatcctagaaaaagttgccccgcttcacgtcggcgaccacgatgccagcctcaccaagcatgaccgtcaactcatcattgacatattaaattattgtgttataattgacagtaagaagtttgctgtaaagcatgcggttgagcgaacagttgaaagctttatcgaatgtattgaggtaaaggaggcacgtaagcttcttttaccaaaaatcgcctcctgacagggaagggatgtcatataaaatcatgagggtcgcagtattctttgatttgccgaccaacactaaagctgagcgcaaagccgctgcgcaatttcgcaagttcttgctggatgacggttttgatatgctgcaatatagcgtatacacgaggctgtgtccaaaccgcgatgttgccgaaaaacacatgatgcgcgttaaacgccacgcaccagatagcggatcggtacggttactatacttgaccgagcatcaatttacacatatgcacgttatcgttggcgagaaaaccgtccaggaaaagactgttccggtcggccagttggcatttttctaaccaaaaatccccctcgtaacagagggggatttgaggaagtattataccaatatctaaattgttagggaactataac

SEQ ID NO: 1922 - DNA, 12816 bp, synthetic construct
  source 1..12816: mol_type = other DNA
  misc_feature 1..12816: note = Synthetic
caggacaaagcaggacaaagcaaaacccgcagcaactagggtgagctgagggtttaagggttgggttgtgcaacaatgcctagctttgatataaaaacttgcgcactcaagcgaatgtgcagtataatagcaaatacagtcccttaagtaaggattgtatcaatatctgaattgttttaggtttctataataatttagctacttaggatttatgtcttaacataaattacggtagagagttctattgagaatctaaagcaaagctctaatccaccctccgatattcgctgggtggattatcttactcagtagtgtttatgcttggaatttagcaaaaatcattatataatttatacatgaaaccttcaaaatactctcttggacttgacattggtactacctccgtcggctgggcggtcattgatttagaaaaagaacgaattcatgatttaggcgtgcggattttcgaacgaccagaggatccacaaaacggcgactcgctcgcaaaaccgcgccgcgatgcgcgctcagctcgccatcgactcaaacgccgccgccaacgcttaaattatctgaagcgattctttgttaatgaaaaaattttaacgcaggcacaaatcgcagaaatacttgatccgaaatcaacatacaataagctagatgtgtatgcactgcgcgataaagcccttaatcacaaacttaccgccgaagagctgtttaaggtactctatcagattagcaaacggcgaggatttaagagtaatcgtaaatctgtagaagaaacagatcgtgaaggtggtcgtgttagcaaagcgttaacaataaacgaacaactcttggcagaaagaggctacaaaaccgttggacaagcactcgcgcaagatgaaaaatatactgagcacaaacgcaacaagcgcgatagttatactaatagttttgcgcgagcagacttcattcacgagctagaagaaattataaaatctcaacgaaaatatgctctaaacaacgtgagcgacgaagccctacacagccttatctacggcgtcgactcagacggtttattgaccaacagtagtgctatcatgtaccaacgcccgtttatgacggaagagctaatcaaaaagatggttggcgagtgcacctttgagaagggtgagaaacgcgcaccacgagcaagctatagttttgagattttccaatttgcaaataatttggtgaatctcgttttcgtaccgaaaaatacgaatagccgccaggcaaagcgcgaacactttagactaacgctgagcccagagcaaatcgcagctgtcgtcactgaagcaaaaaagactgcatcaatcacttataaaaaagttcgccaagtcgctggcattagcgaagaatatgctccggggtatgttcgcggaaaaataaataaggacgacccgtatggcgagaagaacgagtttggcaagctaaaagcctaccacgacatcaaaaaagcactaaaaagcacacccgaagattgggtgaaagttgataacgagtcaacactcaatgaaatcgcctatattctaacaactgaacgtgaggacgttgagattctcaaaaaattgagtgggctggcactttcggacgaggcaacgtatgcaattcttaaaattaacccaaagaattttagatcatttggacatctatctatcaaagctttgcaaaaaatcacgccacatattttgagcggattaacctacgacaaggcctgcgagaaagctggttatgatttccgcagaaagtctgctaacttagaacaaatcactaacccggtcgtcaaacgggcaatttcacaaaccaataaaatcgtgcaggcagtaattcgtaaatacggcaaaccgtattttatcaaggtagagaccgctcgagatttagcaaagaatttcaaagatcgcaaggcgattgaaaatgaaaataaggacaaccaagccttcaattcagagattaaagagattattgaacacggctacaacataaagcccaagactaaacgcggcaagaatttacttgagtttttgagagagaataatgtgccgctttcgcaaaatattgacgcaaacgggcaaatgataactaaggtcaaactttatcgagagcagaacggtaaatgtttatattctggcgatccaattgactttcaagccatgatccacgatgacaacgcgtatcaaatcgaccatatcgtgccattttcgcgttcaaacaacgacggcttaacgaataaagttttagtgaagactgaggagaaccaagagaaggcgaaccgcacgccatttgagtatttcggcggtgacgagacgcgttggaaacaatttgcagcacgcgtcaacgcaacataccaaacacgcgatatcaaaactagcgataaagcaataaatagcgaaaactataaattcaacggctatgctatgcgcaaaaagcagaatcttctcatcgaggaatataagaacgacagctggaacacgcgagcgctgaacgacacgcgctatattactcggttcgtacaaaattatctgcgccggacagttagcttcgccgaaggagacgataaacaacgtgtgcttgcgccaaacggcacgataacctcgtatttgcgtaaacgctggggtttgagtaaggtgcgtgaagaagacgtgctacaccacgcagcagacgcaacaattgttgcggcgattgatcaacatgttatttatcgcgctaatttatatgccaaacgcggcgaagttatcagattcttagcggctgccaaaaccatgaacgagaaaactaacaagttgacaggttaaatccttgatgatgacgaatttacgaaagcccagcaccgcaaggatgctttgcaagtcttgtcagacaagcactttcctgagccttggagcggtttccgcgacgaggtagatttgcgcactcgcaatatcaatagagaaagtctccacaagaaacttcaaggcgctcatctctatgatgaaaattttctgtctgaaattgagcccattttcgtttcacgaatgccacgccgaaaagcaactgcccaagctcataaagaaacgattcgttcgccaagagtaaaggatgacaaccaaagaatggtacgtatgccgctgagcaaaatcaagattaaagatgttgagaattctgttctgaaagagtcggacgcatggctgtacagtaagctcattttactattagaagcaaacgacaataaccctgagaaagcatttgctgagccagtctataaaaatgataagaaatttgataaacacggaaagccgctcatgccagtctcgacaataaaagtttactcaacgcaaccatccggtttcttagtaaataaaggtagggcattcgtcaataacggctcaatgattcgcctagacgtatatcaaaaacagaatcagaaaggcaaaattgagcactttttcgtaccggtttatgcgcaccaggtcggcaaaaaccaacccgcaccaacaaagattctacctgcaccaaaaggctttaccgatgttgataagacatttacaaaagtctgttcgctatatccaaatgattatgtacgatgttattttaaaaatacaattgaagaaggctattatctcgcctatgactcagcatctgggcaaattactgtcctaggacattccgcggcgaataaagagggcgataatagagttcgaatctcgcctcgctcggcaaccctcattaggcgttacgacatctcaatcctcggcgataacgccccgaggccatagtggcctggcgcgtaatcggtattcaaaatccaagtcgcctaagcctacgcgataatcagcttgctattacacaagacgaagaagtaagcctgccaattgaggatattgacgcactgattcttgacagctatggcatcaccacaacagcaaacttactaacagagcttgcgactaacagcacaacggttgtcatttgcgacgaaaagcacctgccagctagcgtattattaccgtactcacaacactctcgtcaggcaaaagtttcacgcctacagctaaatatgagtcaaccgctgaaaaagcaactctggcaacgcatcgtcatgcaaaaaatttccaatcaagctgacgtacttcagcacttcagcctaaacgatatgccattgcgtcaatacgctgtccaagtaaagtcaggcgatagcactaaccgcgaatcaatcgccgcccgtacctattttgaccagctacttgacgacgccacgcgcagaaagcctatctggcacaatgcggcgcttaattatggctatgcgatggttcgcagtcatattgctcggcacatcgccgcccgcggattagttgcctcgcaaggtatttttcaccatagtgagttgaacagttttaatctagcagacgacttaattgagccataccgagcagtcgcagacctatttgtgcttgagaggcttgcaccactccatataggtaagcaagacacaagtctcaccaggcaagaccgtcaaatgttagttgacatattaaattattatgttataatacaaaacaagaggtttactctgaaacacgccgtcgaaaaaacggttgagagcttcattgaaagtatgggagcaaaggaggcgagtaagcttctcttaccaaaaatcagcgcctcctagcaggaaagggatgtcatataaaatcatgcgagtggcagttttctttgatttgccaacaaatactaaagctgagcgccgagcagctacacaatttcgcaagtttctgcttgacgacgggtttgatatgctacagtacagcgtttatacacgactatgccctaatcgcgatgtcgccgaaaaacatatgatgcgcgtacgacgcaatgcaccagatagcggctcagtgcggttattatatttaaccgagcaccaatttactaatatgtacgtaattgtcggcgaaaaaactgtacaagaacgagcaattccagccacacagctagcatttttctaaacttaaatccctctcacaacagagagggatttaagtaagtattatatcaatatctaaattgttagggaactataaccagcgtcaccaccagtatgaactcgaaaatattatatcaatatctaaattgttagggaactataacacttcaactaaacaccgtaaagtagtcaacattatatcaatatctaaattgttagggaactataacagagttgaataaaacaatgaaagcgcgaggattatatcaatatctaaattgttagggaactataactcgttggtagcagagtctgctaattcagcaattatatcaatatctaaattgttagggaactataacgtatggtctcctatccagagctctattgtaattatatcaatatctaaattgttagggaactataacacgtcaaccttaaacttatagccttcaaatattatatcaatatctaaattgttagggaactataaccatatttgacagtctgtaaaacaggggctgtattatatcaatatctaaattgttagggaactataactgaccatattctcttctacaataaacccgcattatatcaatatctaaattgttagggaactataactgcattttaaaaaacaggtaatgacattcaattatatcaatatctaaattgttagggaactataactcctttcttattattcttgctatgcagtcgattatatcaatatctaaattgttagggaactataacaaaggtgaacgtgcaccaatattcaaatttattatatcaatatctaaattgttagggaactataacccagttatgcggttgaacacagtggagaaaattatatcaatatctaaattgttagggaactataacgagctactggtttagacatttatcactcagattatatcaatatctaaattgttagggaactataacatatgcggtcatttgcatagcgcggcgcgcattatatcaatatctaaattgttagggaactataacatttggctgcgtcgttctctgctctcttgaattatatcaatatctaaagctataaagaccttacgctgtcgccaccttctgtgctagatctgggaactttgcttcaactaggcgaagacgcttatcaagagattcgtagttgtgtttctgttctttgaagactgtttcgtctgcttcttcacggaacccttcttcaataaagatgtcatgacggagaccagtgatatttgcacggatagttaattgtcctgcttccaatgtttcgaagcgtctttcaaagcgtagttccatgtctcttactatgtttgtaaggttcttatggtcactgcggatgtcggagagttggatgtcgattgattcgaagcgttggtcaatctggttaaatcgttcatcgatttgttcaaacctcttatcaatctgttcgaatctcttgtcaatctgctcaaacctcttgtcaatttgcttgaacttagtattcatcgtctcagcaagcgttttaacagcacttgcaagatcctgaacctggacagttagatcttttacttgcgtagaaagcccttcgttcgtcatggttatatttaatcacagataggaagtaaaaacaaaacggttcagtcacctagcgtaaaatcattattgcaaaatagcggggggtaatctcattaccgttaaaaaaaagaacctcctttataagccagaaacgtcagaacaaaatacgaactaaactatagttatccggtcaatgccatcagttaaataatatatcgtttgactttcgtcagagaccttaaattcaaaattagatggtctatctttatttagaaccttaaggacaagccgatcataggcgatagatttattgaaattgtcagcaataaatgaatattgtgaaaaataggtgcgggaagggtgatgggacttaaggctgtctggtaattctattggtagttgcatggggaaacctccggtttaaagtttattaataaatatatactatcataacgtcgcacaatatagcttttacgacttataataccgtacgagaagatgaatcagcatccatctaatgtgagtgctaatttattctataaagaaccatttccatcttttgtaggggattgcgtagagattatacttttatatgtcactaacatacattaatacatcacatcttagcagctgcactcatacaactctcacttaattaaagaaatagcgccaaggctcttctgcgtaagtataacggcccgcaaacgacataatatacatttgtctttagaatcagtcatcatgcataagttatccacaaaaatatctggttaacgttaatttgcatttttattaaaaatattcccccactatcttttttttgcttttctaccctatttgatttttatacgattttatatttttatatagttttttctctcgttcgcttggattacataaaaacgaacaaaaatagaacatcccccaattggcaagagaagtggccttttttatttataaaatgctcgcctactcacccgcacatcaagatatgctgggttaactgaatgttcagcacaatactggatagcacgcaccgcgtcttcaacctggcttgctgccgcacgatcaatcgacaatctaaccggataccctaccccatcaagttttacctctatttgtcgagttgtgccttcaggcaaaattacgcttgaaacagtatatttttgcatcgaaaaatacccaacaaccttaccgacaaactctaaaaaccgattgctcacaagaaccttatttgtcgtcgcttgaacacccgtacggtcaataacttgcacgacaggagactcgggcacattccggtaaaacgccgctccgctagagtcgacaaacacaagtgttgcgcccgcttgccatgacacaactggatgccgcatgacgatagaaaattttgcacgcccaaacccagcaaaagcgactgtcggctcgacagactgaatctccggataatcatgctgtaaatagtcaataagggatttaatatctattagcgcgcgtagccgctcaaacggacgagccacgaggtaatcctgaattgctttttcatagcgctgcgtcgtttcagcagacggcgagtcaacgccaataagcgttacctttggcataacaactgattgatagagtacccatataagaccagcaatacccaccgaaagtacaaacaatcgtaatacgagcttacgacgatggtagcgtaatgtatgcacttgcacacgcggcgacttaagatcggcgtggcgctcacttgggcttgcgatttcggaaagaagactgccagtcaacgtgcggttacgccgaaaagcatagcgacccgctgtcgttaaatcacccggctgcgccgaatcgtcgcgatcaatcgcacgccgacgcactggctgcggcgagcgtcgacgcagcacggcttttccgagtctccctaacatatatcttttattatatcacttacgcttagcggttcgaatgatcatatccgccatatcacgcgctgcctgcgggcgggcaaaggtcaaaaatgctgcgcccatacgtgccattgctgcacgatcagcgagcaacgtctcaatcatccgaacaagtatctcaggatgatcatctagctgcagttcatcaattactttcaccgcacctttttcctcgtacactgccgcattttttagctgatggccacccgttagatagccattcggtaccaaaatcgtcggcttagcgagtgctgcaagctccaaaattgttgtagcacctgcacgcgccacaacaatgtctgccgcaccaagcatatcaaccagcccgctgctaataaaatcatgaatatgcacctgatcggtatcgttcggaacacgtgcgcgaatattgctatattgctgcgcgccggtgataagaataatattcgactgcttaacgagctgtggcaacgttgcaacgacagcgtcgttaattcgctgtgcaccaaggccgccgcccgtcacaacgataagcggtcgccttggatcaaatccaaactttgctttgttttcacgccgccgcccatcactatatggtacaaaatcttccataattggcacacctacatactgcgatatttcgcgcggatacggataaaatttcagcggcgcgcctgtaccaattgcatctgcccagcgcgctaaaacgcgattcgtcaagccggggtgcgcgtcagaatcgtgaataacaagcggaatccgcagtacatgcgccgccaaaccgaccggcaaacatacatacccgcctttcgcaaaaacgacatccgggcgccacgcaactagcttgcacaagcattgtataaacccaatacctaccttaaccgcatcaataatattaggcagcgtaatcgtacgaaatctcatcaactgatgccaccatttcaaatgatgataccggcgcagtttaccgctcacaattgtatcgacacgaattgaatcatcgtacccgcccatgacagtacgcgcttgtttttcaaatgcataatcaacccagaaccgaatctctatgtttggttctattttccgcaattcacgcaatactgcgacgaccggcgtaacgtgtccgcccgacccgccgcctgctgccaaaatccgcacgggcatcctccttcatagtaactgacttatgattagtataccgcgaaagttgaaatacgacacctaacgcgccgctcataaaaatcatgctcgttccaccgaaactgagtagcggcaatgtaatgcccgtgaggggaatcaacccaatcattgaagcaatattcatcacaacgtgcgcaagcaaccaaccaaacacgcccgctgctgcgattcgcatagacatatcgggaagctgatcggcaatacgcaaaatgcggaataacagaataccaaatagcccaatgatacaaatcgtgccggcaaacccaaagatttcacccatgattgcaaaaattgagtcatttaccgcctcgggtaaatatccagtcgcttgaatacttttaccaatcccgcgcccaaataaaccgcccgtccctaatgctatcattgcgtttttaatatggtaattattatcacgctcgtccgctgcagcaacgtcgttgccagaactaaaaaacgtactaatgcgctccatacggtgcggcgataacacaaccagtaaaagtcctagaataacaccaacgcctgcaatttttgccaaaatcttccagttcatcgtactgacaataaacatggacacaaccgctgctgcgattgacacacccgtacccatgtctttctgaatgacaacaacgataagcaacaataacgccaagagccctgccatcggataaaccgtttcttttaagtcgtcaattttaccctgctgataacgactgctcaaaaacactgccatgaatataacaacagcaaacttcattaattcagacggctggaatccgccgaaactgccaagattaaaccaacgatacgcacctaacgtcgcctgtgcaaacgtatcgatatgtgcaacatttcccaccaaaaacagcaatgcagacgcaataatcgctgcagccataatttttgttgcttgattttttagcgtcgagaacggcacaagcgctaatgcgacgaacacgccaagcgcgagaagtaaactaacgaattgtttaaatgcaaaatatgtcgccgaatacgagccgttatatgccgcattcattacattagcgcgctgcggaccaatcgcatacatcacaaccaaaccaatgagcatcagcacgcccatacacatgatgatcatgtaatcgggacgatgccgccgctgctcccggctttttacacgaacacgagccgtttctcgacgtgatgaagctaaacctttcatgaggtaatatgtcccccgctcagcgccatcaacatgccaatgaatgctgctacgccagcgattacccaaaagcgcatcgtaacttttacttccggccagcctgtcgcttctaggtgatgatgaatcggcgctgagatgaatatcttacgatgaaatagtttcttgctgatgatttgtagtaaacttgaaccagcctcaacaacaaacaaaaccccgataatcggcagcaagaacaacgtattcgtcatcatcgcaacaacacctaagcttgtcccaaatgcaaagctgccaacatcgcccatgaaaaaccgcgccgggtaaatattaaaccacaggtagctcagtaatgcgcctactaccgtaaagcagaatcccgctagcttaatatgcccctgcagtagcgcaattacaccaaacgctgaaaaagacatcaccaacaacccgcccgccagtccatcaagtccgtcgctgatattcaccgcattacccgttgacaccaccgccaatacgaaaaagaaaataatccacgcgccgacttgccactcgccaagatacggtatatggatcgtattgtagccaagcttcgtatagaagaaccaaccgagcacaatgctcattgcagtaaccatcgcaaactttacccagctgcgcagcccggcatccttacgatttgagccaaacacattgagcacatcgtcgatcaacccgacaaatgctccgccgagtaatgccgcgagcggcaaccaggtctgtgcccggtcaaggttgcacgctaatgtaatcgctgtaatcgctgccactgcgatagtacctgccattgtcggaacatgccgcgcaatcttctctttgtgcagtttattaaaaatctttaacttctcccctgttaccgctgcgctgcgctgcgttttccaaaacttatacttatatgcaaaatgcgtataaaccggcgttaacatcatcgccaataaaaacgctgccacgcttaacgcaaaggtttggttcaattcgtttgagaaatttacgattgtcatgctatctagtataccccgtctagccctgtggcgttagcattaaatagcgaagcatccaatttgagatatcgttgaaaatcggcttcgcatcgctgccgccgcccatgtctttgccgtcagcagcgatttcaaccataataacgtaacgcggaatctgccctttttcgccgccgtaacccaaatatgttccaatcgtctgatcgctggcatacttaccattcacaatcgtttcagacgtgccagtcttgccgcccacaagatagcgatccgaaccgtcttttggattgtacgttgcataatgtgattggtgaaccatttcgcgcaccgtcgttgacgttgcttcagtgatgacgcgcgtttgcgtctttgcgcctgctggcgtaaaagcgccatcgtcgttaattgtaccgttaataatcgtcggcgcgaaatacgttccgccgtttaccactgcgcaaaagccgcttgctacttgcagcatcgtcgcatccataccttgcccgaataccatgttgctataacgtaccgcattgccctcttgctgcagcggtgagataatcgtgcctttcgcttcattcgcaagctcaataccggtcagttcgcccagcttaaatttgtcatgaaaatattcataaatcgtattgcgcgcagcacgcgtaatatatgtgccattgcctaaacgctgcgcgatcgtcaccatgccggtgttaagcgaccagttcagcgctgtttgcatcgtaatagtgcctgtcaccgccatactctttgttgcattgttaatagtaatgccttcaactttaatcttaccggtgttattgtaggtactatcgggtgtaatcacgccgcggtcaatacctgtcgcaaccgtaaaggttttaatatccgaacccg

SEQ ID NO: 1923 - DNA, 12496 bp, synthetic construct
  source 1..12496: mol_type = other DNA
  misc_feature 1..12496: note = Synthetic
gtttgccgcggcgtaaatattcggcgttaattgaggtaatttctagctcgccgcgattgcttggtttgacatttttagcaatttcaataacatcgttatcgtaaaaatataatccaacaactgcaaagtctgattttggctgagttggcttttcttcaattgagacagcccggttttggctgtcaaactcaacaacgccatatcgttctgggtcggaaactttgtaagcaaaaacagtaccaccatctggattagtacatgcttgtagtgatctatcgagagctgcaccatagaaaatattatcacccaatactaacgctactttgtcatcgccaatgaaatcctcaccaatgataaaagcctgtgctaatccatctggacttggttgaacggcgtactgtagactaattccccattgtgagccatcaccgagtagtcgttgaaaactactctgatcttctggcgttgttatgattaagatatcgcgaatgcctgcttgcattagtgtagttaatggatagtagatcattggcttatcgtaaatcggcatcaactgtttgctaatagcctttgtgattggccataatcttgtacctgatccacccgctagaattattcctttcatcatcctctactcctaagttatttatctatgatatatcataccacattgactagtataaggggtaatattcatgagtaaaagtaataaaataaattatttgatatgcaaacaaaaccagatattatttgtctggttttgttcatttaagatatttataattaaaatattatttggcgaagtattgttttaaatcatcacgccagtcattactaataaacccagtagagtgcagtttgtctaagttcatatcgctattgagaggccgtggtgcgatcccgtctttacttgcaaaatactcagctgttgtggtgttggtaacagtcagattattgcggccagctagtttgaaaattcgcctggtaatatctgcccagctctccagtggaccgtcattagtagcgttgtacgtgccgaatggcgcttgagttgacaataggtgatcaataatacgaactagctcgctagtgaatgttaatcggccaatttgatcatgaacaacagttggcgagatatttttttctgctaatcccagcatggtacgtacaaagtttttaccttcaccaatcacccaagcagtacgtagtaagtaaaaattatccagttgctcgacgagtaaatctccggccgcctttgatgcgccataagcactcagcggactgaaatcctcgttttcgtaatgcgactctttcgtaccgtcaaatacataatcgctggaaatgtgtactagcgttatgttatggtcgcggcaaattcgggtcaggtttgcgaccgctgaggcgttaactttccaggctgctaagcggccctctggcgtttctgcaccgtcgacattagtgaaagcggccgtattaagaattgttgacactcctgaccactcaaacgatgttaatgatttttgatcagttatatctagttcacttctgctcgtaacttgagcatttggataatgtttcctcagtgctattcccaattgaccattggcgccagtgattaaaaacttactattatccattagattaaacctccattggaattacatttgtaagtagtggatgagcggcgtctttttcggaaataatcgcttgctcttggctgattggccagtcaataccgagtgctgggtcaaacagattgacaaaggtgtacttggcgtctggtgaccagtgtgcgtcaaccaggtaagtgtaggcaatgttgtcatcaagcgcttgatagccattggcgacgcctttcggtacgaaaattgccgtgccaggattgatttcatgtgtgaaaactcgaccgaaactgtcgcctttgcgcaaatcgcaccacgcaccaaagacgcggccattggcggtggagatgaatttattccacggctcggcgtgtaggccgcgagtggcgccagctttgtcattgaagctaatattgttctggacaatttcaaacgccggcagaccaagcgcttccatcttttccttttgatagttttccttgaaccagccgcggttatcgccgtgaacgggtagcttgatgatgaataagccaggaattggcgattcggtaacggttagttcgttgtaatttgacgggtcaaaattcatgtgttctccttttgccatagataataatattgtaagccagccagtgtctgacagtcattaatctcgccatttcgaatcaagtcatcaatctcatcaagcgtgaaaaatcgcatatcactaaacagttcatcgctttgttcgcgctggccagtgaagcttagttctcgggccaggcaaatagccattttctccgtcattaggccattgcagacgtatgcttcgcctagtttttgccaagattgagcgatgatgccggtttcttcctcgagttcgcgctttgaggcttctagtatatcttcattgtcgctcccgccgccgggcaactcccaaccaaaactttgtgacggatagcgaaaaccgcgcactaaataaagctgctcttggtcgtctactactacaatcatgcacgaatctcgcgactccatatagccatagattccggtatttccgtcttggctaacggtctgatcttcgtgaatggtgatccaaggattctggtagacgattttgctgctgactttcgtttttgacggcgtatctgtcatgattattgcccctgttttgcgtaggctgcctcaactgcttctttttgggctttccaccagtcttcgtgctcgcggtaccattcgatggtttgcattagaccatcgcgcataccagtttgattgtcagtgtactcaggttgccagcctagttcgcggcgcaatttgctggagtccatggcgtagcgcatgtcgtggccagggcggtcgttgacgtgctcgtaccaatccttgcctttgtccatcagctcgcaaatcaattcaatcaccatcttgttattaacgtggtcgttgtcggcgccgatgatgtaagtttcaccaagcttgcccttttccaagatgaggtgaactgccgagttgtggtcatcaacgtgaatccagtcgcgaacctgttcaccggtgccgtacaatttgggcttgatatcgctcaaaatattggtgatttggcgcggaataaacttttcgatgtgctggtatgggccgtagttgttggagcaattggaaatcgtcgctttgatgccgaagctgcgaatccaggcgcgtactagcatgtcgctggaagctttggtgctggagtaggggctggatggattgtatggcgtgtcttcggtgaagcggtttggatcgtcgagctctaagtcaccaaatacttcgtcggtcgagatgtgatggaggcgcttaccgtgcttgcggatagcttccaagatagtgtaggtaccaaccacgttggtctcgacaaacggccacggattgcgcagagaattgtcgttatggctttcagcggcgaaatgtaccacaatgtcagtttcagccaccaatttatccatcaactcggcattgcaaatgtcgccttcgacaaaattaatttggctagctactggctccaagttggcgcgattacccgcataagtaagcttgtcgataacagtgatatcgtattctggcttgtgtttgacggtataatgcacaaaattcgagccaatgaatcccgcgcctcccgtgactagcatctttgtcatatttatattgtaacaaattaatatattaaaatatatttttagtctgcaaatccatttggattatttgactgccacttccaactatcggcacaagcttgttctatagaataaacagtttgccagccaagttctttcttggctttacttgcgtctgcataagaagcggcgatatcacctggtcttctatctgttatttcataaggtattggctttcctgcagctttactaaatgcatcgattagctccaatactgagacacctttacctgaacacaaattataaattgcaacacctggcttactgtggtttaaggctgctgtatgtcctgatgctaaatccatgacatgtatataatcgcgtacacccgtaccatctggagtgtcgtaatcatttccaaatacaccaacctttgcgagtcttcctacagctacttgagcaatgtaaggtaaaagattatttggaatgccatttggatcttcgccaattaaaccagatttgtgcgccccaactggattaaaataacgcagaatagtaacttcaaaatctgggttagctgcggctatgtctgttaatatctgctcaatcataaattttgtccacccgtaaggattggtaataccgacaccagcttgatcagattctgtaattggtaatttttttggtactccacatactgttgccgaactagagaatactattttattgacatcaaatttactcataacaccaaataaaattaaacttgattctagattatttgaatagtattttagaggttgtttaacggattcaccaactgctttaagtcccgcaaaatgaattacagcatcaggcttttccttttcaaagattttttctaacttagatctattacgaatatcagcttcgtaaaatggaatttctgttttagtaattttattaagcctattaataacttcttttgatgaatttgagagattatcaacaatgactatatcatttccattctctataagttctattgcagtatgtgaacctatgtatccagttccaccagtaagtaaaatcttcataaaacaaatcctttctataatgtaattgtaaccactattatataatgtaaatatgataaccgtaattatagctggtggcgctggtactagactgtggccactttcaacgccaaacaatccgaaacagcttttgactctaactagcgaacgaactatggttcagcaagcttatgatcgtgcctctagactaggggatacggtatatattgttactgaatctagtcatgcagataaactacgcgatcaacttccagaactccctaacgatgcctttttaatagaaccagggcgtcgaggtacggcacattgtattatttttgcacttgattatattgcacgccatcataaagccaatgaacccgttgcttttattcattccgatcataatgtccgtaatattaaaggctttaagcaatcttttcaatcggcggctaccatatctcaacagaatgattcaatcgcgctagttggcattgaacctactgcaccgtcaactggttttggatatattaaatgtggcgacttaatcgataaaagtaataatgcatatacggtaaaatcatttaaagagaaacctgattacgaaaccgctaaaaaatattttgcttctggtgattatttatggaacggcggatattttgttgggtcggttgatatttttgtaaaacaaatgcaacaatttgcacccactttgatggaagattacaataaattaagattcttatctcacttcgctagtgaggaatattacaaaacatatcttagttttgatgttcaagcaattgatacagtcttgatcgaaaagatgccgaacttatttatgatttcggctagttttgattggatggatattggaaattttaaagatttatatgatgtccttataaaagatgaaaagggtaattattgcaaaggcgaaaatatttatattttagatactgatacagcttatgtccgtaatgaagagccagataagccagtcgcggttattggattagataatattgttgtggttaatacgccgaacggtgttttggttgcaagaaaggatatagctgctaaaacaagtgaaattactaagatgttgaataaaaaaataaattaagatccatattgccatttaaaatgtagcgtgatatatttaaattacagtcccttaagtaaggattgtactaatatctaaattgttttaggtttctataataatttagcaacttagggcgacgattttgatcgtgcagctacggttgagaattctattgtgaatctaaagcaaagctctaatccgctcactagttgggcggattatcttttgtgcgtttcgattcctcttatactttcaatcattatcatttgattatataatataatcaacaacgacattataaaaggggcttctttatggcacaaaaatcttcatattcaccaaaaaaatattcgcttgggctagatatcggcacctcgtcggtcggctgggcggtattagacctagacaaggagcgtattcacgacttgggagtgaggatttttgagcggccagaggatcctcaaaacggcgattcgctggctaaaccgcgacgcgacgcccgatcagctcgccgccgtctgaagcgtcgtcgtcagcgcctaaatcacctaaagcaattttttgtcgaccaaaacatccttaccaaagatcaagttgaagaaattctaaattacaagtctgatttcaataaattagacgtatacgccttgcgagcaaaagcactcaccgaggagttatcgcctgaagaattactcaaagttttatatcagattgccaaacgacgcggctttaaatcaaaccgtaaggtcgtggaagaatcagacaaagaaggcggccgcgtaaccagcgcactcaagactaacgagaaattccttgccgacaacaattacacgaccgttggcgaagcgctgagtcgcgatgaaaaattcgctttacataagcgcaataaacgcgacgattataccaacagttttgcgcgcgatgattttttgtgtgagttagaagctattattaaaactcagcgaaactacgccctgaaaaatgtccccgaaccagctattaatgaattgatttacggcattgacgatggacaagtcaccaacgtcagcgccataatgtaccaacgtccatttatgaccaaagaactaatcgaaaagatggtcggcaagtgtacttttgaagatggcgagaagagagcaccaaaagccagttacagcttcgaaatatttcgcctggcaagcgatttatcacacctcgttttcattcctcgtgatgccagcaaacgccaggccaagcgtgaaaatctagaaataaggctatctccggaacaaattaaacaagttattgatctggccaaaagtcaaaaaagtttaacgtataaaaaagtgcgcagcacggcaggaattagcgaagactacgtaccaaaagatgtgcgcggcaagaagaaagatggtgatgaattcggcgaggaaaacgtcttcggtgggctcaaagcctacaatgacattaggtttgcgctaaaagatctaccagaagattgggcaaaaattgataatgaatcagcaatcaaccaaatcgcctataccctcactacacaaaaagccgacgaaggtattcgtaccgaactagacacgctaccgctttctgataaagccaaagaagctatcatcaaaatcaagccaaccaacttcaaagcattcggacatctatcaatcaaggctttacaaaaaatcacgccacacattctcgatggtatgacttacgacaaagcctgcgaggcagctggctacgacttcaaaaagcaatctgccagcctagagcaaattaccaatcccgtcgtcaagcgcgccatagcacaaaccctgaaggtcgttcgtgctattgaacgcaaatatgacaaaccatactttatcaaagttgaaaccgcccgcgacttggcaagaaatttcaaagaccgcaatgcgattaaaaaagaaaacgacgaaaaccaaggatacaatgaagacattaaatcaataattacagacgggtacaaggcatcgcctaaaaccaagggcggtaaacagctccttagccatcttaaagagcttaacgtgccattaaataagaatgcggattttaatagtcagcaaatcgtcaagattaaactctaccgcgagcaaaacggcgtctgcctgtattctggaaagtcaattgattttgaaaccatgctgcgcgacgacaacgcctaccaagttgatcatatcgtaccattttcgcgttccaacaatgacggaatgacgaacaaagttttggtattcacagaggagaatcaaaagaaagccgacaggacgccgtttgaatattttggtaccgacgaacaacgatgggagaaattcgtagcacttgttgaaacaacgtataagacacgcgatgtcaaaacatccgacaaagctacgaatgctattaattacaaatacaacggctacgccatgaaaaagaagcaaaatctactacttcaagattacaaaaacgacagttggaatgtgcgtgcgctgaatgacactcgatacatcactcgatttatccaaaattatttgcgccagaatgtcgactttgccgaaggtgaagaaaagcagcgtgtaatcgcgccaaacggtacgacaacagcatacttacgcaaacgctggggactagccaaggatcgcaccgaggatgtattgcatcacgccaaggatgcagcggttatagcggcaatcgaccaaagtatagtgaggcaagctaatctatttgcgaaacgcggtgaaatagccactctattagccgctgcgaaaacgatggaagaaaagactgacaagttgactggtgaaattattgacgaagacgaatttgacaaggctcagcgacgcaaggatgcggcgatcgtactatcctcgaagtactttccgcaaccatgggataatttcggcaaagaagtcatgaaacgcacactcaacaccgatataaccacactacaaaatgagctacgtgggcttgataattacgatgaagattttcgcctaaacgtaaaaccgatcttcgtttctcgtatgccacgtcgcaaagccaccgccaaagcacacaaggagactattcgctcaccaaaggtcaaagatagtgatcagcgaaccgtacgaacgccgcttaataaaattaagcgcaaggacgtcgaaaactctgtacttaaagaatctgataagtggctgtacaataagttacttgagaggctagatactcacgacaacaatcccgaaaaggctttcgctgaacctatttacaaaaatgacaaaaagtttgataaaaacggcaaaaaattatcgccagtttcgaccatcaaagtctattcaacgcaaccgagcggcttttatatcaacgatggcaaagcgtttgtcaataacggatctatggtacggcttgacgtttatcaaaagccaaacaagaaaggtaaaatcgagcactttttcgtgccagtttacgcccatcaggttggcaaaaataggcccacgccaacaaagatactgccaacgcccaaaggctttactgatgtagatgaaacattcactaaggtttgttcgttgtatccgaatgattatgtgaggtgctactttggcaataaaattaaagagggatattatgtaaaatatggcattaataatggagccatacaggtgatagctcatggcactaccagcaaagacaaggaccaccttatccaaatctcaccccgctccgcaaatctcatcgaacgctacgacatatccgtccttggcgataactacaggtggttataaatggcctggcgtgtcgtagctatcgaaaatcctgccaggctaagtttgcgcgacaaccagctggtaattgcgcaagatgtcgaagcaactttaccaatcgaggatatcgactcactcattctggacggttatggtattaccacaactacaaatctactcacagcactagcgaccaagggtacgacgactataatatgtgacgaaaagcacttaccagctagcgtacttctaccgtattcacaacattcgcgccaagccaaagtttcacgtcagcaactcgccatgagtcagccgctcaaaaaacagttgtggcaacaaattattatcagtaaaattaccaatcaagccgatgtcttgcggtcaatcggattagacgatgccgccttacgcacccatattagcgatgtcaaatcaggcgacactagcaatcgtgaatcaatcgctgctcgcatttattttgaccagctactcgacgacgccacacgtcgcaaaccaatttggcataatgccgcgctcaattatggctacgcgatggtgcgcagtcacatagctcggcatatcgccgcccgcgggctagtcgcttcacaggggatttttcaccacaacgagcttaatagttttaatttagctgacgacttgatagagccctatcgtgctgccgttgacttatatgtcctagaaaaagtcgccccacttcatgttggcgaccgtgacgccagtctcaccaaacatgatcgacagcttattattgacatattaaattattatgttataatgagtgataagaagtttatgataaagcatgcggttgagcgaacagttgagagttttatcgaatgtatcgaggtaaaggaggcgcgtaagcttcttttgccaaaaatcgcctcctaacagggaagggatgtcatataaaatcatgagggtcgcagtatttttcgatttgccgaccaatactaaagctgagcgtagagccgccacgcaatttcgtaagttcttgctggatgacggctttgatatgttgcaatatagcgtatacacgagactgtgcccaaatcgtgacgtcgctgaaaagcacatgatgcgcgttaagcgttatgcaccagacagcggatcagtgcgactgctttatctcactgaacatcaatttacccatatgtacgtcatcgttggcgaaaaaactgtccaagaaaaagctgttcccgccgcccaactagcatttttctaaccaaaaatccccctcgtaacagagggggatttgaggaagtattataccaatatctaaattgttagggaactataacctggactgtcacggttcgctcggccggcgcattataccaatatctaaattgttagggaactataactcaagaggcttacgcaaaagatttgaagcattataccaatatctaaattgttagggaactataacaatcgcgaagttcattgtcggcgatgctgtattataccaatatctaaattgttagggaactataactttatggcgaccgcaagcaatacactcatattataccaatatctaaattgttagggaactataacagattttggcttgaagcctttgtaggctttattataccaatatctaaattgttagggaactataaccgcttggtcgttcctgtccagcttgaagctattataccaatatctaaattgttagggaactataactgacattattccatcgagtgctttttctaaattataccaatatctaaattgttagggaactataacttttgcttcatcgatagcagtattaccctgattataccaatatctaaattgttagggaactataacccgcttatactttcggccgcatttaggacaattataccaatatctaaattgttagggaactataacagaaactgcacgaaacttccgtcaagagacattataccaatatctaaattgttagggaactataacagattttggcttgaagcctttgtaggctttattataccaatatctaaattgttagggaactataacttatagccagctgacgttacggctgctttaattataccaatatctaaattgttagggaactataacaatcgttaacggcatatcacagctgatccaattataccaatatctaaattgttagggaactataacagtaagtcgttaaactgctctgccttatgcattataccaatatctaaattgttagggaactataaccgacgacgtgaccaaaatggcaatcaccatattataccaatatctaaattgttagggaactataacacacgtcttgcgcttctccgtccattcatgattataccaatatctaaattgttagggaactataacaagcaggtggagttgtcactgtatgatggcattataccaatatctaaattgttagggaactataacaacttgcggtcgtaggtaaatcgaaaatcgattataccaatatctaaattgttagggaactataacgacctttttattgcggtgccatttccgccgattataccaatatctaaattgttagggaactataacaagacatggttaataaagaacttaaatccaattataccaatatctaaattgttagggaactataacccaaaacggtatttccaccccattcttttaattataccaatatctaaattgttagggaactataacaagagaagtgtcgacggatcggtgagaaccattataccaatatctaaattgttagggaactataacccaaaacggtgttgccgccccattctttgaattataccaatatctaaattgttagggaactataactcactgagagtctttattt

SEQ ID NO: 1924 - DNA, 10963 bp, synthetic construct
  source 1..10963: mol_type = other DNA
  misc_feature 1..10963: note = Synthetic
gtagctttcatctacttgtactacaccctccagcatggcggtgagcttgctgctgtcaggtagttgcttgcggaatcgggcaaaccagcgtagagcagtagtatagcttacgccagctaataggtatgacgtttccgttgagcgttttgtttgctagcagtagagtaggatgaacagagctgccggggacttagcttcatgccgtataaccaactagcctggtagctggtagctggtaggtcagtatttcttgcggcacagtttacaccacagatatttgttgcaatagttttcatgaagacccttatggcagcgaggacaagatacctcatcgccaaagactagtttgttaaggatctgccagtatttcttgttactggcaaactttggtatggtagacattaggaacatctcctttcacttagttgctattcactcctaagtttacgggatgctctggtttaggttaatggaccgacgttaaagtcaatactttttactaaaattatgtcataatattaaaatttataattataactattacacttaccggaaactaatttccctagtatcacagtaagatatacgttacagtgtgagtaatgaaatatgacgaagatggaggagagtgatagtgcgagggtgtgggtatttactatgaatacgctttgatataaaaacttgcgcactcaagcgaatgtgcagtataatagcaaatacagtcccttaagtaaggattgtatcaatatctgaattgttttaggtttctataataatttagctacttaggatttatgtcttaacataaattacggtagagagttctattgagaatctaaagcaaagctctaatccaccctccgatatccgctgggtggattatcttactcagtagtgtttatgcttggaatttagcaaaaatcattatataatttatacatgaaaccttcaaaatactctcttggacttgacattggtactacctccgtcggctgggcggtcattgatttagaaaaagaacgaattcatgatttaggcgtgcggattttcgaacgaccagaggatccacaaaacggcgactcgctcgcaaaaccgcgccgcgatgcgcgctcagctcgccatcgactcaaacgccgccgccaacgcttaaattatctgaagcgattctttgttaatgaaaaaattttaacgcaggcacaaatcgcagaaatacttgatccgaaatcaacatacaataagctagatgtgtatgcactgcgcgataaagcccttaatcacaaacttaccgccgaagagctgtttaaggtactctatcagattagcaaacggcgaggatttaagagtaatcgtaaatctgtagaagaaacagatcgtgaaggtggtcgtgttagcaaagcgttaacaataaacgaacagctcttggcagaaagaggctacaaaaccgttggacaagcactcgcgcaagatgaaaaatatactgagcacaaacgcaacaagcgcgatagttatactaatagttttgcgcgagcagactttattcacgagctagaagaaattataaaatctcaacgaaaatacgctctaaacaacgtgggcgacgaagccctacacagccttatctacggcgtcgactcagacggtttattgactaacagtagtgctatcatgtaccaacgcccgtttatgacggaagagctaatcaaaaagatggttggcgagtgcacctttgagaagggtgagaaacgcgcaccacgagcaagctatagttttgagattttccaatttgcaaataatttggtgaacctcgttttcgtaccgaaaaatacgaatagccgccaggcaaagcgcgaacactttagactaacgctgaacccagagcaaatcgcagctgtcgtcactgaagcaaaaaagactgcatcaatcacttataaaaaagttcgccaagtcgctggcattagcgaagaatatgctccggggtatgttcgcggaaagataaataaggacgacccgtatggcgagaagaacgagtttggcaagctaaaagcctaccacgacatcaaaaaagcactaaaaagcacacccgaagattgggtgaaagttgataacgagtcaacactcaatgaaatcgcctatattctaacaactgaacatgaggacgttgagattctcaaaaaattgagtgggctggcactttcggacgaggcaacgtatgcaattcttaaaattaacccaaagaattttagatcatttggacatctatctataaaagctttgcaaaaaatcacgccacatattttgagcggattaacctacgacaaggcctgcgagaaagctggttatgatttccgcagaaagtctgctaacttagaacaaatcactaacccggtcgtcaaacgggcaatttcacaaaccaataaaatcgtgcaggcagtaattcgtaaatacggcaaaccgtattttatcaaggtagagaccgctcgagatttagcaaagaatttcaaagatcgcaaggcgattgaaaatgaaaataaggacaaccaagccttcaattcagagattaaagagattattgaacacggctacaacataaagcccaagactaaacgcggcaagaatttacttgagtttttgagagagaataatgtgccgctttcgcaaaatattgacgcaaacgggcaaatgataactaaggtcaaactttatcgagagcagaacggtaaatgtttatattctggcgatccaattgactttcaagccatgatccacgatgacaacgcgtatcaaatcgaccatatcgtgccattttcgcgttcaaacaacgacggcttaacgaataaagttttagtgaagactgaggagaaccaagagaaggcgaaccgcacgccatttgagtatttcggcggtgacgagacgcgttggaaacaatttgcagcacgcgtcaacgcaacataccaaacacgcgatatcaaaactagcgataaagcaataaatagcgaaaactataaattcaacggctatgctatgcgcaaaaagcagaatcttctcatcgaggaatataagaacgacagctggaacacgcgagcgctgaacgacacgcgctatattactcggttcgtacaaaattatctgcgccagacagttagcttcgccgaaggagacgataaacaacgtgtgcttgcgccaaacggcacgataacctcgtatttacgtaaacgctggggtttgagtaaggtgcgtgaagaaaacgtgttacaccacgcagccgacgcagcaattgttgcggcaatcgacaatagaatcatctgccaggccaatcttttctcgcgtgatcaagaactgaaattatacacacaaaccataaaatcaattgaggaaaagaaacgtattttactcaagagcacagaccaagagacgggagaaattactgaggaagatcagttttctcaagcccaacgcgaaaaagcagagcttgaatatattaagcagagcatggacgaaaattcaaaacaccgttttcctgagccgtgggcggactttgctaaggaaattcgcaagcgtacgctggataccgacacagaaacgctgcgaaatgaattgtatggcttagagggctatgacgatgaatttcgctcacaggtgcgaccgattttcgtttcacgaatgccgcgtcgaaaagcagccgcccaagctcataaagaaacgattcgttcgccaagagtaaaagataatgaccaaagaacagtacgtataccgctgagtaaaatcaagattaaagatgttgagaattctgttctgaaagagtcggacgcatggctatacagtaagctcatttcactattagaagcaaacgacaataaccctgagaaagcatttgctgagccagtctataaaaatgataagaaatttgataaacacagaaaaccgctcatgccagtctcgacaataaaagtttattcaacacaaccatccggtttcttggtaaataaaggtagagcattcgtcaataacggctcaatgattcgcctagacgtatatcagaaacagaatcagaaaggcagaattgagcattttttcgtaccggtttatgcgcaccaggttggcaaaaaccaatccacaccaacaaagattctacccgcaccaaaaggctttgccgatgttgatgagacatttacaaaagtctgctcactatatccgaatgattatgtacgatgttattttaaaaatacaattgaagaaggctattacctcgcctacgactcagcatctgggcgaattaccgtcctaaaccattccgcagcgaataaagagggcgataatagagttcgaatctcgcctcgctcggcaaccctcattaagcgttacgatatctcaatcctcggcgataacgccccgaggtcatagtggcctggcgcgtaatcggtattcaaaatccaagtcgcctaagcctacgcgataatcagcttgttattacacaaaacgaagaagtaaacctgccaattgaagatattgacgcactgattcttgacagctatggcatcaccacaacagcaaatttactaacagagcttgcgactaacaacacaacggttgtcatttgcgacgaaaagcacctgccagctagtgtattattaccgtactcacaacactctcgtcaagcaaaagtttcacgcctacagctaaatatgagtcaaccgctgaaaaagcagctctggcaacgcatcgtcatgcaaaaaatttccaatcaagctgacgtacttcagcacttcagcctaaacgatatgccattgcgtcaatacgctgtccaagtaaagtcaggcgatagcactaaccgcgaatcaatcgccgcccgtacctattttgaccagctacttgacgacgccacgcgcagaaagcctatctggcacaatgcggcgcttaattatggctatgcgatggttcgcagtcatattgctcggcacatcgccgcccgcggattagttgcctcgcaaggtatttttcaccatagtgagttgaacagttttaatctagcagacgacttaattgagccataccgagcagtcgcagacctatttgtgcttgagaggcttgcaccactccatataggtaagcaagacacaagtctcaccaggcaagaccgtcaaatgttagttgacatattaaattattatgttataatacaaaacaagaggtttactctgaaacacgccgtcgagaaaacggttgaaagcttcattgaaagtacaggagcaaaggaggcaagtaagcttcttttaccaaaaatcagcgcctcctggcagggaagggatgtcatataaaatcatgcgagtggcagttttctttgatttgccaaccaatactagagctgagcgccgagcagcgacacaatttcgcaagtttctacttgacgacgggtttgacatgctacaatatagcgtttatacacggctatgtcctaatcgcgatgttgccgaaaaacatatgatgcgcgtacggcgcaatgcaccagatagcggctcagtgcgattattatatttaaccgagcaccaatttactaacatgtacgtaattgtcggcgaaaaaactgtacaagaacgagcaattccagccgcacaactagcatttttctaaacttaaatccctctcacaacagagagggatttaagtaagtattatatcaatatctaaattgttagggaactataacaaaccactctaacatttcctaaatcaaccaattatatcaatatctaaattgttagggaactataacccagtcagcagccagttagcagccgtaaacattatatcaatatctaaattgttagggaactataacccagtcagcagccagttagcagccgtaaacattatatcaatatctaaattgttagggaactataactgtctgctgaaaggtttgattatcctagcaattatatcaatatctaaattgttagggaactataacatcgagcgactcgtaggcgtagcgattttcattatatcaatatctaaattgttagggaactataacgctgatctggacaataggtaaatgtgagcaattatatcaatatctaaattgttagggaactataaccatcagctgctacatacgctttgtcctcgtattatatcaatatctaaattgttagggaactataacttattgaggctgcacccaaaatagtgcaatattatatcaatatctaaattgttagggagttgccaccttctgtgctaaatctgggaactttgcttcaactaggcgaagacgcttatcaagagactcgtagttatgtttctgctctttgaagactgtttcgtctgcttcttcacgggatccttcttcaatgaagatgtcatgacggagaccagtgatatctgcacggatagttaattgtcctgcttccaatgtttcgaagcgcctttcaaaacgtagttccatgtctcttactatgtttgtaaggttcttatggtcactgcggatgtcagagagttgggtgtcgattgattcgaagcgttggtcgatctggttaaagcgttcatcgatttgttcaaacctctcgtcaatctgttcgaatctcttgtcaatctgctcaaacctctcgtcaatctgttcgaacctctcgtcaatctgttcgaacttagtattcatcgtctcagcaagcgttttaacagcacttacaagatcctgaacctgaacagctaaatcttttacttgcgtagaaagcccttcgttcgtcatggttatatttaatcacagataggaaataaaaacaaaacggttcagtcacctagcgtaaaatcattattgcaaaatatcggggggtaatctcattaccgttaaaaaagaacctcctttataagccagaaacgtcagaacaaaatacgaactaaactatagttatccggtcaatgtcatcagttaaataatatattgtttgatcttcttcagagaccttaaattcaaaattagatagtctatctttatttagaaccttaaggacaagccgatcataggcgatagatttattgaaattgtcagcaataaatgaatattgtgaaaaataggtgcgagaagggtgatgggacttaaggttgtctggtaattctattggtggttgcatggggaaacctccggtttaaagtttattaataaatatacactatcataacgtcgcacaatatagcttttacgacttataataccgtacgagaagatgaatcagcatccatctaatgtgagtgctaatttattctataaagaaccatttccatcttttgtaggggattgcgtagagattatacttttatatgtcactaacatacattaatacatcacatcttagcagctgcactcatacaactctcacttaattaaagaaatagcgccaaggctcttctgcgtaagtataacggcccgcaaacgacataatatacatttgtctttagaatcagtcatcatgcataagttatccacaaaaatatctggttaacgttaatttgcatttttattaaaaatattcccccactatcttttttttgcttttctgccctatttgatttttatacgattttatatttttatatagttttttctctcgttcgcttggattacataaaaacgaacaaaaatagaacatcccccaattggcaagagaagtgaccttttctatttataaaatgctcgcctactcacccgcacatcaagatatgctgggttaactgaatgttcagcacaatactgaatagcacgcaccgcgtcttcaacctggcttgctgccgcacgatcaatcgacaatctaaccggataccctaccccatcaagttttacctctatttgtcgagttgtgccttcaggcaaaattacgcttgaaacagtatatttttgcatagaaaaatacccaacaaccttaccgacaaactctaaaaaccgattgctcacaagaaccttatttgtcgtcgcttgaacacccgtacggtcaataacttgcacgacaggagactcgggcacattccggtaaaatgccgctccgctagagtcaacaaacacaagtgttgcgcccgcttgccatgacacaactggatgccgcatgacgatagaaaattttgcacgcccaaacccagcaaaagcgactgtcggctcgacagactgaatctccggataatcatgctgtaaatagtcaataagggatttaatatctattagcgcgcgtagccgctcaaacggacgagccacgaggtaatcctgaattgctttttcatagcgctgcgtcgtttcagcagacggcgagtcaacgccaataagcgttacctttggcataacaactgattgatagagtacccatataagaccagcaatacccaccgaaagtacaaacaatcgtaatacgagcttacgacgatggtagcgtaatgtatgcacttgcacacgcggcgacttaagatcggcgtggcgctcacttgggcttgcgatttcggaaagaagactgccagtcaacgtgcggttacgccgaaaagcatagcgacccgctgtcgttaaatcacccggctgcgccgaatcgtcgcgatcaatcgcacgccgacgcactggctgcggcgagcgtcgacgcagcacggcttttccgagtctccctaacatatatcttttattatatcacttacgcttagcggttcgaatgatcatatccgccatatcacgcgctgcctgcgggcgggcaaaggtcaaaaatgctgcgcccatacgtgccattgctgcacgatcagcgagcaacgtctcaatcatccgaacaagtatctcaggatgatcatctagctgcagttcatcaattactttcaccgcacctttttcctcgtacactgccgcattttttagctgatggccacccgttagatagccattcggtaccaaaatcgtcggcttagcgagtgctgcaagctccaaaattgttgtagcacctgcacgcgccacaacaatgtctgccgcaccaagcatatcaaccagcccgctgctaataaaatcatgaatatgcacctgatcggtatcgttcggaacacgtgcgcgaatattgctatattgctgcgcgccggtgataagaataatattcgactgcttaacgagctgtggcaacgttgcaacgacagcgtcgttaattcgctgtgcaccaaggccgccgcccgtcacaacgataagcggtcgccttggatcaaatccaaactttgctttgttttcacgccgccgcccgtcactatatggtacaaaatcttccataattggcacacctacatactgcgatatttcgcgcggatacggataaaatttcagcggcgcgcctgtaccaattgcatctgcccagcgcgctaaaacgcgattcgtcaagccggggtgcgcgtcagaatcgtgaataacaagcggaatccgcagtacatgcgccgccaaaccgaccggcaaacatacatacccgcctttcgcaaaaacgacatccgggcgccacgcaactagcttgcacaagcattgtataaacccaatacctaccttaaccgcatcaataatattaggcagcgtaatcgtacgaaatctcatcaactgatgccaccatttcaaatgatgataccggcgcagtttaccgctcacaattgtatcgacacgaattgaatcatcgtacccgcccatgacagtacgcgcttgtttttcaaatgcataatcaacccagaaccgaatctctatgtttggttctattttccgcaattcacgcaatactgcgacgaccggcgtaacgtgtccgcccgacccgccgcctgctgccaaaatccgcacgggcatcctccttcatagtaactgacttatgattagtataccgcgaaagttgaaatacgacacctaacgcgccgctcataaaaatcatgctcgttccaccgaaactgagtagcggcaatgtaatgcccgtgaggggaatcaacccaatcattgaagcaatattcatcacaacgtgcgcaagcaaccaaccaaacacgcccgctgctgcgattcgcatagacatatcgggaagctgatcggcaatacgcaaaatgcggaataacagaataccaaatagcccaatgatacaaatcgtgccggcaaacccaaagatttcacccatgattgcaaaaattgagtcatttaccgcctcgggtaaatatccagtcgcttgaatacttttaccaatcccgcgcccaaataaaccgcccgtccctaatgctatcattgcgtttttaatatggtaattattatcacgctcgtccgctgcagcaacgtcgttgccagaactaaaaaacgtactaatgcgctccatacggtgcggcgataacacaaccagtaaaagccctagaataacaccaacgcctgcaatttttgccaaaatcttccagttcatcgtactgacaataaacatggacacaaccgctgctgcgattgacacacccgtacccatgtctttctgaatgacaacaacgataagcaacaataacgccaagagccctgccatcggataaaccgtttcttttaagtcgtcaattttaccctgctgataacgactgctcaaaaacactgccatgaatataacaacagcaaacttcattaattcagacggctggaatccgccgaaactgccaagattaaaccaacgatacgcacctaacgtcgcctgtgcaaacgtatcgatatgtgcaacatttcccaccaaaaacagcaatgcagacgcaataatcgctgcagccataatttttgttgcttgattttttagcgtcgagaacggcacaagcgctaatgcgacgaacacgccaagcgcgagaagtaaactaacgaattgtttaaatgcaaaatatgtcgccgaatacgagccgttatatgccgcattcattacattagcgcgctgcggaccaatcgcatacatcacaaccaaaccaatgagcatcagcacgc

SEQ ID NO: 1925 - DNA, 10869 bp, synthetic construct
  misc_feature 1..10869: note = Synthetic
  source 1..10869: mol_type = other DNA
agaatcaacttcgctcacttttatggttatagattggaccgcggacgcatgcataatgtagtaattatatcacctctagggcgtcaggagtaaaggtaaaacgcggctcttagggaatatcggtatttagattgttggggaactataaccaaataatacagaaaaaatccccgaatcccattaccgggatttaagcggggattcttctggaaacatcccctcagaggatgaacctcttaaagggaggggatattgataactccactatagcaaacaatcctcaagatatcaatgatcaatagcctgtaaatttcttagaagacagacaacagggcgcaatactctttacgaaggtaacgtgcaaagccaagaaaaagccgcccaggcgaccttaatggtgcgccccgtggacaagccgaacggggactgggcgacttttctaatgaaaatatagcacgagaagttcagaatgtcaatgaggtagataaattaggcaatgtgttagcttatgatatttcaggcataagaaaatcgactgggcgcggactcgatggttccgctattagcgcagatgcgcttgaccagtcgattgacaactctagtataccaaacaatcctcaagatgtcaatacagacaaccgttatcagcaccctcttcaagaaactattaacgaaatggaagccaaccctaagcctaggatgactagggagctaagagaggctatagacgagtttatatatgagaatatagaccagaatctattcctagagcatagcacggggattcatggaaatgagggagggcgatctaactagattacataaggtgtttaatgaccctcttaagtcccgtcacgagcgcagattagcccacgacacattcaacaagatattacgccagctaaaagataaaaaactcaccgaattacgtcgtaggctaatccgagccaacattgcagacgatgatggcgccgtagagagaataactgaagagatacacgaatactcacggcgaaagggatataaataattagtaaaatccgaatcgaaattaagccgcttgatttagttatccggcagctttttactttttgatataatcaaggtatgacaagtgagttaaaaatcaaacaaagtgatagcatttttgagtctatcaagcatgaagataagcaaggtgagttctggtatgctagagagctccaaggggttctcgaatatgcaaaatgggattctttcagaaaggtggttgagcgcgctaagattgcactccatacaactggtgtacctgtggaaaaccatttttcccatgtggggaaaatggtttcgataggctatggtaacagcaataatattggtgacattagattgacaagactggcgtgctatcttatcgctcaaaacggtaacccaaccaaaaaacctagagttgcggaagctcagaattattttgcaacacaaacgcgcaaacaagaaattgccgagaagtaccatcaggatatggatagacttgcgcgtcggcgtgaattttctgaatcagacaagaggctatcttctagtataatggaggcgggtattagcccaagagggttagctataataaaaagcgatggcgataagtctttcttcggcggcaaaactaataagcagatgaaaaggaaactaaacactggaagcaagccttgggcaaataaagcccataatgttgtactggccggtaaaacattagcaaacgagatgactgcagccaatatagaaaactacggaatatcatcatacgactctatacttcatgacaataacgataataatgacgcagttagaacgactattcgcaatcagcaaggtatgaacccagaggattttccagcagctgaagatactgaaaaaatacagcgccgcattgaaaaccagagtacacctaaaattgatagccctaacctctagattgtgctataataaccttacaattaagcacgaagtgtgactctaaaaaacgagagcgcgttgtcatccaaaaaagaaggaagcgtgcgtcgcagcgttgtataagtagcaatctgaggtgatcgtttgagataaatacgaagccgcccaagtcagtatggagcgaagaactaggccctcttggtgaccagacaacagacgatagctcttatccaatttaatagtatttttacaatttggagatttggggtttgtggtgtatgctataggtactttagtaagtaaatgggaggctttactaaaatggtatctaaggacaaaatcatcaaaagcactattggtgctgttattggagtaagcgagtgactgtatgagtgattggcacgtgtggcttttctatggcgccgctgcatttatttctgtatattcagtcataacctggaaacaaataatgtggctatatacgctggcatcgccatatggagttgatgataacgatgttgctataaggatgttttcttggagtgctctgcgtcaattggctgctagtaccttttccataccggcattcattttgcttggtcaaaaatgtataagtagtattccaacggagtttgttactgctccatttactttagttattgctacagtaatatatacacttgtatgtagctattcagcaccagaaaaagcattttataggctcaaaaagtatggatacttagcggaggatgcaactggtaatgggagatggatagaatttaccattcgccattttatgcaatatacctatgggatggtcctgtcccttattggcattattgcagtgtctatatttcttctgtatatagcgttattctagcgtgctacacaaaaatgctgcactacaaccctaccatcacctacgccaataccagtataggtgtacttggggtcgagcatggcagctttgtgcggcggtgaactaagccaccaatctatagattgctttgtatctgttccgctatcgttccaagtcaagttttcgctggcgtttgtgcaagcggcaacttgaagtctcctcatttcttctgtaagcggttggttcgtgtctggcatgtagtgtccgcgataattcctggctatcatgtcgtcggctttcatttgagcggtcttagataagtttgggtgcagttttagtggtgcaacgccgactttggctcgttcaatattgacagcgttcaatattgacagctctgtcggcggttctatctttttgctattagataatttgttagtattttgagatgaaggcgattctacaacaggggttgtctttgtcatttctgcattacgttgagtaacaaagaaacaagcagcacctgcaccaacgactactgcgatgctagcaaaaacggcaagaataaattcagttttcttcacgccgacagtataactgaaatcatcagatttgtcaataacactccaagttacaaaaaaggagtgtttttcttatgcaaggaaatgaatcatatcgtcagtaccttcaatatcacgcaaacaatcacccgtcagcaaccaaacgagcagaagcccaagccctactaaatgtcactggagatgacggcgggcttaacggctacttcctaatgggtaacggcactaataatagaggtcaaaccgtcggagagcaaaagtctaatggctacactgcatcatccctcaaccgttcagtaaatccgtggtggatgaattcatatgccagttggcgaaatatgaccaaaataatacttgcgcaataatattaagtgaggtacactgtagttacagtcccttaagtaaggattgtgtcaatatctaagttgttttaggtttctataataatttagtagaaatactaaagcaaagtaattccgctcactcgttgagcggattatctttttatgtgtgaaatatttacgctttcaaatattctattttggttgtataattgcattaaattatctcacaaaaaggaccatcatgactcaaaaatattcatattcaccaaaaaaatattcactaggtttagatatcgggacgtcttcaatcggctgggcagtattggacttagataaagagcgcatccatgatttaggggtgcgcatttttgagcgaccagaagatccacaaaacggagattcgcttgctaaacctcgccgcgatgccaggtcagctcgccgtcgcttaaaacggcgacgtcaacgcttgaataacttgaagcaattctttattgaccaaaatattcttaccagagatcgaatcgaagaagtgttaagtgacaaatccgaatttaacaaattagacgtatatgctctccgttcaaaagcgctcaccgaagaattatctccagaggaactgctcaaggtcatgtatcaaatcgccaaacgacgtggatttaagtcgaatcgtaaagtcgaggaagagtcggaaaaagaaggtggccgtgtgtcaaaagccttgaaaactaatgaaaagttcctcgccgagaatggatataaaactgtcggtgaagctctgagccacgatgaaaactttgcgtcacataaacgcaataagcgtgacgattatactaatagtttttctcgtgatgattttttgcacgaattagaaaagattattgaggtccagaaaagctatgccttaaaaagcgtttccgatacagcgatcaatgaaatgctttacggcttggacgatgacaaaaatgtcgtaaatgtatcagcaattatgtaccagcgcccatttatgactgaagagctgattaaaaaaaatggttgggaattgtacctttgaagaaaatgaaaaacgagcaccaagagctagctacagcttcgaaatttttcgcttggcaagcgacttatcgcatctagtattcatacctcgtgacgccagcaagcgccaggcaaagcgagaaaatctagagataagattatcttcagatcagataaataaagttatcgaagccgccaaaaatcaaaaaagcctaacatataaaaaagtgcgtagcattgcgggaattagcgaagattatgttccaaaatatacacacggaaagaaaaaggatggcgatgaattcggagaaggaaatgtattcggtggcttaaaagcatatagcgacattaaagcggcgctgaaaaatctaccagaagattgggcgaaaattgacaacgaaccaacgatcaatcaaatcgcttatattctcactacacaaaaatctgacgaaggaattaaaaccgaattaaatgcattgccaatttccgatgacgctaaaaacgcaattatcaaaattaaagctactaattttgggtcattctgccatctgtcgataaaagctttgcaaaaaatcacaccgcatattcttaatggtatgacttatgataaagcctgtgaagccgctggttatgacttcaagaaacaatcagctagcctagaacaaatcaccaatcctgtcgtaaaacgtgccatatcacaaacactgaaggtcgttcgcgccattgaacgcaaatacggtaaaccttactttattaaagttgaaactgctcgcgacttggcaaaaaacttcaaagagcgcaacgcaattaaaaaagaaaatgaagagaatcaaggatataacgaagacattaaatctataatcgccgacggatatgaagcatcgccaaaaactaaaggtggcaagcaacttctcagccacctaaaagaacttagcgtaccactgaataaaaacgccgattttaatggtcagcaaattattaaggttaagctctatcgcgaacaaaacggtatttgcccatattctggaaaaccaattgattttgacacgatgctacaagacgacaatgcatatcagatagaccacatcgtaccgttttcacgttccaataatgatgggataactaataaagtactggtgctgacagaggaaaaccagaaaaagagcaataaaactccatttgaatattttggcgcagatgaaaaccgctggaaggagttcgtcgccagagtagagtcgatatataagacacgcgatattaaaacggacgataaggccacaaacgccatcaactacaaatataacggctacgcaatgaagaaaaagcaaaatctgcttctgcaggattataaaaatgacagctggaacgtacgagccttaaacgatactagatatatcacacgatttattcagaattatttaagccaaaacgttgactttgcaggagataaaggaaaacagcacgtaatcgcaccaaatggaacaacgacagcatatctacgcaagcgttggggtctggctaaagatcgtagtgaagacgttctgcatcacgccaaggatgcggcggttgtggcggcaattagtccaaagattgtctatcaagcaaatctcttctcgaaagagcaggagatgaaactgtatttgaataacgctaaaacaattgatgaaaaacgacaaattttattacaatctaccgacgagaacactggcgagattactgatgaagcggcatttacccagacacaaaaagacctcgcacaagccgaatatttcaagctgcgtagtgatgaagagaccaaaaatcgctttccaggcccatggacagattttagtaaagaaataaggaaacgcagcctcaacgctgatatcgccacgctacaaaatgaactacgcggacttgataactacgacgaagagtttcgattgagcgtaaaaccaattttcgtctcacgtatgccacgccgtaaagcgactggttcggcacataaagaaacaattcgctcaccaaaagttaaagacggtgaccagagaaccgtacgaatgccgctcaaaaaagttaaacgcaaggatgtcgaaaattccacacttaaagagtcggacaagtggctatacaaaaaattacttgaaagactggacgcttgcgacgataaccctgaaaaagcgttcgccgaacccatatataaaaacgacaagaagactgataaaaacggcaataagctgtctccggtctcaactatcaaagtatattcgacacaaccaagcggattttatatcaacgacgataaagcatttgttaacaacggatctatggtgcgacttgacgtgtaccaaaagccgaacaagaaaggaaagattgaacacttcttcgtgccagtttacgcccaccaagttgggaaaaataggcccgcaccaacaaaaatactaccagcaccaaaaggatttactgatgtagatgaaacatttactaaagtttgctcattgtatccaaatgattatgtaaggtgttatttcggaaatgaaattaaagaagggtattacgtaaaatacggcattaataatggagccatgcaggtgatattccatagctctgtcagcaaggacaaggatcaacttatccagatctcacctcgctccgcgaatctcattgagcgctacgatatctctatcctcggcgataattataggtggctataaatggcctggcgcgtcgtagctatcgaaaatcctgcgcggcttagcgtgcgtgataatcaactagtaattacacaggagatggaatcgactcttccaattgaagatattgacgccttaattttagacaattacggatcaactatcacgacaaatttactgacagcattagctacaaaaggaacaactactataatatgcgacgaaaagcatttgcctgccagcgtacttttaccatattcacagcattcgcgccaagccaaagtttcgcgtcaacaattgtccatgagtcaacccttaaaaaagcagctatggcaacaaattattatcagtaaaatcacaaatcaagcagacgtcttgcgggctcgcgggctagacgatttcactttgcggtctttagctaacgatgttaaatcgggcgacaccagcaatcgcgagtcgattgccgccagaatctattttgaccaaatactgggcgacgccacacgccgcaagccgatctggcataatgccgcactcaattatggttacgcgatggtgcgaagtcacattgccagacatattgctgcccgcggactagttgcctcgcagggactatttcatcacaatgagctcaacagcttcaatctagccgacgacttaatcgagccttatcgtgctgtcgttgatatgtacattttagagaatatagcaccacaccacactggagacctggattccagtcttaccaaacacgatagacaactcgctattgacatattaaattattatgttataatgaacggtaagaagtttaccgtgagacattcggttgagcgaacagttgagagctttattgaatgtatagaaacaaaggaggcagataagcttcttctaccaaaaatcgtcctccagtaaaagggatgtcgtacaaacttatgagggtcgcagtattttttgatttgccgaccaataccaaaacagagcgcaaggccgccacacagttccgtaaattcttattggacgatggttttgatatgctccaatacagcatatatacgcggctatgcccaaatcgtgacgttgcagaaaaacatatgatgcgaattaagagacacgctccggacagcggctcagtgcgattgctctatttaacagaacatcaatttacgcacatgcatgttattgttggcgaaaaaaccacccaagaaaagtccgttccagctgggcaattagcatttttctaaccaaaaatccccctcgtaacagagggggatttaaggaagtattatatcaatatctaaattgttagggaactataactagtttcattattccactcacccgccttaaattatatcaatatctaaattgttagggaactataacttttatgaaattacagataaagttttttttattatatcaatatctaaattgttagggaactataacaaaatattactacaggtgttttggctaaatattatatcaatatctaaattgttagggaactataaccgggtttatctcgtccgagtctgcggacgcattatatcaatatctaaattgttagggaactataacatagtcatagtgcgcgtctaccgcgacgagattatatcaatatctaaattgttagggaactataacaaaacgtgcggctagtgagcccttctggatattatatcaatatctaaattgttagggaactataacgccataatgttataccaatatcaccccttgattatatcaatatctaaattgttagggaactataacacgcaccttagtttcaccctcgatacgtccattatatcaatatctaaattgttagggaactataactgcccagtccttaaacttcagccttaacgtattatatcaatatctaaattgttagggaactataacacgataataagcaccattgtacagattattattatatcaatatctaaattgttagggaactataacttattggacgcgtgagggcaacggctgggcattatatcaatatctaaattgttagggaactataacgaggataacctagactatgggagtagttttattatatcaatatctaaattgttagggaactataacgatggcaggcttaatgtcatactcacttgcattatatcaatatctaaattgttagggaactataacccgtattttcctttggaaacgccaccgtttattatatcaatatctaaattgttagggaactataacagcggaagagtataatatgtcgtcactcaaattatatcaatatctaaattgttagggaactataacatgtacacactttgctataattaagacagtattatatcaatatctaaattgttagggaactataacgggcttgggttgcggccgtcgctagggtcgattatatcaatatctaaattgttagggaactataaccggtgagatggagaaactacagattggcgaattatatcaatatctaaattgttagggaactataaccaaaggtgcaggcgagactgttgctggattattatatcaatatctaaattgttagggaactataactaatgagaaggtaattgctggcagtttcgtattatatcaatatctaaattgttagggaactataaccgctataatctcgtcattgatttggccgacattatatcaatatctaaattgttagggaactataactcggtagcttacgattcgcgaaaaaaaactattatatcaatatctaaattgttagggaactataacccttgggtcattcatcaggccgctcaaaacattatatcaatatctaaattgttagggaactataacgatggcgaaattgttgacgcggttattcttattatatcaatatctaaattgttagggaactataacaggtttggcgttaatgacagcttacgcggcattatatcaatatctaaattgttagggaactataactcaaggcgatattattgatttttcaatgacggttgtagtaatatggcaatgtaagacagcagcgcccctcttatgttagagcaacgcgggctgtcttattttattgtatatttaagcatattgcggaatctaacaaatagtgataaactgcaatcgcatggtttgagcatccatgctctcttcctgccctctgaaaatgggggggcgggttttatttatgtgcggcggacgccatacggtaaattatcattttcaggatagattttacataaaaagtatacaaaatgcctgcaaaatgattacattatgagcgcaacttttgctataatagaagcactcaggcgaggcatatcaacaattagagaatacggcatattataatgaatcgcaaacgcgaaaagataataaaaatataaaacttaacgcctcgcttggtgctagggtcctctaaaaagaaaggaaaggctatgccaatagtaaatcgaattgta

SEQ ID NO: 1926 - DNA, 10322 bp, synthetic construct
  misc_feature 1..10322: note = Synthetic
  source 1..10322: mol_type = other DNA
acaccggccggattatccagtggacgcgcgataattatagccgcaaccgcagcgatattgaagccgatatcgccaatcgaatcctgccgccagaaaacctagtcgtcaagaagcctggtcccgcctatacgccgccaaaaacacccgaacagcgagccgccgatcgcgccgcgcgccaagctgctaagcagccgcaagaccagacccaaccaattgccaaacaaccatcggtcaaacttgacaaaggagctgttggtttgctacaaatagaccacggtcaaaataataaagacaccgcgaaggccgcaaaggataatgacaccgcgaaaacaaatgcagcagctaaacctgccgccaatgaagaaacagagaaagtagacacagctactagcgacaagccaaagcgcaaacgcactcgcagccgccggcgcaaaactccagcgacagctacttccaattcgtaatcaactattgctatgcctctaccgttagaaatagccaccacgtcgcatgctcatgacgctcaagttggcgagattattgatctattatgcaagcccagtatctgcggcccaatttcagacatactaggccgagatgctttcatggaagcagctaccgacctaacgcagcgtttatacttgggtgagtacgccgctgcactggccagatacatcgatgaaagcagcaataccatcaaaccagttggcacaattatctatagccaggactcaaacgatcctaaaatagcaaatttggaactaatcgtcgtacgagaaaaatatcgactccggcaagtaggcgcgcgactgatggaaatagtcgaggaagaagcgaaattgcgcggcgcagttcaattacaaacactagcgccccagagaatgccaggcctacagaacctcttggcaggaaacggcttctatttcagccgcatgaaagagggcgaggttttgtttttgcggtatcagaaaaaagttaaaggcactaaggatattgcaaaaaaataaaaaactgcgtattataaagctacagtcccttaagtaaggattgtaccaatatctaaattgttttaggtttctataataatttagcaacttagggcgacgattttgatcgtacagctacggttgagagttctattgtgaatctaaagcaaagctctaatccgctcacttgttgggcggattatctttttatatgactaaaaatactcgtgctttcaattatcactttttggttatataattatgcttagttaagcaaaggaacctcacacatggcacaaaaatcttcatatccaccgaaaaaatattcgctaggactggacattggtacctcatcagtcggctgggcgatattagacctagataaggaacgtattcatgatctgggggtgaggatttttgagcggccagaagatcctcaaaacggtgattcactcgccaaacctcgccgtgacgcccgttcagctcgccgccgtctaaaacgccgtcgccagcgtctcaatcacctaaagcaattttttgtcgaccaaaacatcctcactaaaaatcaagtcgaaaaagttctagattacaagtctgatttcaacaaattagatatatacgccttgcgatcaaaagcactcaccgaggagttatcgcctgaagaattactcaaagtcttatatcaaattaccaaacgacgcggctttaaatcaaaccgtaaggtcgtggaagaatcagacaaagaaggcggccgcgtaaccagcgcactcaagactaacgagaaattcctcgccgacaacaattacacgaccgtcggcgaagcgctgagtcgtgatgaaaaattcgcaccgcacaagcgcaataaacgtgacgattataccaacagttttgcgcgcgatgattttttgtgtgagctagaagctattattaaaattcagcgaaactacgcactgaaaaatgtctccgaacaggctattaccgaattaatttatggcatcaacgacgaacaagttaccaacgtgagtgccatcatgtaccaacgtccatttatgaccaaagaactaatcgaaaagatggtcggcgaatgtacgtttgaaaaagatgagaaacgagcgccaaaagccagctacagctttgaggtgtttcgcttagctagcgatttatcgcacctcattttcattccccgcgacgccagcaaacgccaggctaagcgcgagaatctagaagtaaggctatctccggaacaaattagtaaaattatagatgtagccaaaagccaaaagaatttaacgtacaagaaggtgcgcagcaccgcaggaattagcgaagattacgtaccaaaagatgtgcgcggcaagaagaaagagggtgatgaattcggtgaagataatacttttggtggcctaaaagcatataacgacatcaggtcagcattgagagctttgccagaagattgggcaaaaattgacaatgaatcggcaatcaaccaaatcgcctatgtcctcacgacacaaaaagccgacgaaggtattcgtgatgaattaaatctattaccaatttctgacaaagctaaagaggctattgtcaaaattaagccaaccaatttcaaggcgttcggacatttatcgatcaaagctctacaaaaaatcacgccacacattctcgaaggtatgacctatgacaaagcctgcgaggcagctggctatgacttcaaaaagcaatctgccagtctagagcaaatcaccaaccccgtcgtcaagcgcgccataacacagacgctgaaggtcgttcgtgctattgaacgcaaatatggcaagccgtatttcattaaagtcgaaaccgcccgcgatttggcaaaaaacttcaaagaccgcaatgcgattaaaaaagaaaacgaagaaaatcaaggatacaacgaagacattaaatcaataattacagacgggtacgaggcatcgcctaaaaccaagggtggcaagcaactccttagccatcttagagagcttaacgtgccattgaataagaatgcggattttaatggtcagcaaatcgtcaagattaaactctaccgcgagcaaaacggcgtctgcctgtattctggaaagtcaattgattttgaaaccatgctgcgcgacgacaacgcctatcaagtcgatcacatcgtgccgttttcacgctccaataacgacggaatgacaaacaaaattctggtattaacagaggaaaatcaaaagaaagccgacaggacgccgtttgaatattttggtgccgacgaacaacgatgggagaaattcgtagcacttgttgaaacaacgtataagacacgcgatgtcaaaacatctgacaaagctacgaatactattaactacaaatacaacggctacgccatgaaaaagaagcaaaatctattgcttcaagattacaaaaacgacagttggaatgtgcgtgcgctgaatgacactcgatacatcactcgatttatccaaaattatttgcgccagaatgttgactttgccgaaggcaaagaaagacagcgcgtcatcgcgccgaacggtacgacaacagcatatctacgcaaacgctgggggttagccaaggatcgcgccgaagacgtcttgcaccacgccaaggacgcggcggtcgtggcggcaatcgaccaaaaaattgtcatgcaggcgaatttgcacgccaaacgtcacgaaatcaaagcactgctcgcggcgaccaaaacaatggaagaaaaaaccgacaagctcactggcgaaatcaccgatgaaaacgagttcgacaaagcacagcgacgtaaagccgctatcctcgtattgtcatccaaacatttccctcaaccatggggtgactttagcaaggaagttatgaagcgcacgctaaataccgacattgcaacactgcaaaatgagctacgtgggcttgaaaattatgatgatgagttctgcctgagcgtgaagccaatttttgtttcgcgcatgccacgccgcaaagctaccggctcagcacacaaagaaactatccgctcaccaaaggttaaagatagtgatcaacgaactgtacgaatgccactaaacaaaattaagcgaaaagacgttgagaactctatactcaaagaatctgacaaatggttgtacaaaaaactactcgaaagattagacgctcacgataataatcctgaaaaagcttttgccgaacctatttacaagaatgataaaaaatttgataaaaacggcaaaaaactgtcaccagtctcaaccgtcaaagtatactcgaccaaacccgatgatagtggaaaatatatcaataatcgacgtggttttgtcgataatgacagcatgataagagtagatgtttatatgaaaaatatcgacggaagagagtatccatttttcgtccctatatacgcacactccgtaaaccatcctacaagaaagatcagaccaactcttaggggattttccgaaattgacgagacattcaaatatatatgcggcttacatccaaacgattatgtaaaaatcaagtttgaggatgaaagaaaaaatgttgaaggctactatattcagtacggaagttcaaacgcagccatagatctgttgcctatgcacgcgtcggggaaagatcaacgaatcacatgttcagcaaggctggccattaaaatcgagcgctacgacatctccgtcctcggcgataattacaggtggttataaatgacctggcgcgtcgtagctatcgaaaatcccgccaggctgagtttgcgcgacaaccagctggtaattgcacaagaaactgaggcgactttaccaatcgaggatatcgatgcactcattctggacggttatggcatgactgcgaccacaaatctactcacagcactggcgaccaagggcacgacaaccatcgtctgcgacgaaaaacatctgccatccagcgtacttctaccatattcacagcattcacgccaagccaaagtttcgcgtcagcaacttgccatgagccagccgctcaaaaagcagctgtggcaacaaattatcatcagcaaaatcaccaaccaagccgatgtcttgcggtctatcgggctagatgataccgccttacgcacccatattagcaatgtcaaatcaggcgacactagcaatcgtgaatcaatcgctgctcgcatatactttgaccaactactcgacgatgccacgcgccgtaagccgatttggcataatgccgcgctgaactatggctacgcaatgatccgcagtcatatcgctcgacatattgccgcccgcgggctagttgcttcgcaaggaattttccatcacaatgagctcaatagttttaatttagccgacgacctgattgagccgtaccgcgccgctgtcgatttatatatcctagaaaaagttgcaccgcttcacatcggcgaccgcgacgctaacctcaccaaacatgatcgccagcttattattgacatagtaaattattatgttataatgagcgataagaagtttatgataaagcatgcggttgagcgaacagttgagagctttatcgaatgtatcgaggtaaaggaggcgcgtaagcttcttttgccaaaaatcgcctcctaacagggaagggatgtcatataaaatcatgagggtcgcagtatttttcgatttgccgaccaatactaaagctgagcgtagagccgccacgcaatttcgtaagttcttgctggacgatggctttgatatgctgcaatatagcgtatacacgagactgtgcccaaatcgtgacgttgctgaaaagcacatgatgcgcgttaagcgtcatgcaccagacagcggatcagtgcgactactgtatctgaccgaacatcaattcacgcatatgcacgttattgttggcgaaaaaaccgttcaggaaaaggctattcctgtaggccaactagcatttttctaaccaaaaatccccctcgtaacagagggggatttgaggaagtattataccaatatctaaattgttagggaactataacttggattggtaacggcattactgctatcggattataccaatatctaaattgttagggaactataacggcacaagcagaagccaagctcgaccagaaattataccaatatctaaattgttagggaactataacataccgccacgcgttgcagtcgccgccgagattataccaatatctaaattgttagggaactataacttcagtcgaagtcaagcactcggacatcaaattataccaatatctaaattgttagggaactataactctggcgcgtccatcgttgcactgaagcctattataccaatatctaaattgttagggaactataacctcctctactttatttttactaaacatcacattataccaatatctaaattgttagggaactataacatgccatcaagaactacatcatcaacccagattataccaatatctaaattgttagggaactataactcacgaaatatcagttcaggccacctctcaattataccaatatctaaattgttagggaactataacaagccggcacaaaatgctaaaattagtttgattataccaatatctaaattgttagggaactataactaaacggccgactagcaccggctaaaaaggattataccaatatctaaattgttagggaactataaccaaatatttcgtcgaccttgccagcagcctattataccaatatctaaattgttagggaactataacatcagattcagttcaagaagcgctacattgattataccaatatctaaattgttagggaactataacactgcttgcctttatacgccaaatgtatttattataccaatatctaaattgttagggaactataacgcggtggcgacagcgtgctgctgcgcctgcattataccaatatctaaattgttagggaactataacaccatctttgattgccttgtagacaccccgattataccaatatctaaattgttagggaactataacaagctgttcagacgcccgtaaaatgggcgaattataccaatatctaaattgttagggaactataacctcgagagagaatgacttgatttttcgtgcattataccaatatctaaattgttagggaactataactggtctcttcgacaaaaacacgcggctctcattataccaatatctaaattgttagggaactataacgccattgttgttgtggttgcgccaaaatccattataccaatatctaaattgttagggaactataacctacaatgtactctgatggctatagcttcgattataccaatatctaaattgttagggaactataacaaccgcttacggcaaaatcactttcagcaaattataccaatatctaaattgttagggaactataactgttgctgtattgttaggttcggttgcaggattataccaatatctaaattgttagggaactataactgttgctgtattgttaggttcggttgcaggattataccaatatctaaattgttagggaactataacaccaaaacggtgttgccgccccattctttaattataccaatatctaaattgttagggaactataacggctattttaggctagccccttagccttatattataccaatatctaaattgttagggaactataacatattcagcaaaacggtgaattaccaacagattataccaatatctaaattgttagggaactataactatcttttcgtcttcagaattcaccagctcattataccaatatctaaattgttagggaactataactacatagtggtaacagtaactgcccatttgattataccaatatctaaattgttagggaactataaccgcgactgagcataaatatcgagctatgttattataccaatatctaaattgttagggaactataacctgctgggtttctaacatggaagaggacgaattataccaatatctaaattgttagggaactataacctttcattctcgaccattggtataagggcgattataccaatatctaaattgttagggaactataaccgttgaataggcatttggttagccatgacgattataccaatatctaaattgttagggaactataacagatgggattgattgatccatacacgctttattataccaatatctaaattgttagggaactataacctcagaccgtttggatagcggcgaatgtcgattataccaatatctaaattgttagggaactataacgagttttctagacgtttttagtaagccgctattataccaatatctaaattgttagggaactaagctcatcttaacattaaaaatccactgaatctcggcgattttaacagtaaagaatctctggctgagcatttaagaataccgccagatattttatctgattctggtggctttatacatccaacaacctctaacacaagcaacttctcatccgccttaaggtatgcaggatatgatggtgttatcattccacatacaaccaaaggtgcacgtggcaatgaaatagtagctctagatccagaacagattaaacatatcgataacctcaatccaacagatagtccagatatgaggtttaaactgcgactaacaggtgatgagcgccttgtctttaatgagtggcagaatgaaatgcaaagaaaagccctcggctattacgatccaaagaccgacaaaatagacctgaacaggctgtctgaagacaccctgaaccacgaactgggacacaaactcttggagcgagcagacaacaaacaggaactcttaaccgccatccgtcgattctatggcgacaactacctcattaacaagtatgggcagcactacggcactactgacatcaacctactagcagaagagcaattagctgatggatttagcgactattacaacggtaagctaaacggcgaaactacccagcgcctggctgctcgcctacacatcccgcagcgcattgtcgctatctacgaccgcattaccgaagccattcgaggacttattggtaagcaggatatcatcaagcagttttacgcccaaatggaaacaggaaaattcagaaacacccagcagcaaacacctggcggcgatgggcgagtgaggacgatgagtcttgattctgaggtaagtgaacgggcgcttaggtcttttaattctgttaagcgaggcaagcaagttaaatccatagttggtcaattgtccaaaaacggagctagaaaagtagcagcagtattacaatctacagacttcaaccaaaatgcacggctagtaatcgataagaatgcagtaaaccacttaagaaatagtggacaccttacaggaatgggcaggaatgggaaagatgtcaacccgctaacggaggcagacattagagcattacctcatgtattttcagaccccgatgttgtatatatgtcgggtactggcaggactggcaagcgtatggtgtttgagcggcagctggacaatcatcatcgtattgttgctgaacttgaatatagcggtaaagattttaatctggtaacgtacttcaacataaacaaagacctgccaaacggcaagcctgctatgtcttattccccagagggggctgttgctgcggatgaatccggccgacaaccttcacgtcctggacggtcctctggcgacccagacaacgggttcaatgatagtataccaaactccacccaaaatgtcaacaccggcccccgttaccgactaaaccaaccacagaatcagtctcttcaagagaccatcaacaatatccaagataatcctaaaccaagaatgaccaaagagctacgtcaagctatagacgaggaaatatacaactactacccagagttattcgcgaatgaagccgccgacctccaaagtaccaacggcgattggaatatacctcgtctgcacgtcgatgacttaaggcactatttaggagaattagccaacgatataccatcaagatataagagacgagacggcaagagagatatcgataccgtagctcaagagatgggctatgacgatatcgacagcttcatcaatgagatacatcgagtgctagaggctcgccgtaatgtacgtgctggtaaacaacgactagcagagctgcgtcgagacccagatagatattattaagacaaccacttactagccaaaggcaatctatacgagcaaacaaagcctggtatacgagacgattggacgaggccattccaagacggagactacgagtatcgcctacacaccaaacgcagcccgcgatggtaagaatttgccatcttagaggaaaaatc

SEQ ID NO: 1927 - DNA, 5169 bp, synthetic construct
  misc_feature 1..5169: note = Synthetic
  source 1..5169: mol_type = other DNA
acatctcacagatgaatgaaaccgtacgcgacgcagtctttggcaacgtcggcaccatgatatcgttccgtgtgtctgctgatgacgcaccaattctcgccaaacaatttgagccgaattttgaagccgtcgacctcttgcaaatgcacaatcgtaactttgtcatcaacatggtcatcgggggagagaagacgccagccttctccgcacgcaccctcgaacttccgccaagccaggccgataataccctgcacatcatcgagcattcacgacgcatgtactcacggagcagggaggatgttgaaaaagaaatcaacgctgccatcatgccgcagccccagccacagaagcagtcaccccgacccgccgcccagccaatcaccagacagccagctcagcaacctattgctactgccaacacccgtccagcccagccgcaaccagctccaaacagcaatgaagtcattttgcagatccgtggcaatagcgcaaacgccacagctgactcaactgctaccactacaccaaaaaagcggcggcgaaggcggaagaagagtgctacgtaaaacaaaccattgcaatagccgacaccttcagctacaatagttttacagtcccttaagtaaggattgtaccaatttctaaattgttttaggtttctataataatttagtagaaatactaaagcaaagctctaatccgctcacttgttgggcggattatcttttgtctatgctcgttttgcttaagctttcaatcacagtgatttggttgtataatcatactcagttaagcacaaaaggaatctcacgcatggcacaaaaatcttcatattcaccgaaaaaatactcactggggctagacatcggtacctcctcggtcggctgggcggtattagatttagacaaggagcgtattcacgatttgggagtgaggatttttgagcgaccggaagatcctcaaaatggtgattcactcgccaaacctcgccgtgacgcacgttcagctcgccgccgtctaaaacgccgtcgccagcgcctcaatcacctaaaacaattttttgtcgaccaaaacatcctcactaaaaatcaagtcgaagaagttctagattacaggtctgatttcaacaaattagacgtgtatgccttgcgagcaaaagcgctcaccgaggagttatcgcctgaagaattgatcaaagttttatatcaaattgccaaacgacgcggctttaaatcaaatcgcaaggtcgtggaagaatcagacaaagaaggcggccgtgtaaccagtgcactcaatactaacaagaaattcctagccgacaacaattacacgactgtcggcgaagccctaaaccgtgataaaaagttcgcgtcacataaacgcaataagcgtgacgactataccaacagttttgcgcgcgatgactttttgcatgagttagaggctattattaaaactcagcgaaactacaccctgaaaaatgtccccgaacaagctattagcgaattgatttatggcattgacgacggacaagtcaccaacgtcagcgccatcatgtaccagcgtccatttatgaccaaagagttaatcgaaaagatggtcggcaattgtacttttgaaaaagatgagaaacgagcaccaaaagccagctatagtttcgaggtatttcgcctggcaagcgatttatcacatctggtgttcattccccgtgatgccagcaaacgccaggccaagcgcgaaaatctagaggtaagattgtctccagagcaaattagtaaagttattgagctggccaaaagccaaaagaacttaacatacaaaaaagtacgcagcaccgcaggaattagcgaagattacgtgccaaaagatgtgcgtggcaagaaaaaagacggtgacgaattcggcgaggaaaacgcctttggcggtttaaaagcatacaatgacatcagatcagcgctaaaagatctaccagaagattgggcaaaaattgataatgaatcagcaatcaaccaaatcgcctatatcctcacgacacaaaaagccgacgaaggtattcgtgatgaattaaatctattaccgatttccaacaaagccaaagaagctattgtcaaaattaagccaaccaatttcaaggcattcggacatttatcgatcaaatctctacaaaaaatcacgccacacattctcgaaggcatgacttacgacaaagcctgcgaggcggctggctacgacttcaaaaaacaatctgccagtctagagcaagtcaccaaccccgtcgtcaagcgtgccataacacaaaccctgaaggtcgttcgtgctattgaacgcaaatatggcaagccgtatttcatcaaagtagaaaccgctcgcgacctcgcaaaaaatttcaaagatcgtaaggcaattgaaaatgaaaataaagaaaatcaagcacgcaaccagagcattattcagacactaaacgagaacggtatcgtcaccccaactggccagcaggtcataaaagtcaagctctatcgcgaacagcagggcaagtgcttatactctggcaatccaattgactttgaaaccatgctacgcgatgacaacgcctatcaggttgaccatatcgtaccgttttcgcgttccaacaatgacggaattgctaacaaagttttggtattcacagaggagaatcaaaagaaaggtgatcaaacgccatttgaatattttggtgccgacgaaaaacgctggaaagagtttgtagctagagtagaatcaatatacaaaacacgcgacatcaaaacgtccgacaaagccacaaacgccattaactataaatacaacggctatgccatgaaaaagaagcaaaatctattgcttcaagactacaaaaatgacagctggaatgtacgagccctcaatgatacacggtacatcacgcggtttatccaaaattatctacgtcagaatgttgactttgccgaaggtgaagaaaaacagcgtataatcgcgccgaacggtacgacaacagcgtatctacgtaaacgctggggactactagccaaggatcgcaccgaagacgtgctacatcacgccaaagatgcagcggttgtggcggcaattgaccagaagattgtttaccaagcaaacctcttctcgaaagagcaggagatgaggctgtatctcgataatgccaaaaccattgacgaaaaacggcaaatcctactaagatctactgacgaaaacactggcgagatcaccaatgaaacgacgtttactcaggctcaaaaagacctcgcacaagctgaatatttcaagttgcgcagcgatacagagaccaaaaaccgtttcccagctccgtggccagacttcagtaaagaagtcatgaagcgcacacttaacaccgatatcgccacactacaaaatgagctacgcggacttgataagtacgacgaggagttccgcctaagcgtaaaaccaatcttcgtttcccgtatgccgcgccgcaaagctaccgctcaaacccacaaggagactattcgctcaccaaaggttaaagatggtgatcaacgaaccgtacgaatgccactaaacaaaattaagcgcaaggatgtcgaaaactccgtacttaaagaatctgataagtggttgtacgataaattgctcgagaaactagatactcacggtgataacccagaaaaagcttttgctgaacctatttacaaaaacgacaaaaaattcgacaaaaatggtaaccaactgtctccagtctcgactgccaaagtatattcgacacaaccgagcggattttacattaacgatggcaaagcgtttgttaacaatggatcaatggtgcgacttgacgtatatcaaaaaccaaacaagagggggaagattgagcacttcttcgtgccagtttacgcccatcaggttggtaaaaataagcccacgccgacaaagatactgccagcacccaaagggttcactgacatagatgaaacgttcactaaggtttgttcgttgtatccgaatgattatgtgagatgttattttggcaataaaattgaagaaggttattacactgcttacgattctgggtctggtcaaattactatcatagacgcaagttcaccaaacaaagaaggattaaatcgtcaccgtatttcaccccgctccgcaaatctcatcgagcgctacgacatctccgtcctcggcgataactacaggtggttatagatggcctggcgtgttgtagctatcgaaaatcccgccaggctgagtttacgcgacaaccagctagtaattacgcaggaaactgaggtaactttaccgattgaagatatcgactcgctcattctggacggctatggtattaccacaactacaaatctactcacagcactagcgaccaagggcacaacgactataatatgcgacgaaaagcacttaccagccagcgtacttctgccgtattcgcaacattcacgtcaagccaaagtttcacgccaacaactcgccatgagtcagccgctcaaaaagcaattgtggcagcaaattattatcagcaaaattaccaaccaagccgatgttttgcaatctgtcggactagacgatgccgccttacgcacccatattaacgacgttaaatcaggcgacactagcaatcgtgagtcgatcgctgctcgcatatattttgaccagctactagacgataccacgcgccgtaagccgatttggcataatgccgcgctcaattatggctacgcgatggttcgcagtcatatagctcggcatatcgccgcgcgcgggctagtcgcttcacaggggatttttcaccacaacgagctcaacagctttaacctagccgacgacttgattgagccgtaccgggctgctgttgatttatacatcttagaaaaagttgcgccacttcatgtcggcgaccgcgacaccagcctcaccaagcacgatcgccaacttattattgacatattaaattattatgttataatgaatggtaagaagtttactataaaacatgcgattgagcgaacagttgaaagctttatcgaatgtatcgaggtaaaggaggcgcgtaagcttcttttgccaaaaatcgcctcctaacagggaaggaatgtcatataaaatcatgagggtcgcggtatttttcgatttgccgagatc

SEQ ID NO: 1928 - DNA, 4552 bp, synthetic construct
  source 1..4552: mol_type = other DNA
  misc_feature 1..4552: note = Synthetic
tgcgcgacgcagtctttggcaacgtcggcaccatgatatcgttccgtgtgtctgctgatgacgcaccaattctcgccaaacaatttgagccgaattttgaagccgtcgacctcttgcagatgcacaatcgcaactttgtcatcaacatggtcatcgggggagagaagacaccagccttttccgcacgcactctcgagctaccaccgagccaggccgataacaccttgcacatcattgaacattcacgacgcatgtactcacgaagcagggaggacgtcgaaaaagaaatcaacgctgccatcatgccacaaccacagccacagaagcagtcaccccgacccgctgctcagccaatcaccagacagccagctcagcaacctattgctactgccaacgcccgtccagcccagccgcaaccagccccaaacagcaatgaagtcgttttgcagatccgtggcaatagcgcaaacaccacagctgactcaactgctaccaccacaccaaaaaagcggcgacgtaggcggaagaagagtgctacgtaaaacaaaccattgcaatagtcgacaccttcagctacaatagttttacagtcccttaagtaaggattgtaccaatatctaaattgttctaggtttctataataatctggcggtaaaaatccgctgtaaagtataagaaatactggagcaaagctctaatccgctcacttgttgggcggattatcttttgtctatgctcgttttgcttaagctttcaatcacagtgatttggttgtataatcatactcagttaagcacaaaaggaatctcacgcatggcacaaaaatcttcatattcaccgaaaaaatactcactggggctagacatcggtacctcctcggtcggctgggcggtattagatttagacaaggagcgtattcacgatttgggagtgaggatatttgagcgtccagaagatcctcaaaatggtgattcactcgccaaacctcgccgtgacgcacgttcagctcgccgccgtctaaaacgccgtcgccagcgcctcaatcacctaaaacaattttttgtcgaccaaaacatcctcactaaaaatcaagtcgaagaagttctagattacaggtctgatttcaacaaattagacgtgtatgccttgcgagcaaaagcactcaccgaggagttatcgcctgaagaattgatcaaagttttatatcaaatcgccaaacgacgcggctttaaatcaaaccgcaaggtcgtggaagagtcagacaaagaaggcggccgcgtaaccagcgcactcaagactaacgagaaattcctcgccgacaacaattacacgaccgtcggcgaagcgctgagtcgtgatgaaaaattcgcaccgcacaagcgcaataaacgtgacgattataccaacagttttgcgcgcgatgattttttgtgtgagctagaagctattattaaaacccagcgaaactacgccctgaaaaatgtccccgaaccagctattaatgaattgatttacggcattgacgatggacaagtcaccaacgtcagcgccatcatgtatcaacgtccatttatgaccaaagaactaatcgaaaagatggtcggcaagtgtacttttgaagatggcgagaagagagcgccaaaagccagctatagtttcgaggtatttcgcctggcaagcgatttatcacacctcgtcttcattccccgtgatgccagcaaacgccaggccaagcgcgaaaatctagaggtaagattgtctccagagcaaattagtaaagttattgagctggccaaaagccaaaagaacttaacatacaaaaaagtacgcagcaccgcaggaattagcgaagattacgtgccaaaagatgtgcgtggcaagaaaaaagacggtgacgaattcggcgaggaaaacgcctttggcggtttaaaagcatacaatgacatcagatcagcgctaaaagatctaccagaagattgggcaaaaattgataatgaatcagcaatcaaccaaatcgcctatatcctcacgacacaaaaagccgacgaaggtattcgtgataaattaaatctattaccgatttccaacaaagccaaagaagctattgtcaaaattaagccaaccaatttcaagacattcggacatttatcgatcaaagctctacaaaaaatcacgccacacattctcgaaggcatgacttacgacaaagcctgcgaggcggctggctacgacttcaaaaagcaatctgccagcctagagcaaattaccaatcccgtcgtcaagcgcgccataacacaaaccctgaaggtcgttcgtgctattgaacgcaaatatggtaagccatatttcatcaaagtcgaaaccgcccgcgatttggcaaaaaacttcaaagaccgtaacgcaatcaaaaaagaaaacgaagaaaatcaaggatacaatgaagacgtcaaatcaataattacagatggatacgaggcatcgcctaaaactaagggcggcaaacagctccttaaccaccttaaagaacttaacgtacgcttgaataaaaatgctgattttaatggccagcagattattaaagtcaagctctatcgcgaacagcatggcaagtgcttatactctggcaatccaattgactttgaaaccatgctacgcgatgataacgcctatcaagttgatcacatcgtgccattttcacgttccaataacgacagaattactaacaaagttttggtattcacagaggagaatcaaaagaaagccgacaggacaccgtttgaatattttggtaccgacgaacaacgatgggagaaattcgtagcacttgttgaaacaacgtataagacacgcgatgtcaaaacatctgacaaagctacaaacgctatcaactataaatacaacggctatgccatgaaaaagaagcaaaatctattgcttcaagactacaaaaatgacagctggaatgtacgagccctcaatgatacacggtacatcacgcggtttatccaaaattatctacgtcagaatgttgactttgccgaaggtgaagaaaaacagcgtataatcgcgccgaacggtacgacaacagcgtatctacgtaaacgctggggactagccaaggatcgcaccgaagacgtgctacatcacgccaaagatgcagcggttgtggcggcaattgaccagaagattgtttaccaagcaaacctcttctcgaaagagcaggagatgaggctgtatctcgataatgccaaaaccattgacgaaaaacggcaaatcctactaagatctactgacgaaaacactggcgagatcaccaatgaaacgacgtttactcaggctcaaaaagacctcgcacaagctgaatatttcaagttgcgcagtgatacagagaccaaaaaccgtttcccagctccgtggccagacttcagtaaagaagtcatgaagcgcacacttaacaccgatatcgccacactacaaaatgagctacgcggacttgataagtacgacgaggagttccgcctaagcataaaaccaatcttcgtttcccgtatgccgcgccgcaaagctaccgctcaagcccacaaggagactgttcgctcaccaaaggttaaagatggtgatcaacgaaccgtacgaatgccactaaacaaaattaagcgcaaggatgtcgaaaactccgtacttaaagaatctgataagtggctgtacgataaattgcgcgagaaactagatactcacggtgataacccagaaaaagcttttgctgaacctatttacaaaaacgataaaaaatttgataaaaacggcaaccaactgtcgccagtctcaaccattaaagtatactcaacgcaaccgagtggcttctatatcaacaagggcaaagcgtttgtcaataacgggtctatggtacgacttgacgtatatcaaaaaccaaacaagaaaggcaaaattgagcacttcttcgtgccagtttacgcccatcaggttggtaaaaataaacccacgccaacaaagatcttaccagcacccaaagggttcactgatatagatgaaactttcgttaaagtctgctcgttgtatccaaatgattatatacgaatttaccttaaaaatgagatacgagagggatattatgtaaagtacaacgtagctaatggagctatgcagctattaccaaactatgcaccaggaaaaaatcaaaatacttttgtacaagtatatggtaaaaatgctcaggctatcgagcgttacgacatctccatcctcggcgataactacaggtggttataaatggcctggcgcgtcgtagctatcgaaaaccctgccagactcagcctgcgggataatcaattggtaatcgcgcaagatgtcgaggcaactttaccgattgaagatatcgactcgctcattctggacagctacggaataaccacaactgcaaatctactcacagcactggcgaccaaaggcaccacaactgttatttgtgacgaaaaacacttaccagctagcgtacttctaccgtattcacaacattcgcgccaagccaaag

SEQ ID NO: 1929 - DNA, 4494 bp, synthetic construct
  misc_feature 1..4494: note = Synthetic
  source 1..4494: mol_type = other DNA
atgtcggcctcctctctgatgacatctatcgacgccatcggttttggtcacagcctgtctgtgacctcacggggagcaggagagacctgcacccggcgagaccgcagacatatccatccacttcatcataaagtacaccgcacccacctacagcactactatcatgacacatctggcagaaaagtaaacccagcaagatacttagtgctatgctcgctcaagtaagaaagttgcgtaatcacacttaatcatggcaagttgatttcactagcatcagctgggcaggcccggcagcccagctaatgcgttagctaagctagccgcgactatgacagaatatagctgcgcacctttttgcctggacagtaagcaccgtgtattctgctggatgctgagcagacccggtatgataccgataagcaccgaccaacccgagaagacactcggctattgcaatccagccttgatactctataataacagtacagtcatgggagcatgattgtacaactatctaaattgttttaggtttctataataatttagtagaaatactaaagcaaagtaattccgtctcctcgtgaggcggattatctttgtgtgtctttgtctatttgcacctatgtaccacataaccggaaaaggttataatgacgttatgaaatattcacttggactggatatcggcaccagctcagtaggctgggcagtgcttgacttagaaaaggaacggattcacgacctgggagtaagaatctttgagcggccggaagacccgcagaatggcgattcactagctaagcctcgacgtgatgcacgatcggctcgtcgtcgactgaagcgtcgtcgtcaacgcctcaatcatctcaagcaattcttcatcgaccaaaacatcctcaccaaagatcaagttgaagaagtattagatcctgaatccgattacaataagctggacgtttatgctttacgatcaaaagcgctcaccgaagaattaacacccgaggaactgctcaaagtcatatatcagatcgccaagcgacgtggtttcaagtctaaccgcaaggtggtagaggaatcagacaaggaggacggtcgtgtgaccagcgccctcaaaaccaacgaaaagttcctgactgagaatggctacgccaccgtcggtgacgccctcaatcacgacgaaaaatttgccccgcataaacgcaataaacgagacaactatactaatagctttgctcgcaacgactttctgcgtgaactggaagccattatcagggctcagcggaattacgctctaaaggatgtctcggagcaggctatcaacgagttggtctacggtatcaacgacggacaggttaccaacgtgaacgctatcatgtaccaacgtccattcatgaccaaggaactgatcgaaaagatggtcggtgaatgtacgtttgagaaaggcgagaagcgcgctccgaaagccagctacagtttcgaggtatttcgcctggcaagtgatttatcacacctagttttcattccccgcgataccagcaagcgccaggctaaacgagagaatttagaaatcaaattatcatcggaacaaatcagaaaggtcattgatgcagccaagaatcaaaaggggctaacgtataaaaaggtacgtagcatagcaggaatcagcgatgactacgtgccgaaggatgtgcgtggcaagaaaaaagacggcgacgagttcggtgagggtaacacctttggtggactaaaagcatatagcgacatcaggtcggcactaaaagatctgccggaagattgggcaaagattgataacgagacgatgatcaaccaagttgcctatattctaactacacaaaaagccgatcaaggtattcgcaccgagctaaatcaactaccgctctccgacaaagctaaggaggctatcatccgaatcaagccgactaacttcaaggcgtttggacatttatcgatcaaggctttacaaaaaatcacgccacacattctcgaaggcatgacctacgacaaagcctgcgaggcagctggctacgacttcaaaaagcaatccgtcagcctggagcagattaccaaccctgtcgtcaagcgtgctatcactcagacattgaaagtcgttcgcgctattgaacataaatacggtaagccgtactttatcaaggttgagactgctcgtgacctagcaaagaatttcaaagaccgcaaagcaatcgaaaatgaaaataaggaaaatcaagcgcgcaaccagagtattgttcagacgctgaatgaaaacaatatcgtaactccaaccggtcagcagattattaaagttaagctctaccgcgaacaaaatggtgtttgcttatactccggaaagccgattgacttcgagacgatgctccgtgatgacaatgcctatcagatagaccacatcgtaccgttctcacgctccaataacgacggcatgaccaataaggttctggtattgacagaagaaaatcagaagaagagcaataaaactccttttgaatacttcggcgccgacgatcaacgatggaaagaatacgcagcacgtgtcgaggcaatctataaaacacgtgatgtcaagacggcagacaaggctaccaatgtcgtcaactacaaatataacggctatgccatgagaaagaagcaaaatctgctcctgcaagtctacaagaatgatagctggaacgtgcgtgccttgaacgacacacgatacatcacacgattcatccagaattacttgcgtcagatggttgattttgccgagggcgaagagaaacagcgcgtcgttgcaccgaacggtacgaccactgcatacttgcgcaagcgttgggggcttgccaaggatcgcaccgacgatgtcttacatcacgccaaagatgcagcggtcgtagcggcgatcgacatggggattgtctatcaggccaatctcttctccaaagaacaggagatggagctgtacctggctaacgcaaatacgattgacaagaaacgacaaatcttattgcagtctaccgacaaagataccggtgagattaccgatgaaaacgcattcttaaaagctcaaaaggacttggctgaggctgaatacttcaagcttcgcagcgatgaagagactaagaatcattttcctcagccatggtcggactttagcaaggaggtgatgaaacgtaccctcaataccgatatcgccacactgcaaaatgaattgcgtggacttgataattatgatgatgagttcaggctgagcgtaaagccgatatttgtttcacgcatgccacggcgcaaagccaccgcacgagcacacaaagatactatccgctcaccaaaggctaaagacggtgaccagcgaactgtacggatgccactaagtaaagtaaagcgaaaggatgtcgagaattctgtactgaaggaatctgatcaatggctgtacgataaactacttgaaagactggataaccatgatgacaaccccgaaaaagctttcgccgaacctatttacaagaatgataaaaaatacgacaaaaacggcaaacaactatcgccggtctcaaccatcaaagtatactcaacacaaccaagtggcttctttattaataaaggcaaagcattcgtcaataacggatctatggtacgacttgacgtatatcgaagaccaaataagaaagggaagatcgagcacttctttgtaccggtctacgcacatcaagtcagcaaaaataagcctgcgccgacaaagattttaccggcgcccaaaggatttactgatatcgacgaaacattcaccaaagtgtgttcactgtatccgaatgattatgtgagaatttatcttaaaaatgagatacgagagggatattatgtaaagtacaacgtagctaatggagctatgcagctattaccaaactatgcgccaggaaaaaatcaaggtactttcatacaagtctatggcaaaaatgctcaagctatcgagcgttacgacatcaacgtcctgggcgataactataagtgggattaggttagaaactatggggtggcgagttgtagctattgagaaccaggctcatctaagcctggaacaggggagtttggtcatcaagggtgacaagagcgctaagctaccgatagaagatatcgatacgctacttattgatagctatgcagtgactatgaccgccaatctcctcggcgaactcgccacacataatgtcacgactatcatttgcgaccaccagcatacgccctgctcagtaatcgagccactatcacagcactctcgccaagccaaagtatcccgcatgcagttagagatgtctcagccactgcgtaagaatctatggcaggcaatcgtcaaacagaagatcattaaccaagcccaggtcctgaccgcatttaggcataccgagcaagccggacagctcatcaagctagccaccgaggttcgcagtggtgataccactaatcgagagtctatcgctg

SEQ ID NO: 1930 - DNA, 4313 bp, synthetic construct
  source 1..4313: mol_type = other DNA
  misc_feature 1..4313: note = Synthetic
caacgacagctgcgatttgctctggatttaacgttaactgaagctgctcacgttttgctcggtgcttatttgtactttttggtataaaaacgaggtgtgttaagtcattcgcaaatcggaaaagctcaaagctatagcttgctctcggtgcgcgtttctcgcccttttcaaatgtacactcgccaaccatctttttgattagctcttctgtcataaacgggcgttggtacatgatagcactactgttggtcaataaaccgtctgagtcaacgccataaataaggttgcgtagggcttcatcgctcacgctttttaggacatagcttcgttgagcttttataatttcttctaactcgtggataaaatccgcttgcgcaaaactgttggtgtaactgtcgcgcttgttgcgtttatgctcagtgtattttttatcttgtgcgagcgcttgaccaacggttttatagcctttttccgtcaagagctgctcatttattgtcaatgctttactaacgcgaccaccctcgctatctgtttcttctacaaccttacgattactcttaaagcctcgccgcttgctaatttgatagagtactttgaacagttcttcggcggtaagttcgtggttaaggactttgtcgcgtagtgcgtatatatctagcttattgtatgttgatttcggattaagtatttccgcgatttgcgcttgtgttaaaattttttcattgacaaaaaatcgcttcagatagtttaagcgctggcggcgacgcttgagtcgatggcgaggaatacgctccagaatatgttcgcggaaaaataaataaagacgacccgtatggcgataagaatgagtttggcaaactaaaagcctaccacgacatcaaaaaagcgctaaaaagcgcacctggagattggatgaaagttgataacgagtcaacactcaatgaaatcgcctatattctaacgactgaacgtgaggacgttgagattctcaaaaaattgagtgagctggcactttcggacaaggcaacgtatgcaattcttaaaattaacccaaagaattttagatcatttggacatctatctatcaaagctttgcaaaaaatcacgccacatattttgagcggcttaacctacgacaaggcctgcgagaaagctggttatgatttccgcagaaagtctgctaacttagaacaaatcactaacccggtcgtcaaacgggcaatttcacaaaccaataaagtcgttcaagcagtaattcgtaaatacggcaaaccatattttatcaaggtagagaccgctcgagatttagcaaagaatttcaaagatcgcaaggcgattgaaaatgaaaataaggacaaccaagccttcaattcagagattaaagagattattgaacacggctacaacataaagcccaagactaaacgcggcaagaatttacttgagtttttgagagagaataatgtgccgctttcgcaaaatattgacgcaaacgggcaaatgataactaaggtcaaactttatcgagagcagaacggtaaatgtttatattctggggatccaattgactttcaagccatgatccacgatgacaactcgtatcagatcgaccatatcgtgccattttcgcgttcaaacaacgacggcttaacgaataaagttttagtgaagactgaggagaaccaagagaaggcgaatcgcacgccatttgagtatttcggcggcgacgaagcgcgttggaaacaatttgcagcacgcgtcaacgcaacataccaaacacgcgatgtcaaaactagcgataaagcagtgaatagtgaaaactataaatttaatggttatgcaatgcgcaaaaaacagaatcttctcattgaggaatataagaacgacagctggaacgcgcgagcgttgaatgatacacgctatattacgcggttcgtacagaattatctacgtcagacagttgatttcgctgaaggagacgacaaacaacgcgtattcgcaccgaacggcacgataacgtcatatctacgtaagcgctggggcttgaataaagtgcgtgaagagaatgtactgcaccacgcagccgacgcggcaattgttgcggcaattgatcaacatgttatttatcgcgctaatttatatgccaaacgcggcgaaattatcggattcttagcggctgccaaaaccatgaacgagaaaactaacaagttgacaggtgaaatccttgatgatgacgaatttatgaaagctcagcgccgcagagatgctttgcaagtactgtcagacaagcattttcctgagccttggagcggttttcgcgacgaagtagatttgcgcactcgcaatatcaatatagagagtcttcgcaagaaacttcaaggcgcccatctctacgatgaagactttttgtctcaaattagacccatattcgtttcacgaatgccacgccgaaaagcaaccgcccaagcccataaagaaacgattcgttcgccaaaagcaaaagataacgatcaaagaacagtacgtatgccgcttaataaagtcaagttaaaagatgtcgaaaattctgttttgaaagaatcggacgcatggctatacaataagctcatttcactattagaggcaaacgacgacaaccccgagaaagcatttgccgagccagtctataaaaatgataagaaatttgataaacatggaaaaccgctcatgccagtctcgacaataaaagtttactcaacgcagccatctggcttcttgataaataaagataaggcatttgtcaacaacggctcaatgatccgcctggatgtatatcaaaaacaaaatcagaaaggcaaaattgagcactttttcgtaccggtttatgcgcaccagattggcgggaatcagccaacaccgactaagatcctgcccgcgccaaaaggctttaccgatattgatggaacgtttacgaaagtttgctcgctatatccaaatgactacgtgcgctgtcgcttcgggaataagatcaaagaaggatattatgttaaatataatattagcaacggagatcttcaggtaattaatcaaacgtcagtagataagaacgcttcaaaccttattcacatatcgcctcgctctgcaaccctcattaagcgctacgatatctcaatcctcggcgataacgccccgaggtcgtagtggcctggcgcataatcggtattcaaaatccaagtcgcctaagcctacgcgataatcagcttactattacacaaaacgaagaagtaagcctgccaattgaagatattgacgcactaattcttgacagctacggcaccaccgcaacagcaaatttactaacagagcttgcgactaacagcacaacggttgtcatttgcaacgaaaagcatctgccgactagcgtattattaccatactcacaacactctcgtcaagcaaaagtttcacgcctacagctaaacatgagtcaaccgctgaaaaagcagctctggcaacgcatcgtcatgcaaaaaatctccaatcaggctgacgtacttcagtactttagcctaaacgatataccattgcgtcaatacgctatccaagtaaagtcaggcgatagcactaaccgcgaatcaatcgccgcccgcgcctattttgaccagctacttgacgacaccacgcgccgaaagcctatctggcacaatgcggcacttaattatggctatgcgatggttcgcagtcatattgctcggcacatagctgcccgcgggttagtcgcctcgcaaggcatttttcatcatagtgagttgaacggtttcaacctagcagatgatttaattgagccgtaccgagcagtcgcagacctatttgtacttaagaaacttgcgccgttccacatcggcgaacaagacgcaagtctcactaagcaagaccgccaagccctagttgacatattaaattatcatgttataatacagaacaagaggtttactctgaaacatgccgtcgagaaaacggttgaaagcttcatcgatagtataggagcaaaggaggcgggtaagcttcttttaccaaaaatcaacgcctcctagcagggaagggatgtcatataaaatcatgcgagtggcagttttctttgatttgccaaccaatactagagctgagcgccgagcagcgacacaatttcgcaagtttctacttgacgacgggtttgacatgttacagtacagcgtttatacacgactatgccctaatcgcgatgtcgccgaaaaacatatgatgcgcatacgacgcaatgcgccagatagcggctcggggggggtattttattt

SEQ ID NO: 1931 - DNA, 23588 bp, synthetic construct
  source 1..23588: mol_type = other DNA
  misc_feature 1..23588: note = Synthetic
gggcctggaaaaaaagcccggggctgttttccctgaacgaggcgttgcatccgcgcggctcgaaggtccagtcggcgatccacggatgggacgggtaggggcggaagatggaattcatttgaaaatagtgtttgttgagcagggatgtttcaagcgaatattcgcatttggggccttaaagaattagttgcaactttacgttgacgtggaggggaaacttgctattaattaccggctttcttcactataataggtgaactgtatacttttataaacaaggagtcccatggctgtctcgaaaaagaagtcttccgcaaagaaggccgcaagcaagaaaacctctaagcccgacactgaaaaagccaccacgattaccgtcgcaaagaaagccgccgctcctggtcaaaaaatagaacctgcaaaaaaagttgtaaaaaaggcaccggcccggaaaaaggccgcagtcaagaaagcccccgcgaaaaaggcggaaacctccgccgaagcaaaaacgcaggaagacaaggtcgccgcaaccgtggctgccgttgatgaggcaacgtccggcggtgtttccctgatggatcgcgaagagcgcaacgatcgcatcaaggaactgatggcgctggcgtccgaccacgggttcctgacctacgaggacatcaacgaagccttcccggaagacatggttgttgtcgaggacatcgacaagatcgtggggctgctgcagagcatggaaatcgatattatccggcaggacgatgtcgaggagtaccaggcgcgactcgaaaaggagcaggccgacaagcagagcgcgcgttccgatgttctggacgacccggttcgcatgtacctgaagcaaatgggccaggtgccgctgctgacccgcgagcaggaggtggaaatctccatgcgtatcgaagaggcggagatcgccaccaccaagatgttcaaccgccttggctgcgcaaccgacgcctacctcggcgtgattgagcgccttgagctgggcaaggaacgtttcgaccgcatcatctccgacaagcatgtcgagtgtcgcgaggactatttcaacgacctgccgaaagtgctcaagggcatcgagcgcaaccgcgagctgaaactcaaatactatctcgaatattcctcggccaagaaaggcagcgaggaagaaggcaaggccctgaaaatgttcgacaaggcggagcagcgcctttccgaatattataagcagcttcatttcaagcagaaggccatcgaggatatcgttccggaggtcgataaatcctactacaagatgaagcacttgctcgaggaggtggatcgtctgaagaaaagccgcgccaagagcgccaataccgatctgcgcggcatccgcaaggagatcaaggagctggaaacctatctccatatggaacagaaggagttcatggcgcactttgccgatctgcgcgtctggctccgcaagggactcaaggccaaaaccgagatgatcgaggccaacctgcgcctggtgatttcgattgccaagaaatacaccaaccgcggcctctccttcctggatttgatccaggagggcaacatgggcctgatgaaagcggtcgaaaagtttgaataccgacgcggctataaattctcgacctacgccacctggtggatccggcaggcgattacccgttcgatcgccgaccaggcgcgtacgatccgtattccggtgcacatgatcgaaacgatcaataaactgatgcgcatccagaagcagctgcttcaggaattcggtcgcgaagcgacccccgaggagctggccgacgagatggagctgccggtcgagcgcgtccgcgccatcctgaagattgcccagcagccgatctcgttgcagagcccgatcggcgattccgacgatacgcacttcggcgacttcattgaggataagtcggccgagaagcccgacgaaatgaccgcattcagcctgctgaaggaaaagattggcgacgttctccagacgctcaccgaccgcgagcaggaggtgcttacgctccgcttcgggctggtggatggctatccgcgcacgctggaggaggtgggtcgcaagttcaacgtcacccgcgagcgtattcgccagatcgaggcgaaggccctgcgcaagatgcgccacccgacccgtatccgcaagctcgagggcttcctcgacggcgaataggcccagatctctccccaatttgaggggaagatgaagcaagcgtcctgaattcgagcagggcgcttttttgtggagtgatgagggcggaaggtttgtgtgcaacacgcttttccgacgcagcttgaaaggcgcaggaggggcgccgctttgaaaggcgcaggaggggggaacggcgtcgagctgcctgttttaagcgcgatcaagctcgcgcactgcaaattgctgtctctcggctggaaaggtgcgggcaggcgggaggtggcggtttcgcgagtggggaaggggtgttcataagcgggatatcccgaaagtggatctggagtgcgctggctcgacagcgcttttaaatctactccaccaagccaatgccaatcctataataacccgcgttaaagttatttgtatcaacaacataacccgcattatttgtaacagtctcaaggttttgccagccagccccttcaactaagttggtattaaactcaacaccaaatgctctattggtaatgtttggggtccaataaattctattctcaagatttggataaggtttctccccaatcacacgattgattgtagattcaatctccgctctgaagtaatcattggcattggttgggtttgtaccagcaatatactcttgccaattaagaagcccatcaccatctgggtcctcaagatctgcagcttcgaaagttgcagaactattcaccaacccatttgcatcttttggaactaaatcatgatcatataaccaaccaaaactaactccatttgttgtttgtttcaaacgtgtgattggcaccttaaatccaccatctaaatttgcagtatctccattattcgcagtaaatgttgctggaacgaagtgccagccgattactgagtttgttgggacttcgtaggtgtaatccctattcgcactgggcctatgccaatttacagagtttgtagtatatcccaatttacttaaattattggggactaaactatgttcccaatctaaggcaggagtctgaaatccgaaacatccactatttaaaagattttcactaatcactatttggttatatgacttgctaacatctccaggacttccaggagtactattcttcaaggtttgattaatttcataattttctcccacaactacaggttctaaattaactgaaagatttgtagccgaagcttgtcccttagccatgggaaaaacactccccaaagccaatcctgctgtcaataaacacttcaattcttttctcatatctaaaatacttcaatttagtttttaaaccttttgtttgttatcccctactagttacaactgctaactacaatctgccgaatcataaacatagacaactgagtctgtacaagtgttactctcatttgaaactgtccaagtttatgggctcaggtcagttgtcttatatccggttccattaatgtgctgcttgagaatcataatgcttcatatacaacgatataaatcggggttcgagactatacgtataaaatgtatgagaacggcgaccagtggggcggctacagaagatcgacttcgtttttagattgcagaccgttagcgtttgaaagcggtgtctgcgaagcgggtctgagcaattgcaaaacacccgccacactatagtgctttactggtttgttttaaagcggtctcaagcgcccgcactccatatgcttttacggcttaaagctataaaagtcctcgccatcaaaccaggcgcagcgcatgcgatccatcggcactcccgcccgcactgagagcgccatcgcatacagactcaactgactggccactttctgtttgttttcttttctggtgttgggcttgaagtcgaggatgtagagggtgttgaacttccattgaaggaggtcgatgtggccggaaactgtttcggagtgcggtgggccgaaggcccgcgatagccgctcgacaccgcttttcgaagattgcggtgcgggggtgtttgaaagcgcagtcgagcctgcgcactccatattttgcggtgcggatgtgtcgggcgtcgagccgccctggtttgaaagcgcagtcgagcctgcgcactccgaaaggctcatccaaacaggcacttcgctggcaatcgtatagcagtcgcagttgagcatgaactgttcaacaacatcatgccgctgataattggttttggcgaactggagggctttgagggcgtccttgcaggcctgggtgttttgggagtgcttcacgttaatgttcaggctggggttgagccattgcgagcatcggcttgcggtttcaaaggtgtggtggtcgatggatccgggcagcttgaccaagtattccttcaattctttcaatgggcaatccgcgagcttgggaacatgaatctggaagttgtagttgaggtcgcggtgggtgaagacgttggagatgacgattttggagacggcattattttttgcccgctttttgagatagggcggattgtattccttgacccatttggaaatggcactggtggaaatgcttctttggtatcgacgttcgatgaagcgccggatctcttcgtagctggcggagcggcaggcggcaatgagggatttgaggatgatttcgggatcggtctgtttggcattgcgatgcaggctggaaaactttcgcaggcagtcattgcatttgtagagttgcttgatgccggatttaagcttgcgggtacctgcttttacgatggcggtagagttgcagtatttgcagcgcagctgctttggagtgcgctcgcttgagaccgctttggagtcctgcgggttgtcttgcaggtgttcagactcgcttcgcgtgacggcgcttttaaattgaggcgaagcctctttggagtgcgctcgcttgagagcgctgttagattgctttgcgggcgtatttaaaagcggtgtcgagccaccgcactccatatcttcgggcatcgagctgcccgatcttaaagcgccatcaagctggcgcactccgaaatcatcatagaccttaacctgatcaattttgaagctgttgacggttttgacgaaggcgttcggcgattcgcgggcgaaccaggcggcggagcaccattcatacagctcggcgttttctacgactccatggtgcaccggattgtggtggacatatttgaggcgggcgagccatgatttttcgtaggtgatgcgggagtcgtaatagttgtaccagactttgcggccttgcgtgttgtctatgcgattgatgtcgcgagcggacagggtgtggagagtggaaagcatttttttgagcgtggtggtatcatcgggggagccggccacaaaatggtagtggttggataggatggcccaggcttgaagctgccagtcatatttgttcgccagctcaaacagcagatcgcggacgagggtgagtttttgcgaggtattgaggatgtgctgtttctgatgggtgccgcaggtgacgatataggttcctttttcgaggagtcgatgcggtggggcatggggccaggaaatgtgtgttttcatagagtcactttacgatgccgtgtcggcaagggcgagaaagtacaggaaagaaggttgggtggaaaaatgaagcccggttgatccgttttaaactgttttgttgatatttgaggggattggtttcatgttaggtgtttggttttgatttgatgtcggagggcaggtatgggttccgtaaagactattataaagcgggacggccaggttgccatgtacgaccgtggccggatcaccaacgccatcttcaaagccgccgctgcctccagtggtggctttggctttgatgaggccgaacggttggcccggttggtggagcagcgcaccgccgacagctatgcggaacaggtgccgaccgtggaagacctgcaggacatcgtcgaggcggtgctgatggaaaacgggcatatcaagaccgcccgcgcctacatcatctaccgccagaagcgcaccgaggtccgcgaagccaggcaaggggccatcgaggcgaccgacaatattccctacaagttgatctacgaagtcctgcgttggaacatcgagcatggctgcgaatccatcgaaggcatcaaccggatcatcgagcaggggaactatcccgatctggtgatggcctgcgaggagcgctatgccaacgagtgccgcatggcggggcagcgggtgcttgaccatggcgacggcgtgcgcctggtgattgttgccggcccttcttcatcgggcaagaccaccaccaccatgaagatggagcagcaactctccggccagggaaaaaagctcaaggctttccatgtggaccactatttcttcaatctcgaagaccaccccatggatgaattcggcgactacgactacgaaacgccccaggcgctcgacatcgggctgatcaacgagcatctcgaacagttgctctcgggcaggaccatcaagacgccgcactatgatttccataccggccagcgaaccctcgatgttcatgaaatgacgcttggcgacgatgaaatccttttgatggattgtttgcacgggctctattcggacatgacgaaaagcgtgcccgacagccataagttccggctctacatcgaaaccctcggccagctccgcaaggggaacgacgagttcatgcgctggacggaccaccgcctgatgcgccgcatggtgcgcgatagctggagccgcaaccattccgtgatggatacgctgacccattggcactacgtgcgcaagagcgagctgcaatacattatcccgttcatcggcaatgtggatttcgtggtgaacagtgccatgccctacgagttccccgttttaaagagcaagctcttccaccatttcccgcaggccattgagcactatcgcaccgacttcaagcgccaggatgcctatttgcgcgcccggcgcgtgatgcagttccttgagccgctgcacgattatgtggaccacgggtgcattccggagcaagcgctgttccgcgagttcatcggcggaagctcctattcctattaatccaggctaaggtcgccgtggattctcaggtgccgcagctcgcggtctacgtggatctttttcccgggaaacgcaaagggcagtttcttcacgatcaactcccgcacttttttgcgcaactcgtgtttcagctcgcgcgggacgtgcttgagggtggaaaggtggatttcaaccacatagcccggcccgaacttcgagccgaatcccgcggaataggaggctcccacgttgaagagcccgtccgattccggattgctggtcgtgcccaggggggcgcgtgccggatggagcggaaagcgttccccgtaggctttctcgagttcggcatcgatttcgtcgaacacccttttgagcttccgctcccaggctatggcttttccatgtcgcatacgtcccacacaaaagaaaggattgtctccgggaactcaagccggatgttgcaaattgtttcaatttcattgggttcaaagcattccattggcgggaaaccccatcgggtatcccgtgctttcgggggtgggaaaccatccctttttttatccggcaaggtttgacatcttacggcgaatccctatcctttcgcgaaatttcacgtaaatgggtctattaaactaaatggaggtttaagcataatgagtgctcccacaacaaatcagaagctgctcgactgggtggctgaagttgcagaaatgactacgccggataacatcgtatggtgtgacggttcaaaagaagaatatgaccgtctgatggtacagatgtgtgaatccggaatggcgatcaaactgaacgaagaaaagcgtccgaacagcttcgcgttcaactccgatccgtccgacgttgcccgcgttgaaaaccgcacctacatcgcttccctcaaggaagaggatgccggcccgaccaacaactggattgatccggttgcgctcaaggaaaccatgaagggactgtacaagggctgcatgaaaggccgcaccatgtacgtgatcccgttctccatggggccgatcggctccccgatcgccaaaaactccatcgagctgaccgattctccctacgttgtggtcaacatgcacatcatggctcgcgtatcgacggatgttcttcgtctgatcgaaaaagaagacaccttcattccttgcctgcactccgttggtgctccgctggccgaaggtcaggccgacagccgctggccgtgtgctccgatcgaagacaaatacattgcccacttcccggaagaaaacctgatctggtcgtacggttccggttacggcggaaacgccctgctcggcaagaaatgtctggcgctgcgtatcgcatccgccatggccggccgcgaaggctggatggccgagcacatgctcatcctgcgcttcaccaatccggaaggcaagcagttccacatcgcggcggcgttcccgtccgcttgtggcaagaccaacctcgccatgctgcagtccaccgtaccgggctggaaagtcgaaaccatcggcgacgacattgcctggatgaagccgggtgccgacggacgtctctacgccatcaatccggaagccggattcttcggcgttgccccgggaacttccgaaggctccaacccgatggccctcgcgtccatcgaagaaaacgccatcttcaccaacgttgttgtcactgaagacaaagatgtttggtgggaagacatgggttatgactgccccggcggcggtggaatcgactggaagaacaacccctggaaacaggctgacggcgaaaagggtgcacacccgaacagccgcttcacggctccggccgcccagtgcccggtcatctgcgatgcgtgggaagatccggccggtgttccgatcgatatcttcgtattcggtggcaagcgcaccaacaccatgccgctcgttcacgaagcattcgacttcgaacagggtgtatacatgggcgcaaccgcttcctccgagccgactgcagccgctctcgacctcggcaacgtttccctgcgtttcgaccccttcgccatgaccccgttcatcggctaccacgctggcgactacatgcagcattggttcgacatgggcgaaacccttggcgacaaggctccgcgttgcttctacgtcaactggttccgcaagaccgacgacggaaagtggctgtggcctggcttcggcgaaaactcccgcgtcctcaaatggatgtgcgaccgcgtcgaaggcaaagtcgaagcccgcgaaaccccgatcggcctgatgccgatcgacggcgacctgaccctcgacggcctggacatcccggctgaagattgggcggaactgatgaaggtcgacaacggcctcttcaaggctaccctggaagatgccaaggcttacctcgccaagttcggcgacaagctcccggccaagatgaccgagcagatggctaagcttgaagctcgtctcaacgcctagtttaatctccggattaaatattaaaagcgtcccgctcgcggggcgcttttttttgtgcccggaagaaatggtcccctagtgaagttgcatggagcaatatacatttaaaaagaaacgaaagactcgcttttatgaattaaatgcttattatctacccgtattttggctgggataaaataagaaaccccgccgaggcggggtagtaggtcaaagaccttcggcatatagccttattgtgaaaagacagttcttaatgttttttcagaaccatttgtaggtgtttttagaaaacgggtcaatacgaagctgaaaggaaaataaaatgggaaagcgcattctgggtttggatctgggcaccaacagcatcggctgggcggtggtagatgaagtcgatggcggatttgaaatcgtaaagcgtgatgatgggtttgaatatcgcggggttcatatttttcaggaaggggtgaagacggaaaaaggagtggagtcttcgaaggcatctgagcggacgggccatcgcgcggctcggcgaatcaagtttcgccgcaagttgcgcaaaatccagacattgaaggcactttctgaggcaggatattgtcctgcattgtcaattgacgaacttaaggattggcagtcgaaaaagatttatcctgaaaatccagcgtttcgggcgtggtgcaagacgtcggaggcggactctaagaatccttattatttccgatggttggcggcgtcagaagtcctgaatttggataaggaggaggatcgttttaaaattggccgcgttttctaccacatggcacaacgccgcggtttcaagagcaatcggctggactcgacgcccgatgaggaaagcggtgttgtgaaaactgaaattgctgagctgtccaaaaagatgggtgagcggacgctggggcaatatttctgggaggattgctatcgagaaggaaagccgacccgaaaagtgcatacgtctcgcgatgaccactatttggctgagtttgaagtaatctgtgagaagcaatcaattcctgctgacttgaaagagaagttgctgaaggcgatttttttccaacgccctttgaagtcgcaaaagggttctgttgcaaattgtccttttgagccaaataaaaaacgctgcccggtttcgcatcctctgtttgaagagttccgcatgttgcaggtgctaaacaatatcaagataaaattcagcgagtcagaggagtttcgggttctttcggaagaggagtttgaaaaagcaaaggcgaagtttttccgtgtgagcaaagccaattttgattttaaggatatttccaaggagttatctaaggggaaaaacaagggcgcaatttttaattataaagattaccagtcgttggcgggctgtcctacgatttctaggttgaaaactatttttggagaggattaccagtcggctatatcagagagatatacgggcaatcgtgaaaataaatccgcgcaggatattttgaatgaagtttggaatgtcctgttttcgttcaatgatgaggaaaatgtagtttcctgggcaacggtgaatctcgggctggacgctgaaatggcgaagaagtttgcgatgattcagttgaagcagggatatgcctcgttaagcctgaaggctatcagtaagatattgccgtatttggaacaagggttgatttattcccatgcggtcttctttgcgaatttaaagaaggttgttggaacgacgatcgaagaagatcctgggttgaaggctgacattgaaggacttattgacacgcatacccaactgacccgtgctttgagatcagcaaatgaattgctgagagaatttaaacaaagcccgtatcagtttgagcagaaatatgatctgcgtgaccgaacggagttttctgattcggttgccgccgttgttcaatgccaaattaacgaacataacggcgaatttgttcctgttccccgcctagaggagcgcgttgctggctatttggtggatcgctttggggtacctgaaggtcgtacaaaatctctgtatcacccttcaaaggaggagacgtataagcccgcaaagcgggctgacgatgggaagctgtatctagagagtccttgcatttcttctatcaagaatcctgtgttcatgcgggcgatgcaccggctcaaggcggttgttaacgagttgctcaagcaaggcgtgataaacgatcaaaccattgtccatgtcgaaatggctcgcgaaatgaatgatgccaacaagcgcaccgcgttgcgtcgctggaataaaaagaatgaaaacaagcgaaagggttatgctgaacaaatagaaaaagatttggagcggaaagccggcgatgatgagattttgaaatataagctttgggaggagcaaagccatcggtgcatctattgcgggaatgaaatttctgcaagccagatgctctctgccgagacggaaatcgagcatacgattcctcgaagcctgtgttgtgataattcgcaggaaaataaaaccataactcatcgagaatgtaatcggaaaaagaaaaaccggataccttttgattgcgaggactatgatcagattctaagtcgagttcagcattggaaagatgaggcagacaggcttcattttcaggtggaaaagaaggtgggcgccagccgggcggctgcgacaaaagaggcaaaagacagcgccatccaagcccggttgttgttgcagtatgagcgcgactatttgcgcgaaaaatatcgccgctttacgatggaggaagtgaaggctgggtttaaaaacagccaactggtggatacacgcatcatcacgaagtacgcgcggctttatctgaactccctgttcaaaaccgtccatagcgtgagtgggaaaacaacggatgcctgccgtaaagagtgggggctggaagaaaaatcccgcgacaatcatacgcaccacaccgtcgatgcaattgtttgcgcatgtttaacgcgaaaccagtacgacaaacttgcggcattttatcatgactatgagagttatgagcaaaatgatccgtctgtccctcgcaagccgcacctgaaaaagccatgggaaacgtttgcggaagatatgaaggtgctcaaaaacgagattcttgtttcgcactacgtacccaaccacttgctaaaacagaccaaaaagcttttgaggaaacgcgggaaggttgtaactggtaaaaatgggaaccccattgtgatgcagggtaaaaccgcgcgcggatcgttgcatcaagacaccttctatggggcgattaagcggttggataaagagtcgggaaaagaaagcactaaatatgtggtgcgaaaatcacttgccgatctttccgagtccgatttgaaaaagattgtggatgatcgggtgcgggaaatagcgcaagcaggtcgagagaaagaaacgtgtattataaaggctattgagaagctgaagaagcagcgggctacttctacagaagagcgggaggctgagttggatgcggaaattgcagagatggaatcgcaactaaacggtctctactgtctgccaaataaaaacggtgctccggttccaatcaagaaagtgcgagtttactctccgcttactaatccgattgaattgaagggtcaaagagatgtttcgcagaaaaaggggcgagagcataagcaaaaatattatgttggaaatgatgggaatcaccagcttgctatttatgagggcaagaatgagaaagggaagtttgggcgtacatacaggattgctaataatttgatggcttcaactgggtacgtctttcctgacaagtttggtgagatggatttaatttctgttgttcataatgggcaattggttctgttatttaaggagtcaaaagaagagttgatttgcgcctacccccaatcttaaaccacggatcggtgaacttaaggtggaacctgcggttccctgttccgtgttctggcggccaacgagccgcccttccatgatgccgtcgcggagcggagcccgtccccgaaggggcggcccggagggccgagggcggagcgcagcgacggcatcacttgcgatcatgttctgactgctccttccatgaatacctcggcgggggtgcgtttgtccagagcgctgtgcttcctctcgtggttgtaatatttaaaatagctgtcaaggccccgatgcaacgcatgcccgtcggcatagcatgcgggatagattttctcatacttcaccgaccaccacagtcgttcgatgaatacgttgtccaacgcccggcctcgcccgtccatgctgatggtgatgttctcgtttaacaggacaccggtgaaggcgttcgaggtgaactggcttccttggtcggtgttgaatatctccggattcccctgcgtcagcgcacgctccagcgcatcaacgcagaacgtgctctccatggtgcttgagagctcccaggcgagcacatagcggctgtaccagtcgattacggcggtcaggtacatgtatccatgccgcatcgggatgtaggtgatgtccgtactccaaacctggttcacccgttcgatgtccacattgcgcagcaaataagggtagatcttgtgcctcggggcgggcttgctcgtgtgcggaccgggcgtgatggcctgaatccccatcagctgcatgaggcgggcgacccgcttgtgattgacatcatagtcttgatcacgcaaccagtccgtcatgcgtggatagccgaactccggatgccggagatactgctcgtcgatcaaacgcatcagaagcaggttctccggcgtttccggggcggggtcgtagtagaagcccgatctggggacgcctgcgagcctacactgccgccgaaccgaataatcggtgccgggctccacccagctgcggcgcgttgaaagcggcaggctcatagctttttttcgagccacttcacgtccatcttcagacgcccgatctcttcgtaaagtggagccgtaagctcttcttccgtttgagcctgcttctttttccccgatgcaaaaagatccggcgcattcgaaagcaactgcttcttccaatccgaaatctggttcggatggacctgatattccgatgccagctccgccaatgtcttcacgcccttgatggcctcaatcgccaccttggccttgaacttgtccgtgaatgttcttcgttttcttcccatttccatgcgtccttttgtaccatgttgaggacgcaggttccacttaagccggtggtccgaaaatcggggttaagcgcaattcatttatcaaaaagtcggctcggagagcgattgttcataatcaagggtattgatgatgacggaataaagctttatttccatcaggaagctcgaatgacaacgcaggtgattgcttacatgaatgacgtaataactgaacaaaaccgagagaatggaattgttgacaagaatggtgaggttaaacagtcgaagttgacgactcccaaaggtggagatgttgttgggagacaggtagagtttccgtatgtgaagtttaagccctcaaatttcaatgcgttccttgacggtcgtgatttttgtctgaatgcccttggcgaagtcgagtggctgaacagggaggcagaatgttaaagcgaacggtctatttcgagtcggcggcgcatctttcattcaagaacgggcagttgctttatacgccgaagccggagggcgaggtgcggacggtgccgattgaagacatcggttttgtggtgctggacaatcacagcattacgctatcactccgattgattgaggagctgacggctaataatgcggcgattgtcttttgcgataaactacaccatccaacagccatgagtgttccgttcgatggcaacacgacccatgccgaaacgctggccgcgcagttggaaatgtcggagccgttgaagaagcaactgtggaagcagacggttgagataaagattaaaaatcaggccgctatgttggagcggaagaagtccggcggcgtcgaggcgttgcgccgccatgcggccagtgtgaagagcggcgacacggacaaccgcgagggagccgctgccaggatctattggcaaaacctgtttggcgaggatttccggcgcgaacggtttggcggtgcgcccaaccacctgctgaactatgcctatgccatcctgcgcgcggcggtcgcccggtcgctggtgggctcggggctttatcctgctattggaatccatcatcacaataaatacaacgccttcgccttggcggacgatgtgatggagccgtaccgcccctatgccgatgaagtggtttatggaatatggtctgcagccgacgagcccattgaagaactttcgcgggaacataaacagcagctgctgaaactgctcgccgtagatgttcatttaacgaatacgctgcggccgttgatggtggggttatcgtacacaacggcctcgctggcgcgttgcatcgccggcgaacagaagaaggtggattatcccgtaatgaaggcggtagaaaatgtcggaggtgcggcttaacgcgtataagatcatgtggctgtttgtattcttcgacctgccgacgaacacgaaaaaggagcgtcacgacgctgctgtgttccgcaagcggttgttgggcgacggcttcaccatgatgcagtactctgtttatactcggcactgcggaagttcagagagtgccgacgtgcatacgaagcgggtcaaaggactcgttccctccaaagggcaagtcagtattatgcggatcacggacaagcaatacggcaacattattaatttctgggggaaggcggctatccaggttcctccgaaacccagccagttggagtttttctgactggtgctaaatgaaacgaacgatagaatgcagaatatgaactgtaaatttacttcatggttagaaccgtgccggttttctttagcgctggcagatgctagttccttggaaaacagcggcttatggcggctatgttgtggattgacagttctttgaaatcagaagcaacccagacgatctacatcttaggtggtggcccgttgtggattgacagttctttgaaatcagaagcaacagtaacaagcatgtcgccggtaccggcagcgttgtggattgacagttctttgaaatcagaagcaacttcttgaccagacggggccggcggaggtgagttgtggattgacagttctttgaaatcagaagcaacctgattgcgaacaacaagaggcccccggctgttgtggattgacagttctttgaaatcagaagcaacatcatgctccttgcatgctgcaggacctgtgttgtggattgacagttctttgaaatcagaagcaaccgttgtctggttttctggctcatgattcgagttgtggattgacagttctttgaaatcagaagcaacagtttaagaaatcaagattacccaagtcatgttgtggattgacagttctttgaaatcagaagcaacggctttgcaatggaaagtgtatggaaacttacgtgtcatgaatgcggggtatttctgttgctagtaaaaccataatgatataaggaatatgctcttgtgagcggagagcctgatcatgagaagcgttgttgcctgtgtcgtcatcattttaggcgccatgtcttatcaccgaatcgtggatttgctgagcaacccccgctccctaatgcagcgcacgtatgagatgacactctaatttttgaaggacagaacatatgatcaacagcaggcaatcccggcgacagtttttcaatcatactgcagcgtctttcgtggctctgctatccattcctccatgtgctaccggcgaaggttctttaactgcttccgaggcgatgccgccgagatggaaaaaccggcaggaagggatgaggtatcgccgccttgggaagaccgcgatgatggtgtcggagctggcgatgggaacctttcctttcgagtccgaggacagctttccattgttcgatgcagcgatagatagagggatcaactattttgactgtgcttcggcctattcgggcggaaaggttgaggccaacctcggccgctatttcaaggcgtcggggaaccgggaaaaggtgttcctctccacaaagctgagtggatattattgggagctcgaccgctggttgatgacggaagtcggaaagaagtccaaggccgtgcagcatgaaatcgaggcaaaggccgaatcgttgctcgagcagcgacgggtgaagctacccggatatcacattcagtatttcggcgggcaggctaatcagtttgataagacctattatcgctattttgccatgcaggagatcggaatttctgatgaatggcgcggcaaaataaagcaaaacgcctatcggttgttggaggagggtatgacccgtttgcaaaccgattacctcgatgtgcttcatattccgcacggtgtagccatgcccgagatgatggatgacctgctgaaggaaatctttcaggagttcaagcagaagggactggtcaaagcctcggctgtgtccttccacaatgacgtgaccggcaatctgctgcaggctgcgaaagttggttattatgatgtggccatgtttgcgtacaacattgccaaccatgccggactggaacatgcgatgtataaagcacaccaatccgggatggggttgattgccatgaaggtcgccaagcttttttccatgggcaaccagcccgcctggcgtttgtccaagctgaatgccgcgatccccgacgaaggcttgtcgccttttgccaagtcatacctatgggcgcttcaaaacccgaacctgtcgtgttgtgtgtcgcaaatggaaacgatcgaacagttgaatgacaacctgcaggtcgttggccggaaactcgatcttgagcccagctaacgcggctccgcagcagggaataggtggcaacgaatgtatgaaacacgaagtgaggctggtgcggagcgccggcagcgaagcggcaaccaacgaatccgaacatccgaagcattcgttgcttttcatgaattcgttgcttgaaaatctatgctattgactggaagcaaacaggtaaagggtcattcattatgacacgcaagatggtaagaagtttggatgtaaggaactaaatagaaaaccccgcggtcagcttcgcggggttttctgtttccaatgtttagacgttaaacctatcttaggcatcgaaatcaaaggccaaaaggaatcctatgaaaaagatgatatccgtactgtttgccggggggattgtttcctgcctgctcgcttcctgcatgtcggcaaggaatgcttcctggagcaatcccgagtttcctgaacgaaaattgggaaagactattgtcatggccattggtgaaagcgagtatcgcgtcaatcagtttgaagctctgctggtgagggagttggcgacgtatggagttgctgcccaagcgatgcatcagctgtgtcctacggttggcgatatggagagagaacagatttcggcgctggtgcagagcaatcgctttgacagcattgttgtgacgcacgtgctatccgaagacgaccggcaacagctggttgcgaccgggtatacctcgtcgccgaacatgggatattccggtgtcgggtattggggctacggaatgagctattccctgaatccagagttcgccaccgtgagcaatacgacgacgtatgatctcgaaaccaatctctttgacgtcccgtcgaaaaagctcgtctggtctgggcgaaaagaagttttcgacggggactccgacattaagaacatccaaaaggtggtcatcagcgtgatccggggttttaaatccaacaagatgctctaagccaaacaggttgccgttcaaatgaaaaaccccgcgatgttcatcgcggggttttctaatggtagggaaggctgtcctcagccgtccgctcggcggggcggcgcgctcggagagcacgccctacctgttttacctcacccgcaggatgcggagcatcctgcgcagcggttcggcggcgccccagaggagctggtcgcctacggtgaaggcggagaggtattcgccacccatcttaattttgcggaagcggtcgaccggcacggtcatctaagcatgccgcacccccgcatccgttagggctaatcctcgaagtaggccggggcctgctgttcaatcgttttggtggcccccatttgaagcgcaccgaatgcgagcgtcagcagggtcaagaggtgccaaacgttcatctcaaagtccaaccatctcatttttgatattttcacgttatactccttatgttgaaaggagttcgtgattggttggagaaccttacatccgaagatgagaaattgtctgtggcttgctgaatgcaggcagtaactagagggaacggcaatccgctcccacaaaaaaaccgcgatctgcatcgcggtttttttagtgtagacgaagcatcttgcttcgttatgtccgagttgttcgtgtgcaacggagcaagtgattatgccgagtagaggtaatcttccatctaggttagcctacttctcctgcaggatgcggagcatccggcgcagcggttcggcggcgccccagaggagctggtcgccgacggtgaaggcgttgaggtattccggccccatcttcatcttgcgcaggcggccgaccggtacggtcagcgtaccgctgatggctgccggggtcagacgggcgagggtgtcttccttgttgttgggcaccacgtcgatccagtcgttgtcgccgcgcaggatatcttcgatctgctgaatggaaacatcctggttcagtttgatggtcagtgcctggctgtgcgagcgcattgcgccgatacggacgcaggtgccgtcgatcgggatctgcggatcgttgccgagaattttgttggtttcaacaaagcctttccactcttccttggtctggccgtcatccacagctttgtcgatccagggaatcagcgagccggccagcggggcgccgaactgctccttcgggaagctgtcgctacgcagggcttcgctgaccttgcggtcgatgtccagaatggcggaggccggattcttcagctcctcgactgcggcgttgaacaggtggcctttctgcgaaagcagctcgcgcatgttctgtgcgcccgcgccggaggcggcctggtaggtcatggaggaaacccactcgacaagtccggccttgaagaggccgccgacggccatcagcatgagcgaaaccgtgcagttgccgccgatgaagtccttcttgccgtccgccagcgcctggtcgatgaccgggcggttgaccgggtcgagaatgatggtggcgtcgggaaccatgcgcagggtggaggccgcgtcgatccagtagccgttccagccgttggagcgaagctgcggatgcacctccgaggtatagtcgccgccctggcaggtaatgatggcgtccatttgcataagcgcatcgaggtcgaacgcatcaaggagggtggagtcgcccttgccgacgttcggtgccgcctgtcccgcctgcgaggtggtgaaaaagaccggatcaatgtttttaaaatcgttttcggcctgcatgcgttccatcagcaccgagccgaccatgccgcgccatccaataagtccagttttcatttgttcgctctccttggcttcgtgaagccaggatcacgaagcagttatcagttgttcgttattggttattcgtgggggagggatccgggagatgttttcctgttaacccgtaactaataaccattaactgaaacggcaaggccgtttctcttcaaagggcagggacggtatttgatttgaaatcgggatgcaagccggtattgcttttgcccgctggaaacggcgcggagcactattggcattggcttacggttttttcctgagacaacccgttcggcagagcaggcgggacgcctgcgcagactgttgaccaaccttaggtgtagggcgtgcctctcgaagagggcgcgctatcctccagaataacacggcctttgctgcgcaaagaaccgcgttctacacccgttgcataaatgccggactttatcaacaaactcagcaggcgggacgccttcggtacaattgccgttacgcccggtatctgactacgggcagtgcggtcagcggcgcctaccagttcgatgccaccggcacgaccctgctggcggtcgaccgcgatgccgcggttacggcctacggcacggtctatgtgctgccgacggaggacgagtggtacaaggcggcctacctcaagtcggatggcagcgcctactcgctctatgccaccggggattcggttcccggcgtagagacggatgcaaactatgacggttacaacggaacctactccacaccgtgggatgtcggcacgggaggagtcgccgaaaacaacggcacgttctatatgaacggcaacgtctgggaatggaacgagagcgcgtatgacggaacactcgacgacatggctgagcttcgtgtggttcgtggcggggcgttcagtgtttctgagctcggcctgcgttcatcgactcgccactcttacagcccagagtctgagagctaccttttcgggtttcgcgtcgcggcaattccagagccgtcgagcatcatgctggtgggggtggctggcggcttcgcgttgtttatccgcagaaggttgatggtgtaacctttccgccgccgccctttgggcttcctccttcgctaaagctacgacggataaaacggcggacaaggtgtcttttttggaggggtggatgctgtccgcccgggagctgaggccacgcccctccacgagcgggagaacctggggcgcggagcgacccggttttttttatggttcatgtcccattttcggggagaatgttgattcgtgttgtaggacgtggctctttacgaagtaaaggccgcgtttccctgaggtggattgcaagcccgttgcaagcaaagaggctcgccctacaccatccattgcggaaatcaatcctcgattttttagttgtgaattaactctgttgctttgtgtcccttcctctggctggggaaacgtacactataccgggtgggggggggctgcctggtgtagagatcgcttgcccgccatcgccccgaggcgatttaatttgtaaagcaaccggaagcagctaatgtccgcggctcttagaagcgagaaggacagtttatgtggatttggatggggttggtttcgttggtttttctgggggtgtacgacctctgcaagaaacagtcgctgaaccacaatgcggttttgccgaccttgttcgtctcgaacatggccagcgtgttgctcgtgcttcccgtcgtgttgctttcccgtttcgcgccggccctgctggagggatcggttttccaggtcgccccgatgccgctggagtggcacgggctcatcgtgatcaaatccctgattgtggggacttcgtggacgtgtgcctattttgcgctgaagcatctgccgatttcgatcgtgtcgccgatccgcgcctcgggcccggtctggacgctgttcggggccatcctgattttccatgagcaaccctcggcgatgcagtgggcggggatggtcctgatctttttctgctactttgtcttttcgctgctcggtcgggaggaggggatccatttccatcgcgacaaatgggtggggatgatctttttcgccacgctggtcggcacctgcagcacgctctatgataaatggttgctgcaacaggttggcatgagttccatccaggtgctggcctggtatttcatctatctcgctgtgtttttcaccctgctcaacggactgctctggtggccgaaccgcaaaaagaccaccccgttccagtggcgctggacgatgccgt

SEQ ID NO: 1932 - DNA, 5240 bp, synthetic construct
  misc_feature 1..5240: note = Synthetic
  source 1..5240: mol_type = other DNA
attgttttgatttttgtccagcgtcacttcatcgaggattgtgccgggcgtcacgatgcgtgttacttcgcgcttcacgatccccttggcttcggaaggatcttccacctgctcgcaaattgccactttcacgcccgctttgactagtttttcgagataccctgcggcggcgtgataagggatgccgcacatcggtgtcgtgtgccgtttggtcagggtaatatcgagaatatccgacgccaccttcgcgtcgtcgaaaaacatttcatagaaatcgcccagccggaaaaagagaatcgtatcctccggtaactcgcgccgtatcgaccgatactgcgccatcataggtgtttccttcttcgccataacgttccattgaaattaaaagaagcattctatcgcgcccagaaatcttcgcaacgataagggaataataatttcgagatagaatgattcttccagcacgaatttcttctatttgttcaaaggggacgaagaaaaacaagcggaaggctagttttaaaaaataaaaagattatgctgaacccgttcggtggatgtatgcataaaaaaccccgcagaagtatgcggggtggagggacaagcccttcggcatatagccttattgtgaaatgacagttcaaatttcattcactagggagtgtttagattttttaaggaaacgagtcaattaaaacttgcgaggatagaaaatgggaaaacggattctaggattggacttgggaacaaacagtattggctggggtgtggtggatgatttgggagggggccaattcgaactggttaagcgcggggttcatatatttccagaaggcgttaaaattgaaaaaggaaacgaatcttcgaaggcggcggagcgaacgggatatcgctctactcgacggttgaagtttcgacggaagcttcggaaaatagaaaccttgaaggtcttatctgaggcgggcttttgtccgacgttgagcgtggaagagttaaaggcctggcagtcgaaaaaagtttatcctgaaaatctagcctttcgtgactggtgcaaaacttctgacccgaaagacaagaataatgggggttttgaaaatccatactattttcgttggcttgcggcgacccagatgctgaatctagatgatgaaacggatcgctttaaactagggcgtgtattttatcacatggcgcagcgccgaggctttaagagtaaccgtctagattcaacccccgagagagaagacggagttgttaaaaaagatatttcagaactctcagaaaaaatgaatgggcgaaccttggggcagtatttttgggaggagtgctatcagaaaggggcgaaaattaggaaggtacacacttcccgcgatgatcattatttggcggagtttgaattcatttgtgaaaagcagggagtttcggatggattgaaagagaagttgcatcgagccatgttttatcagcgtccgcttaagtcgcagaaagggttggttgcaaagtgtccgtttgagcctcaaaagaaacgtgctccaagttctcatccactgtttgaagagtttcgaatgtggcagacgttgaataatataaaaatcaagacccaggatgatgatgctttgcgtccacttacagaggatgaaaagacgttgattcgtcctctgttttttcgggtcagcaagtcgcactttgacttcaaagatattgccaaggccatattgaagtcgttgaaccccaaaaaacagaaacatgcatacgtcaaaagccgagatgcatccagtgcgcacgttttgtttaactaccgagatgaccattcggtttcgggttgtcctctttcggctggattgatgaggttgttcggcgacgactatacacaaggcctttttgatgcctactgtgggaacaagcaggacaaggtcggcaactcaaagtctaacgaggatctcctgcatgagatctggcatgttcttttttcgttcgacgatgcggagaaggtgaaggaattcgccaaagcaaagcttgggttggatgaagaaggggcagagaaattctcaaagatcaaggttccgcagggatacggggctctgagtttgaaggcgatcatgaaaatattgccctatctcaagcaggggcttctgtactcgcacgccgtattttttgcaaatctagatcaggttattggtgtttctgccaatgaaaatgaaagcctcaaagcggacatttcaaagttgattgacgagcacaatcagtacagtgctgaagcgcgttgtgtgaatgaattcattcgggaatataaagagagtccgcaggcgtttgaggcaaagtacgaccttcgaaatgtgcagggttttgaaggggaattatcaaaagagctgcgtgattcttcggagagtatttgccaaaagattcgtattcaaacttcgggaagcaatgggaatggtgaatatacccctgtgaagcggttggatgagcgagtaggggattatttggtgaaagaatttggggtttctacccatgcgcttgagcaactttatcatccgtcggccattgaaacctacaaactcgcagaaaaacatccagatggaaaatactatcttggagacccccgtatttcctccattcgaaaccctgtgtttatgcgggccatgcatcgggtaaaggcagtggtgaatgaacttttgaaacaagaggttatttccgagcagacgcaagttcatgttgaaatggcgcgggagttgaacgatgccaacaaacgggcggcgatcaagaaatggcaatggaataacgagaagaggcgcaaagagtataaagcagcaatcgaagaggttttatcagggcaggggatcgatcgggaggcttctgaggacgaaatcctaaagtatcagttgtgggaagagcaggagcatgtgtgcgcctatactggagcaacaattaaatcttctgattttattggagaaaatccgcgctttgatattgagcacaccatcccgcgcagtcaatcgtgcgacaactcgcaggaaaacaagacattatgcgaccgagaatataaccgcactgtgaagaaaaaccagattccgtttgattgcccagattatgaaaagattctacaacgcgttgaacattggcaggatcgagtggatgaactgaataagctaatcgaaaagcaacgacctaaaagtaaatatgcgtcaaccaaagaagctaaggataatgcgattcaaaagcgattggtctgggagttcgagcgaaactacctgcgcgaaaaatatcgtcgattcacgatggaagaagtgacccgtggttttaaaaatagccagttggtcgatacgcgtatgattacaaaatacgctcgcctctatttaaaaacggtttttccaatggttcataccgtaaacggaaaaacgaccgatgatttccggcgctgttgggggattgaaaaaagtcgggataatcatgcgcaccacacagtcgatgccatcgtcgtcgcctgtgtaacgcgcgatcaatacgacaagctggcacattattatcacgagtacgaaagctatgggcagaacgatccttccattcctacaaaacctcacttttataaaccttgggaaaccttcacagaggacatgaaaagcctgaaaaacgaaatcctcgtttcgcattatgcgcctaatcatttgctcaagcagacgaagaaacgagctaaagtacgcggcaagatggttatgcaacaaggaaagacggctcgtggatcacttcatcaggaaaccttttatggagcgattaagcgaatggagaaagataagaagggcggggtggaagaggttgtaaaatatgtggttcgaaaaccacttgcagatctctcagattccgatttaaagaagattgtagatgatcgtgtgcgggaaatttccattgcagggcgcaaagaggaatcacggctgaaaaaagaaatcgaggtcttggcgaaaaagaaagcaacatctgatgaagtgggcgagcttgtaatcgaacagcagattcaatcattggaaagtcaattatcagggctctttgcgctaccgaataaaaatggaaatccaactccgattaaaaaggttcgcatctatagtaacttgaccaatcccatcgagctcaaggctcagagggatgtctctataaaaagacccgcgtcacataaggagaagtattatgtgaataatgatgggaattatattttggctatttatgaaggggaaaattccaaagggaaattagttcgtaattccttgattattgaaaatttaaaagccgtaaatagtgagagaggaagtttggttcctgctgaaaaagaggggcttcctttgaaatgtataattcggggtggaatgcttgttttgttactaaaggaagacgagaattcatccgacttttggaatatgactcatattcaacgtgctgggcgtttgtatatcattcgtggtttggataatgacgggatcaaactttattttcatcaagaagctcggcagacgacagaagtacttcaacatatgaataatgtgattactgaatcaaaccgtcgaaataatatcgttgataaaaagggagatttaaaaataagtaaacttacaactccgaagggtggagatgtgttggagcgcagttcggacttcccatatgtgaagtttaggccgtcaaactttaatgcactacttgaaggcgttgattttagaattaatgcgcttggtgatattgaatttatggaagaataactatgctaaagcgaaccgtatacttcgagtcggcggcgcatctttcattcaagaatgggcagttggtgtgcacaccgaaaccggaaggggaagtgcgaacggtaccgatcgaagaccttggttttgtggtgctggacaatcacagtattacgctatcgcttcgtctcattgaggagttgacagccgttaatgcggccattgtattttgcgacaagttgcaccacccaacggccatgagcgttcccttttctgggcatacgacccatgccgaaacgctggccgcccagttggagatgtcagagccgctcaagaaaaacctttggaagcagacggtggagattaagatccgaaatcaggcggccatgctggaaaaaacgggatccgatggggtgggcgctctgcatcgctatgcgaggagcgtgaagagtggtgatcccgacaaccgcgaagggacggccgctcgaatctactggcaaaacctttttggcgatgactttc

SEQ ID NO: 1933 - DNA, 23219 bp, synthetic construct
  misc_feature 1..23219: note = Synthetic
  source 1..23219: mol_type = other DNA
ccaagtgttcggtgaacggccccccaagcgattccaccaagacacagaatggactcccaaggacggtcgttgagaattcgaagcaagtaagcgttacagttctcgatctcggaaggcaagggtttgttgtcgggtggtgcgcaatgacaggtagccgccatcaaagcgcccgtgagcttcaaaccgtccgaggtgtcgattgattgaggttgattggcaactcctgctcgatggagtgcggcaaagagccagtctccgctccggtctcccgtgaacatccttcccgttcgattggcaccgtgagctgccggtgcaagacctacaatgagcctcgttgcctgatgatcgccaaaatagggaaccgcgcgggcccaatactcctgatctgcaaaagacttccgcctctcacgtccaatcagctctcgccattccaccagccggggacagagccggcatgcgatgatctctcggttgtaagtctcaattcggtccatggttcgcctttcgctcaagccatgattgtgccttgtttaggggaatcaaatggaaatcgatcggcactgcttcgctggcttcggatgaagaatcgtgaacgactcttcaccatgtaaacttcagctatgccggtttacgaatacgagccaaagaaccacgactgtctcatgtgtgatggtcgagtagacgtaatccaaagcgttcacgatgagccgctcatctattgcccatcttgcgggctagaagtccgccgagtcatcagtcgtgccacattcaaattgtctggttcaactcccaatgacaaagcaggtcgcaaagggttcactactttccgaaaggctgagaagggggtttgggaaaaagtcggcggggaaggacctgatatcttggccgggaccaaggaagatatcgctgctgttgaagccgaaaaggcacccgcaaaaaaggtcctggatctcgacaatctgcccgattaattaattccgagcgactcttcgaatccgcacatcacattcatggcgtggatcccttgggcagccccgcatttcccgtcttgggatgctagaacccgaatagtcaaaagacttgtcggttcatcgatcgcaagtcccagccggtaaagggcaaacggctggccaattaccaagtttcgatcccagaccgagccttgatcctttcgaacgtaaaaggatcgctcataccgttcgtcaaaaagaccgaacaaatcctcacgttctacggaggaggggatggccaccatcacggttgccgcgagcactccatccaattccaccggttcagaatggagagcaaagccgcctgaccaacccacccgcaacaaggcagactctaattctgcttcgtctgcgactgtgttcactatgattgcaggagattctgcgatcaaacctgcctgagctagaggagccagtgcaatcagcgccaaggtggctgccggacttgggattgacaacgcgtcagcacaaaccaacggattgttatccatgatttcaaccaggccatacaactcctgggtagcgtcacccaccaagactctacgattccaggccccaatgctaaattggatccctgtttcgtcacttttggtgactgattgaatccgagggtggctttccagtaaccgtaggatggctggggaaccgctcgacgctatcactgctggtgccgattcgctcaacttcgagtcatctttgaaaagattcgaatgagacttctttcgccgccagtcatgctgagcttgaagtcgttggtgtagagcgttccatctttaaccagcaaagtcatcgttccactaccttgagcaaaaccgctgagctggtaggtgatcaccgcaacttgatttccgtttgaattcttcaagccctggaaccggtaaacaccgttcaaaactgccatcgaaccaccaatattgaacgggcgagaatcgtgccaggatgttcctatctgaattgcattctcaggaagcgttgtccctatgttctgtttctggtcgcttgctccccggttgcgtgagtctagattaacaagcgttgactgctcaggctgaacaaccgtggatccaactttcatcgcacccatggtcaacttgatcgaggaagtacccttcttcttgtctaacacaaccagggtaataggaacctttaccgtcgtaccagcggccgcattgcctttgttgtcaacaccgctcacggttgaaaaccgaagcacttgccccttttggtagttgactcggaacttatatcccgagccaacttttgtgatctgcgcatgagagatggaggctaaaccaactccgaagacaattgcgtaaccaatttttgtgagattcaaatggaattcctacttgatacttactagatggacgctgtaagtcacaacgttcgcgcgaagcttctcgttttgcaaagtcatggttaagcctggtggaacgcgaacagttcgttcaccgcccactttcataccaaccagagcaaggtcgaagccccggacgttcgtctggtccgctccaatcttgaacgacaaaggctttccaaggtctttagtggtctcttgcaccgcgccgtttgccttcgcttcgtattcaaccgatacggtgtcgcccttctttgcctctctgccggttccctctttcacgtccgaagcggaaacaacgtcggcatccttggctttgagcatgtcgacgagttcaacatcaaagaacaggtccgaatatggcttgatcttgcccatgtcgtgatcggcataacccaagctgtatggaatttctaggtggcgcttaccaccgagcttcatcccaaccagtccttgatcccaacctttaatgacactgcccattccaacggttacgtgaaaggtttcgggcttcttttcgttgctatcgaagacggtgccgtctgcaagtttgccggtgtaccggacccaaacttcgtcgcctgggccaactgtttcgcccttgcctgcgacgacgtctttgatcccgagcttttcgagatgtttaacggtcgttttaggtcctgatgtattatctgctgaagcttgggagccagaattgcatcctgccgcaacgatccctgccgcggcgatcagaaacgcaaattgaaatcgcattgttcaaatctacctttttgaagtgatttgaggcactattcgcctcatgccagacaacaggttcccgcgaaaagaagttcccgagcagtcgttccccgtggaatcaccggctcggagaaccttgtcacggtaaactcaaatcctgatggcagctaaaggagacaaaaagaaaagtgaagctccgcactcgatccagaatcgacgtgcgaggttcgactacaacatcttggaatctcatgaggccgggctcgccctcttgggttctgaagttaagagcctgtacttaggcaagggacaccttaccgatgcttattgccgcgttacaaacggtgagctttggctgatgaatgccgacatcgaaccttacgagaaagcaagcgttttccagcacgaacgccgtcgagatcgcaagcttctgatgcacagaaaagagatcaacgttttggaaaggaagtccctcgaaaaggggctagccctcatcccgcttgctctctattttaaagccgggagagtaaaggttgaagtcggattgggccgaggtaaagccgcttacgataaacgagacaaaatcgctaaagacgacgaacgtcgagaaatcgagcgcgcaaagtcgttgcgattctagagactcactggccgctaactgcggccaatgaaccatgaaaacatcaagcttcgattgtgccttcgaagacagtttcggccgggccggtcatcatgactttgccatcttcttgatattcgatgttgaggatgccaccgggtagcttgatttccacatttcggtcagatcgacccgtaacgaaggcggctactgcgctcgcacaggctccggtgccgcaagcgagggtaattcctgctcctcgctcccaggttcgctgaatcaaatgactgcgatcaaccacttggataaagtgaacattggtcttcttcggaaattcaggcgaatgctccagtatggggcccaccacctcaagattcactttgctaacatcgtcaacgaagattacaaggtgtggattacccatggagaccgcggtccccttgaaaccttcagcgactggctgctcggtaaaagattcatccgcatttcctgtcattccgatcgtgccacgagtcagccttgcgtggcccatatcgactcgaaacttatcgtctcccacaagatcaagttgaagaatgccggctccggtctcaacttttacgctcgtgccgtccaagtgaccatgatcgtgaagcagccttccaaaacatcggatgccgttgccacacatctcgctttcggaaccgtccgggttaaacattcgcatccggaaaggagcttcatcgcctttctcaagcaaaatcaatccgtcgccgcctatcccaaaacggcgatcattcactttctgcgaaagtgcggcgaggtcagctggcaactgagaatcctgaatgcagtccacgactacgaagtcgttgccaatcccctgcatcttagtaaattgaatcgtgctcatattttcgataacctgtcaccgggtccgcggaatttattccgcataaggctcccggaattcattccggaaaccacccaggtgtcggattaaaatccttacttagccacaaagctttcgactattttgtagaccggggatggttcatgccccgattttgcttgcgatctgttgaaacttcgtaaatcggcgtcaagctttacaaacaaaaccgcggcgcaaaccatccacggtctacaaatacttggggatatgatactttcccgactaccttttgcttcgtaatctggcttcgagattttaaaacaaaaccgcggcatgaaccatccgcggttgacaaattgcttaggcaagtctcggccagcgaaactcgcccctttcgtctaatgctcttcagtgccgtctggtgctcgataggagctaatcggcttgttgggcacgatactcgcgactgcatgtttgtaaacgagttgagtaggttttccaggtgcgtccaacagaactgtgaacgcatcaaaaccccgaacttgacccctcaactgaacactgttagtgaggtagatcgtcacgccgatcccctcttttctaacctgattcaggaacatgtcctggaggttaatcgcttttgccattcttaatcatcacttccttaaaacattgcattacaaattttgatgctcccaatagagcgtcattcgcatcgaggacaaccaaattcggctccgaacgaagccatgttcgctgtctctttgcatattttctcgtatcagcgatcgttgtcgcttcaacttcacttaactccatttcaccgttcagatactgccaaatgggcttataaccaagtgcacgcattcccggatcatttggagaaaaaccagcttcgatgaggcgttggacctcgtcgatccaaccattttgcatcatctcatgaactctacgtgtaattcggtccgacgtttcgaaagtatcaggaatcacagcaagtttcaattttgagtaaggtggaagttctaccgtcacagacggccttggacaatgtaaccgttcgactgcgcgctgtacccgaacgcgatttctgtgatctatacgtgcgaaagcgtctgaatcgctccgttcaagctcagaaagtaacgattcgagagatctttggtttaactcggttcgtaaattcggatcgggcgctgccgacatcccggaatactcttcgaaaagagctcgaacataaagtcctgaacctccgacaacaatgacgttccgctggctttcccacatttcagccaacacggactgagcgagcgccacatattcaccgactccaaaatcttccgaagggtccttaatatcgataaggtggtagcggtctttgttgaccggtttggctgttccaatgtccatccctcggtagacctggaaagcatctccgttgatgaggcaagcgtcaaacttgtctgccagagcctctgcaagactcgtcttgccggatgctgttggacccatgactgccaacagaaacggttttcggttcgatggaggggatgccaaaagatttactaccgacctaacttccaaaagtaaaggaattccgcttatacggccaacaatcccgaaacttgcgcttcagggacctcaaaacaaaactgcccacgttccaccgggaacacaggcagtcgatgaggtttagaattcgagcaaggcgtgaatgggatagccgagaagattctctcgcccccctaagaatccgagttcgatcataaacccaaatccgcagactacgccgcctagtcgctcgaccaatcgaaccgctgccgcggccgttccgcctgtcgcgagtaggtcgtctacgatgtatgccttctgacccggtttgagtgcatcgacgtgcatctcgacggtattcgtaccgtattccagagcatattcctctgtaattcggtcgtagggaagcttgccaagtttgcgcgccatgacaaagggaactcccagttccagagcgacgggcaccccaaaaatgaaacctcgactttcaattccgacgatggcttcggccccattggctttcgcatcggctgcaatcaaatcgcagacttgttggaaagcagcagggtgttccaaaaccggtgtaatgtccttaaaaaggatgcccggcttcggaaaatcaggtacgtcgcgaattaaatcgcgtgcaaggagatcgctcatgactgggcgaggatacccgtctggaggcagtctcgaagctggtaatcgagctagcggctagaaatcgccaccgccgccagaatcaaatccgcctgaactgctgtcgaatccagagtccccacccataaaatcgttgccgccgccaaaagcgtttccgcttgagaaatcattaccgccaaatccggaattttgattgtcgaagtattggccctgattggacatcattgcaccctcaactgcgccaaaagcgatatctgaggcaatatccgccgctaccatgcccgcaatgaggggagtgtcatcttcaacaataacgacaccgggctcaacataggtcggtcctggttggtaataagtctgccggttattcgtggcagcccagactatcagcgcaataagtgccacaaaaatcaaaaccattacaagaaaaaccgtgctcatacaatctctataacgtttaaccaacccaaagggtggcaaaaatcaaagttcagacccactaaaagctggcgagaggacaagtgattccatgctcggagtgcgtttgtcctctcggcccgtctcatttacgcctaaggttcgagttctgcgcctggatcccagcctttctcgctggcacgcatcaacacttccaactccatatctcgatcgactcgaatttggcaggaaagacggaactgtccaaggactccatcctcatctaggctctgtcgttcggtttcacccatcgccggctcttcgcctttgatcgagactcgacaagttgtgcactttgcttgaccgccacagcggtgactgacatctacgccgttctgctcaagtgcaagtgctaatttggttccttctgggacttcaaaggcctcaaagccggttgcctgaatcttaaatgatttcatctcggcaaggttacttgaagcaaatgagtttttaaagctctccgtagtaaacactagaatcatggcaaccctacacgagtatccagtcgaagtcgcttggagcggcggaagagaaggcaacggaaccattagttatggcaacagcgggacatcggtcgcaattgcagtcccgcctgagtttcaaggaccaggaggcgcatccaaccctgaggaattattaacaagtgcgatcgcaggctgctacagcatcacatttggaatcattgctgccaatcgtaaactgccgattacaaatctcaaggtgaatgcaaccggagcggtcgagcagaacggagcgtcgctcatttacactcaaattacgatcaagcccgccatcacattggctgctgacgcaaccgatgctcaggtagcggcgacgttggacatggcgcacaaggcagataactattgcatcgtaaccaatgctgtacgaggcaaagtccaagtgactatcgaacctactgtggaacgagaatagcgttctttaagcgcgttttttaacaacgtgtaaacgtttgccgacacaagactactcggacgggtaaaacctatactcatgcgaaaaaagcttgttgtcggcaactggaagatgaatatgactcgcacgcaggcaactgcagcaattgagtcgcttgttctactcgtcgaccctaaaaccgaagtcgatgttgctatttgcccaccgtatctcaccattgagaccgtgacgaggctccttcaccaaagccatttccgagtcggtgctcaagatgtcttttggatgggtgctggcgcatttactggcaatgtaagcgcttctatgttggcagacgccgggtgcgcattctgcatcgtcggtcacagcgaaactagaggccgttttggcaaacttgaagtgactgcttcaacgatcccttacttcagcgaaacagacgaaacggttaaccttaaaattaaggctctcctataccaatcgattcacccgatcctctgcgtaggcgaaactttagacgagcgcaacgctgagcaaacggacgcagtcattgctgcccagttgaagggtgcatttgaaggaattgaaggggccgagttctataacggagttgtcgcttacgaaccggtatgggcgattggaacgggtaagacttgcgattctgcagaagctagccgagtttgtggattcattcgagcccaacttcgcgagatcttagacgcggatgcagcagattccatccgaattttatatggcggaagcgtcaaggcgtccaacgctaaagaactcttcaccatgcctgacattgacggcgggctggtgggcggcgcaagcctcgatccagaagagttcagtgaagtcgtacggagtgcgtgagcattcttgaatagctccgcaaagagcgtatcgtctactcggacagagatgtctgaagtcatgcagccccaggacgcaaacttcctggggaaggtcttcggaggcgcgatcctttctaagatcgacctttgtgcttatgcgacggcctcccgtttcgcggggacgatctgcgtaactgcgagttttgatcgagttgatttccacgagcccattgaagttggcgaactcgtcactttcgtcggactcgtctcgtttgtcggacgcacaagcgtcgaggtgaccatcgagattttcgcagagaatgtgatgcttggtacaagaaggcacactaacaccgctagggtcacgatggtagcaatgaaggaagggaagtcagcggttgttccacgcttgctctgtgagacgcgcgacgataaaatccgattcttagaaggcaagcttcgacgagaattgcgggcaaaacacaccgaagagcggaaaaaaatctacgctcagttcaacctagcaactgacgaagagttggatcaactcctcgtacttgagaaactcgcttagccggttcatcaaccattctgcgccctgaacgcggtaaagatttgatggccgtgcccctctccatgagtgcattcagtgaggctgacgagcttcactgcacgtcgagctaattgtgaggaaagggaacggactaggttgaaacggcgtgcttcctcttgtcctcaggtgcatgaggctaatcaaagtgaaaataggttcagcataaactaaaatggcccgttcacaaggaacgaaccaactcagcgcaaccgttttaccgaccactatacagtaagcggggaaacccgctgttcaactgcttttgttggagcagtcgaccattttctaatccatggatataatgttgcatgggtaaaccaaatgtcaagtccttatcaccttatatcattgggttagacctaggaagtaactccgttggctacagtgcggttcagactcaaggctgggagcaactcgaagaccccaccaaatttgggattttcctcacgggtagtcatgtttttgaagaagcgggtcaagacgacaatggtaagcggaccctcaacaaccaggagagaaggaggcatcgccttgggagaagaactctacgtcgtcgaattcagcgacgagatgatctctattccatcttcgccaacatcaaagcactgccaacagacgaagccgaacgtgatgcggtcctgaccaggcacacccatcagggtagaaatgttcaaccgttggttttgcgaacccgagctttggatgaagcacttactttggaggaatttgcaaaagcgatctgccacctgaatcgttgtcgtggctatttaagcacgcgtgatctcatggcaaacgacattccagcggcgtaccgcaaggaatcgcagtatgccgatgcggacgaagaagacgagcaagatgaagaagatggtgaaaaactcggcatcgtgctgggaggaatcaaggcgtcttacaaggccataagggatggtgaagccagaacttatggcgagcttatgaccaaagtggctgaaaatggtgtgtatacacgtcactacaccaaacgcttctccaaaccggcaaagaatgagaccgggcgaattccagagccggataccaaaaagctcccttaccgatccgatcgagcgctaatcaaagccgaattccatcgtattttcgacaagcaatcccattatcatcctgggattttgactcaggaactaagggtgaaactagaacgcatcatctttggtcaattgcctctccaagacaccgaaagccttcgaaaaacctgcccagcatatgaaggcagctactgcgcgcccaagacttctgatgcgttccaacgtagccgcattcttcaagacctgttcaataacttcgttgttggtacaaggccaaagaagtcgaaggcaaatgggcctgtcttcgaagttcagaatacgtttacagaagctcaactggcaaaccttttgccagaccttatggacggaattgatctcacgattgaggagatcctcaaacgagttggtcttcctgagggcgaaatgacggtaacgaaaaaatcgggcgtcgcgaagcggggcaaggtgtttggacatcagacgcggaggctgttaagagaactcacgaacgatgcttactccgaatggtcagcggaggataaagcaaaggttcaggacatcattaatagtgcgccgtggccaaacgatgcttataacgggctggttaggctcggaatcatggaggatcgcacttgcgcgaagattgcgcttgctccgtttccagccggctacggcgaatacagcactaagtttcttaacaagatttcagagcggatgattcagacgggcgaatacgaggccattgcgaagcaaaagctatttgttccgattcgtgaagagcgcgcaaagcgattaaaggagcaggatttgaacccggatgccgatgtggagattaagtccagcctcatcaaacttccaaaggacctcggactccgaaacccgattgttgaacgtggaatacgacgagcagtttgggtgcttaatcagttgatttaccgctacgggattccagagaagattcgagtcgagcttcctcgagacttaacactatcggcggataaaaagaagaaaatcgaagacgaaatagaaaagcaccgtcagagccgggaaaagaccatcacgagactcaaaggtttagggattgagccgacagacatcaatgtaaagaaagcacggctattggaggaatgcgactatacccttctgtacgaaaatgagaagacttcgtatgcccatctggacgagcttgaaattgaccacgcttatcctcggtcacgcctatatgtaaacgacaaccgcaatctcgttttgtgccgaaagagtaccaacgcaacgaaggggaaccagttgctctgggacttcctgggagacgattttgcgaggtttcaaactcgtgtcaaacagtgtaagaacatgagccgagggaagcaaagctggctctgcaagacggaggagccagatgaagagtggttggcaagtcagcttgcggcgaccggctacatcgctagagaactcacctcgattctcactcagcttggtgtcaaggtggagatcagctcgggtaaggcgacggcattgctacgctaccattggggtttagaaaagttgttccctgactggattggttacgcgaagcatatcaagaaaaacaagaaggatggagtagacgaggagttccgtcaggactcccggacgaagaatcgatccgaccaccggcaccatgccattgacgctttggtggttgctttgacggatatcagcacctttcagcagattagcagggcgcatcgggatttggcgcccggtgagtataaagttgattggaaccagacgtgccccatcagggagcttcgcaagttcatgaaagctcatttagatgatattgttgttacaagccataccatcaagaaggtgaccggcgaattacataagcagatgccacagagagaggacctaaagaacctgcccgatcatctgaaagtagggttgccgaagtctgcaataactgcaaatggcaagctgattcggtacgaccgtgacggaaaggcggcacaggtttatccactagggaacaaccatcacctgactatctatcgcagtttggagatagataagaaaggtgaatacgacttccatgccgaaattacgactatgatcgaagttgcccggcgattccgcaagaaagaaccagtttaccaagcaagtggagacttgcttcgccgaggctatgccaagtgggtaactcttgaaaagggtgaagtcgtggagtttgaggataaaccaggtgtattttatcgtgtgtcggcattgtctgcaggctccagttttgaggctgtgttccagctactctcagtcgctacaatggatgcaggccttagaaaccagaaatggaatggtcacgagcctatcttgagatttcaaagtttgaaaggagttttgcagatcacaaggaaagtccgactcaacgcttttggtgaagtggtccacgaggtcaatccaaatgaaaacccgcaatttcactaggttaaatgctttgatattgctttaccatctataggtggtaaagcgatctgtcgctattagtacaccaggattcttaagcattaagaaccgccaactcgtgcaagagcgggataggcaggtcgtgaataccgcaccgctagaagacctcgcgttgatagtggtcgacactcccgaggcttgttggacgagtgctttgctctcagagtgcgcagatcagggtatagcaatcgtattctgcggccccaagcatctaccgaccggcatcttggtgccgacagtcgggaatcacctgatggcttatacccaccgcaaacagcttgaagcaaagctacccaccaaaaagcggatttggcgaacggttatcacggctaaagtccaagcacaggctcaagttcttcgagacaataacctggacgatcgggccgtgcgagccgttctagtaaagatcaagagtggagacacaacaaatatggaaggcgttgcggccgcgcgctattttccggcgctattcggggctgatttcactcgagacgccgacgcggctggcatcaattctcggctgaactatggctacgccgttcttcgggcggcggtagttcgggccgtggtcttaagtggtctggacccgagcgtaggtatttggcaccacaaccgattcaatccattcgccttggccgatgacctcatcgaaccactccgcccaatggttgaccaaaacgtaatatccagtctgcaagcgtttcccgaggaagaggcagaactaacgccaacgatcaaacgatacttactacactgccttgccgccgaagtcgggtgggacggtgaccgatttccgcttgatactgctttgcagcgctactgcgctcaagtgcgagacgcgctagtagatggaggagtcgatgtccaatgtccgaccctgtaaacgtcaactccaatcaaggtttcaaagtagatcgcaaggcctaccgaatgagctatggcggggttcgtaatatgtgggtggtagccatgtttgacctccccgttgaaacaaaggaaatgcgaagttgttatcgaaaattccgggactttctactcaatgacggtttcataatgatgcaattcagcgtgtacgcaagattctgtccgaatcgtgagaatgccgaaatacactcgaaccgcattgaagccaaggtccccgccgacggtcaagtgagagtcattacgcttacggagctccaattccaaagaatgaagattttttctggaaattcgcgaagtgaacctgaggaagctcctaatcagctaagtttttggtaaaaattgccgctacgcgggtcccttggcccaggttcgctggactaagggggcgtagtttaccggattagaaaatggccgattgccccaacccaccgagcagcctggtcagggatgaagtaagtttaccggattagaaaatggccgattgccccaacggaaagaggcgttcacgatcccgatatcgaagtttaccggattagaaaatggccgattgccccaacatcaagcttacgacggccccacgcaaacttagtttaccggattagaaaatggccgattgccccaaccaacgggatctcgcagccgaacacttcggaagtttaccggattagaaaatggccgattgccccaacaggttcttaacctactcaaaaccggtttgaagtttaccggattagaaaatggccgattgccccaacacggttatactatccttagttacggttaagagtttaccggattagaaaatggccgattgccccaacgacccttgagcgcttggcaggtgtgaccctagtttaccggattagaaaatggccgattgccccaacacatgacagtcgatgtatctcttttccctaagtttaccggattagaaaatggccgattgccccaacatgtatgggctcgacatttgcccgtgtcggagtttaccggattagaaaatggccgattgccccaaccatgctccatgaggcgccatgctccatgagagtttaccggattagaaaatggccgattgccccaactggattcgggcggctaatcttagacaaccgagtttaccggattagaaaatggccgattgccccaacgttctcttcggcaatggccgggagtctaatagtttaccggattagaaaatggccgattgccccaaccagacggttaggaggaaatctaccacttgaagtttaccggattagaaaatggccgattgccccaacaaacgaacttcgagggacttaaccgtttcaagtttaccggattagaaaatggccgattgccccaacatgatgataatgatgataattccatccccgagtttaccggattagaaaatggccgattgccccaaccgatcgaagcaggcaagctgggaagccaggagtttaccggattagaaaatggccgattgccccaacattcaccttcattacctctctcggttcttgagtttaccggattagaaaatggccgattgccccaacctgggattggctaataagcatttcggacacagtttaccggattagaaaatggccgattgccccaacggactgctgactgggacggtggctggacaaagtttaccggattagaaaatggccgattgccctaacacgcaattagcgtataagccgcatatatcgagtttaccggattagaaaatggccgattgccccaacttagaactcgcacgatcgggccagggcggcagtttaccggattagaaaatggccgattgccccaaccttcccgtgccaggatgttagtgcagctggagtttaccggattagaaaatggccgattgccccaactggtagcgactttgggttctggccgatcgaagtttaccggattagaaaatggccgattgccccaacagccaggcggtctaactacgatgagaaacgtggctcgagctattctttcgaatgaccgcccaaaaaagtgaaggtaggcgtatcatagttgcatggaaccgtcccgtccagttcgtccgatgcgatatggaatactttcctttgcacttgtcatctgtatgctagtcggattcgagtacaaggccattgcggagcgtaattcgcatgaactcagtgcgaactacgtattaggctttccgcaacctcctaagggatggaaagagattcctcacggcccacagactctttttctataccgacaggccgacaccagggtgctcattaatggtgggatcaatcaaatggtagcggaagcaaatccaacgcccgaactaggcaccgagcaattggctgaccgcttgattgaaatgacacgtagaaatatgcccggctgggctgccgaaaagatgggagaagttaccgcggacggtgccaagttccgcctagttcggcggtctcaaaagctgctgacggtcataactgcattcgccgtgaggggaaacacaactattctgatctcactttcggggcgagacacccacgtttctgatgttgagaaggatatggatcagtttcgtcagtttctttcgagtgtgaaactgacgagaacagacctaagcaacctttaagtgccttatttgagcgcttcggcgccgccaacgacttccaagatctccttggtaatcgatgcttgacgctcgcggtttgccttgagagtcaactgttgaatcattttgcccgcgttgtcggtcgcagatgtcattgctgtcattcgcgaaccaaactcactagcagttgcttcaagcagcgactgccagatcaaagtctggaagtagcggggaaggagtgagttcaaaagctcggccggattcggctcgaactgaaacggaatcgtcttggacccacctgcgactactggagcttcgattggcagtagctgaacaatctgcggaacctgtcggatcgcggaatagaacttggagtagcagacataaatcgcgtctacttcacctgattcaaacagttgtcgcgaaattcgagtcacttcaaccgcgtcttgcactcgggcgccgctgctgggaacctgaagtgattgaacgacttcgtagttcctctttccaaagaactgagttcctttctttccgactgtcaacagtgcacagttgaattgagcttccttaatgaagtcagtggccttgcggatgagagccgtgttatagccaccagctagaccacggtccgaagtaaggacgatgatgcaagccttcttgacctctctcttttccatgagagggtgggaaggtaactcgccagcagccgccagcgagcccatcaattccttcatcttatccgcgtacggccgagcctcaagaacacggtccgtcgcccttttaaggcgagcggccgcaaccagcttcatcgctttcgtgatctgctggatgttcttagcggccttaatgcgcgctcggatctcttttagtgtcgccatgcttaactactagcccttgaactgaccggcaaactcctggactgccttcttaagcgtctcttcgacgtccttgccaagcgccttcgtcgttcgaatggtttcaaccacgtcaggatatttatcctttacgtacttgaggagaccggattcaaacgccttaacttgctggtttgtcaaaacgtcaagtacgccctggcttcctgcgtagatcgatagaacctgatccacaacgctcatcgggctagccaagtcctgcttgagaagctccgtcagacgctgacctcgaatgagctgattctgagtggctttatccaagtcagaagcaaactgactgaaggcagcaacgtcgcggtattgagccatttcgagcttcagctttccagcgacgctcttcatagccttgatctgggcgtttccaccaacgcggctaaccgagatacctacgtcgatagcaggtcggacaccggcgaagaagaggtcaggaacgagataaatctgtccgtccgtaatcgaaattacgttcgttggaatatacgccgaaacgtcgcccgactgagtttcgatgattggtagcgcagtaagcgaaccgccacccttctcatctgaaagcttagcggcacgctcgagcaagcgactgtgaagatagaaaacgtcacctggataggcttctcgtcctggcggacgtcgaaggagtagggaaagagcacgataggcttgcgcgtgcttggaaaggtcatcgtaaataaccaatgcatgcttgccgttgtctcggaaatactcgccaattgcagcgcctgcgaacggtgcgagatattgcatcgcgttcgagtcggcagctgaagcggcaacgattgttgtgtactccatcgcgcccaactcagtaagagtctggacaacacgtgccacgttggccatcttctggccgcaggcaacgtagatgcagtacaccggatctccgcccggttcgtgggtggatttctggttgatgatcgtgtcgatacaaatcgatgtcttaccggtctgtcgatcgccaatgatcaactcgcgctggccgcgaccgatcgggatcatggcgtcgatagccttaataccagtttgaagcggctcggtaactggctgtcgatcgacaacgccaggagcattcatttcaattcggctgaagctctcgccggcgatcggccctttgttgtcaatcggctgtcctagtccgtttacaacgcgaccaagcaggcccattccaacaggaagctcaatgatgcgtccggtctgtttgacagaatcgccttctttgatctttgtgtcgtcgccaatcaaaacgacgccaaccgagtcttcctctaagttgagtgcgagccccatgacgcttccggggaactcaagcaattctcccatttggcagtcgggaagtccgtacacacgggcaatgccgtctccaacttggagaacggttccgacatgctcgctgtcgatcgatttctcgaacttttcgagctcctgacggaggatgtctgttatctcttcgggtctgatgctggccatttaggtctctctgtgatttccctttaccgggtttcagctattgctgtttgagcgtgtcatgtctgagtttgtcgcgcagattgctcaatgctccgcgaatacttccgtccaaaatatagttgccgtaagcgaccttgactccaccgattaagttggaatcaactttgaattcggcttcaatcttcttaccaagaactgtttcgagcttcttagtgagtgcgcttctctgggaatcgctcatcgcttccgaggatgttaccgttgcaaaaacgactccgccatgctcgcggcgcaacttaacatattcgtctcgtacgccagcgatctcttcctcacgtcgcttgaccaacatgaccctaaggacctgcatggttaaagcggtgattcgatccgagaaaattcgttccaacgtcgcgatcttctcgtctcgtcccgtgtagggagcaacgacaaagtcgttgaacgaatcgtcggaattcaaaagtccgacgattaggttcaaatcgtcttcgacgcttaagaccgtgtcgtgtgcctgggcagtcgtgaaaagtgcctgagcatatcgacgacaaacgcgatgatcggccacggttaggaagccacctcaacggtctcgatgaattctgcgatgagtcgtcgattcttttcagaatccatgttctcgccaattactttctgcgctgccgcgagcgtcaaatcaaccacgtgagttcgaatagtagcgattgtttgattcttttcctgctcgatttcagcttgggctgatcgaataagggcatccgctcgatcagcggcttcgctcatgagttgctgacgcaaattctgagcttccttaatctgattctgaatcgtctctcgagcctctgcttccgtcttgatgaggcgagcctcatagtccgacttcaacgtctgcatctgaactcgaagctgttccgcttcggtaaatgtcgattccaattcatggttacgtgcatccatggcctctttaaggggcacatagaagtacatgttgataacggggatgaacaacaagaagacgccaatattggtgatcgtctttccaaggtccaattgcaggcccgcgaacatctccggacgagtccaagactgatccttgaccacaaagccaatgattataaagattgctccgagacctaaaagtgcgaatttgttcaaatgttcacctcatggtcctgaactgggttggtgttattcaaagattgcattcgatattccgatcaagcagagaggctgatcaggcttgaacctgatcagcaacatttgctttttagtggatcttgcccatgagcaggaagcccaaaacgaaggtgagaaggaagacgagctcaaggaagacgagcgcgagcaacattgagttgttgatctgctttcctgcttcaggctgtcgagccattccttgcaagccgccgtttgcggccagtccctgaccgataccgacaccaagacctgctataccaactgcgagtccaattcctattgcgatgttttccatttagtttaagtttctcctagtgagcgatgaaaagatttaattcttaggcgtgggcctctgtcaacgcgggttgatgaccatggtctccctcgtgctcatcgtcgtgaccgtgtgaggtagcgatcgacagataagtgcaagttaggatcgtccagacaaaagcctggataaggcacgtaaagaacttgatcggcaagagcaagccaccgatcggcacgccagcgatgattgaatcgaggctacttcgaacgatgtggccgccttcaatgttgccgtaaagcctgagtgagagcgaaacgagcttcatgcactcagaaacgatttcgactacaaaaatcaagccgctcaccaagatcatgaacccgcctaatttgggaccagaaaaatgcttgatgtggcccagaaggccgtttgccttgattccttcgtattggacgtagacaacggttataaccgccattccaatgttcaagctccagtcagcagttggagttgcctgaaggagcaaacccataatgttgccggtgaaaatgaacgtccagatcgccaaaagaaaggggacatatttctttccattgggtccgatcacgttgaccgtcattccttcaagaaagagataaaggtgttcggctaatcgagtcggtaaagaggtgaagactcgattcttaagatccttcttggccaatgttgcaaagacgagaacaatggcaaaaaccagaccactgtagaagaaaatgttccatccaatttctttctctgcggcctcggcaagcggaaggtttaattgctgaagtaagtccatgaatgcttcaagaggtcaggcgttagaaaacgaccggaaacctattaaagcaaagtataccatcccaatggacaggataaagcaaccgatacccgcccccgagaggcgagttccgaagaaaataaagacaatgaataacgggaatttgagaatccctacaagtaacgtacgctggactccttcctttggttcgggtttgaatttaagaagtgaacttgtaagcctccacaaggaatagaggttgaaaacggagaggctaacaccgagagcaatccccagcaaagcctgccccccgccggtaataccgccgatgacaatcaggagcgtcatggccatgacaaacaatcctacggttatgcgttgaccgagagttattgtttcgggccctcctggttgatcatccaaatcgcggacacaattcccaatacggatcccagtaaagatccgacaaccattccatagttgttgtgggtgtatttatcaaacgcccagcccaagccaaagccaacgaccatgctgccaagaagggagtaagccgcgctcattccaattcctaacccacggtaattataagagccgggtgtacccgttaccgtctttttcgcgggtcggtttatgttcatctcaggaacatcgggcattcgagacgcaacgggcccctgagttactttgtcgattttggcccgcagttccttgtcgtctggaagttccggtagctccatattcttcaggtcgtcccgaattttagagaaacgagcctggatatcgtcgtcactcggtaatttcggtttttcaggctgacttgaatcatttgccatgccctcagggtacctgctgatggaattgcctctcggaagttgaaatgtttatcgcttgaatcggcttcccattcgcttgaaggctcggtccaagtaatccgtctccggcatttttagggctcgagttacgaagaagtaaatccagccaatcacgcagaagacgaacccgaaggtaaagaataagccgatcttggaaatgtgttggggcacgaagtggaatatgccgtaacccgtacctgccatgactgcggaaccaagagcgcttttaatgagcgtggaaatgattcctgccttatcaagagttccaacttgcttctcaagtgcaatgaatagcgagatcaccaaggcaatggcagccaagttcgttactgccggtaaccctaggaagccgatcgagctctgctcgacaccgaaacataatccaataaacaacgccgtcatgacggtcccgataattactggacgggctgtttgatgaattgagaagaatccacgcatcaaaactggttgcatacaccaagcccagattccgagcgagtagacctgtaagcagagcgtaagatcgccgagttgcatttcgtgggcggctttgccgtaaccgtaaatcagattcacgatctgaggtgcaagggcaagcatgatcgcacttgccgggacgcttagatagattgtcgtccgcaaagtcttggagacctctgctcggtagagatccattctcttgttcgcatagaattgcgcgagagctgggaatgctgccaaagccaaggagtgtccaaaaatcccgagcggagccatcatcaggttattgccggagttaagaacggtattgattccagttgaatagtgagatccgaacttttgggtgataagttggcagacgctaggaagtga

SEQ ID NO: 1934 - DNA, 15408 bp, synthetic construct
  misc_feature 1..15408: note = Synthetic
  source 1..15408: mol_type = other DNA
cgataccgagatcgacccacgactcgacgccctagacctcaccagtccaagctgcggcttcacctggtaccccaatgtcacccgcatcgagctcctcatcctctccctgcgccacatccacggccacctcggtcagctccacgaaatcctaatcgcaaacggcgaagacatcgaatggctcggacaggcaaggtagcccatactcgaaactccccagaattggggagtcggtaagcgatagcgaaccggtggggctgttgtaatctcgtaccaaacaaggaaatgacccactccaccgacgccgaactcctccaagccgcgaaagacctcctcggtcaacacattgtcatgcccggcttccgcgcccgaatcgtcgaaaccgaagcctacggccctgccgaccccggctgccacgcctaccgaggtgtaacccccagaactcaagtaatgttcgacaagccgggacttgcctacacctacttcacctacggcaaccactggatgttctgtgtcacctgcctcaaacccggcaccgccggagcaatcctcatccgcgccgccgtccccatcgaagggcacgaagaaatgcgcaaaagacgccccaaagcaaaaaaagaccaagacctgctgaacggtcccgggaagctctgcgccgcgctccaaatcaaccaatcccactacgccctcgacctcacccagtccaacggcaccctctggctagaaaccggcgagcggccccggaagattagaactggcacaagaatcggcctcgcccaaggcaaaggcgatctcctcccatggcgcttctggtccgccgaagacgaaccccacgtcagccgacccctaacaaacccctaacaaacttccaagtaatccttgtccggcagagcagggaagggagccgttggcaacgtctgataccaaaacgccaccgaagcaatatcatcctgcaaaggcaaataccgcccgcccgatcgccatcccaacgcctgaatcgtcacccgcaaatccgatgcgaaccgtaccgggtcaacaatatgccaccggtacatcccaaaccgcgtattcgcctgatacgtcccatccggacgcagaacctgcggaagccccgcatagggcgtcgtaaactcctgatactgcccgccaacgtcaaagttgtacgatccgcagaagtaatcttccgttcccgtcccacaaatcgtcggaaactcgcgatccccgtccataaagaacttgatctcgccctcgccccaccagccgttgttgttcacaccccacgccatgtacgtcccaacgtactgcccctgacccacaaccccgtccagaatcgtgtaatcctccttgtaaggcagcgggttcgtccgccggaactgagcgtgaaaatacgcacaatcctccggcacctcggtcaacgtgtaattcacctgatagtagagaatcaagtccgtcgcatcgatatttgtcaccgtcatccggcaccgcttccgaaaaggcatctcccagtagcagttaaacgcactccctgggttcacacaaaccgcaagcgacgaaacctgtgcgtacttctgccacccgcaagcaaagaaatcccccatcggacactccaccgaaggctgctcctggtcgtcccaatagatccgaagaatgctaaaccgccaatgcccaatcggcgtcatccacatctgctgaaccgcccccgatccctcaatgttcgcgatctcaaacgtctcgcccggcccaatcttcaccgaaggcgaaaccttccacccctgcccaaggtcccgcgcacacttctcaccggtccccgaagtagccatcccgcccttgcccttctcccccgtaaaattctccggcgaaatcgaccgcgtcaaagcccccgaaacccgagacaaattccccaaacccatccccaacccgttaaaactcatcgtgaccgaacattaccccgatgccccgtatcgaagcacctccaacacaaccacataaaacagcgttcccttgctcgcgatgcatcggtaactgcccaaccgcaaacaagaccaagtgtagggagaataagccagggtctaaaactaaaatggcccgctcacaaggagcgaaccgacttcagtgcaaccgttttaccgaccacttaaacagtaagcggggagacccgctgttcaactgcttttgttggagcagtcgaccattttctaattcaatgaagatattatgttgttatgagtccggaagtcaagtcctattccgaatatatcctttctctcgatttagggagtaactctgtcggatatgccgcaatccaaacacaaggctgggacactctagaagatccgtcaaaattcggcgtgtttctcaccggaagtcacatcttcgaagaggccggtgaagacgacaagggaaagcgcaccctcaaaaaccaagatcgacgccggtaccgactcggaagaagaacgtatcgccgtcgcgtatatcgccgcgaagagctatacaaaatcttcagccagctaggcgctctcccctcggacgagagccaacgagacgccgttctcacccgtcacacccacgaaggcagaaacgtgcaaccctgggtattgcgcgctcgcgctctcgatgaagcactctcgcttgaggagttcgccaaagccatctgccacctaaaccgtcaccgaggctatctcagcacaagggacctcatggccgacaagattccggctgagtttcgtcaaaagtcgcagtacgccgaagaagtcgacgaagaggcagaagaagacggagaaaagcttggcgttgtgctcggcggaatcaaagcctcatactccgccatcgcctcaggtcaggccagaacgtatggcgaactcatgatgaagattgctagtgacggaaaatacacgcggcactacaccaagcgattcgacaaatctcaaaaggacaagacgccagaacccgaaacgaagaagctcgtctaccgttccgaccgcgccctcatccgagcagaattccaccgcatcttcgacaagcaatccaactatcaccccgcacaactaacccaagaactccgcaagcagttggagcacatcatcttcaaccaaaaggaactcaccggatccgaagataagcgaaagccctgcccggcctacgaagcctcgctttgcgcccccaaaacctccgatgccttccagcgcagtcggatcgttctggaactgttcaacaacttcaccgtcggagacaagcccaaaaattccaagttggcggtcaaaaccaccctgcttcgccacacctttagcgccgatcaactgtcccggctcctccccgacttgatggatggaatcgacctcaccgtagaagaaatcatctcacgcgccggagcagatcaaggtgaaatcaccctcaacaaacgatccggcccaaagaagtttgagaaagtttacggacatcagacaaggcgtcttctcagagaactcaccgaaggcgcatacgcgaactggaatgatgaaaccaaatccaaagtccaagacatcatcaacagcgcagcctggccaagcgacgcctacacggccctcatcaaacttgacatcgccgagccgagcgtctgcgccaaaatcgctctcggtccctttcccgctggctacggagggtacagcaccaagtttctcaacaaaatcagcgagcgcatgatcgaaaccggggaatacgaggcaatcgctaaagaagagttgttcaaaccaatcattgaagaacgcctcaaaagaatccgagcagcagacgtcaacgtgctacctgacgaagaatctcggacttccctcatcaaactccccaaagaccttggcctccgaaacccaatcgtcgagcgagggattcgccgagccgtctgggtcctcaaccaaatcatctaccgctacgggctgcccgagaagattcgcgtcgaactcccgcgagatctcacgatgtcggctaagaacaaatacgaccttgaagttgagattgagaaaaacagaaagggtcgggaagccgccattgtaaggctaaaaggcaatgggattccagtcaccgataagaacatcagaaaggctcggttgtgggaggaaagtggaggaatgctgttgtacgaaggtaaaaatgcccccttttctgctctggaagaattggaaatcgaccatgcctacccacgctcacgtctatacatcaatgagaaccgcaaccttgttctatgtgaaaagtccacaaatgcggctaagggagaccaactgctctggaattttcttggagaagactttgccaagtttgaaactagggtgaagcagtgtaagaacatgcgttcgggaaaaaaacgctggctttgcgaaacaaaagtgcccgacgaacagtggctagccagccaactcgcagctaccggatacatcgcccgagaactctccaaaatcctagtccaacttggcgtcaaagtcgaagtcactccagggaaagccaccgccctgcttaggtaccactggggactagaaaaccttttcccggcatgggacagctacgccgagcatctaaaatccggtggggccgaagttgatttctctccttcgccgaagaaaaaagatcgctccgactgtcgccaccatgcgatcgacgcccttgtcgtcgccctcaccgacgtccggacctaccagctcatcagccaagcccataaaaatctaaaaccaaatgaaagtctcaaatggggcgaaacttgcccaattccaaacttgagaaagtacatgatccaacacctcgacgatatcgtcgtcacaagatacacaatcaaaaaggtcactggcgaactgcacaagcagacacctcagcgagaagatctcaaaaaactcgacgaggcgctccgaacgggcgaaccccgctcaactaaggtcgcaacaggcaagctcatccgctatgaccgcgacggcaaggccgcccaggtttatcctctcaaaaacaaccatcatcttactgtctacaggggtcttgagccaaataagaaaggtgctttcgagttcaaagcagaggtcacgtctctcatcgaagttgctcagagagcaaagaagaaggagccgatctaccagcactccggcgaactcgctagccggggttttgcgaagtggatgactctcgagggcggagacattgtagagtttttggatctacccggcgccttttatagagtacggggtctgtcacttggtgcggcatttgatgccgagtttcaactcattacttcggcaacaatgaacaaagcgctgcgaggtaagtcttacaaggatcagcagccgctggttaggctacagagcgtttctaaactcggtgccatcgcgagaaaagtacaactcaacgcgttcggcgaggtgatccacgaagtcaatccgcacgaaaacccgcaattccactagccacaattggtgatttaccgctttactatgggtgcgtggtaaagcggtcgattgccatcagctctggcggatttctctgcgtgaaaaaccgccaactcgttcatgagcgggataataagcctgtcaacaccgcacccctcgaagacctcgcgattatcgtggttgatacgcctgaagtttgctggacctctgcccttctttccgaatgcgcagaacacggaattgccattgtgttttgcggcgcaaaacacctaccttcgggaatcctcattcccagcgtcggtaaccacctgatggcgtacacccaacgcaggcaacttgaggccaaactaccaaccaaaaagcgcatctggcagacgatcatcaccgccaaggttcaggcgcaggcaaacgttctccgtaaaaaccagagagatgactcccacctcaaaaggctcctcccgaaaatcaaaagcggcgacaccacaaacgttgagggcgtcgccgccgcccgctactttcccgccctctttggcgattgctttatccgcgaccctgaccttgaaggtgtcaactcccggctcaactacggctacgctgtgatgcgggcggccgtggttcgtgccgtagttctcagtggactaaaccccagtgtaggaatctggcaccacaatcggtttaatcccttcgctctcgccgatgacttgattgagccgcttcgaccgatcatcgaccagagtgtcgtggaaagtctgagtgagttttcggcgagggaatcagatctgacgccgccgatcaagcgccacttgctcaaaattcttgccgccgaagtaggctgggatggagctcgctttcccctggatactgcgttgcaacgctactgcgcccaagtccgggatgccctggttgatggaggaactgatgtccaatgtcccaccctatgacatttcagaaccagcccaaaaaatttcgaatgatctacggaggcgttcgtaacatgtgggtcgttgccatgttcgaccttcccgtcgaaacaagcgaaatgcggagttgctaccgcaagtttcgcgcgttcttgctcaacgacgggttcatgatgatgcagtacagcgtctatgcccgattctgcccaaaccgagagaacgccgagactcactccaaccggatcgaagagaaagtccctgaagacggtcaagtgcgagtctttacgctaaccgagctgcaatttcaaaaaatgaaaatattttctggaaattctcgaaaacccccagaagatgcccccgatcaactgagcttttggtaaaaatcgccgctacgcggaaccatcagcccaggttcactggaccgaggggcgtagtttactgaattagaaaatggccgactgccccaactcgtaccgtagtttctcggctggcgtacatagtttactgaattagaaaatggccgactgccccaacacggagcgtcttatatggcgattgccgagaagtttactgaattagaaaatggccgactgccccaaccgcgtcaacagttctacatggctcggcttcagtttactgaattagaaaatggccgactgccccaacgaacggcaagtctacgctgatcgaccttaagtttactgaattagaaaatggccgactgccccaacaccaacaatgattgaaccgtcgcgttcgacagtttactgaattagaaaatggccgactgccccaacgggttaggcgtaggtgttcaagaatgccttagtttactgaattagaaaatggccgactgccccaacaccgtcacgggcttctgcgtaggtgtagaaagtttactgaattagaaaatggccgactgccccaacggaaagagtcagcaccgcgcacccttcacaagtttactgaattagaaaatggccgactgccccaaccacccccccctacaccccgtcagccccggaagtttactgaattagaaaatggccgactgccccaacgaagcctaagcgcgattagtgccgaacttagtttactgaattagaaaatggccgactgccccaactctcaggatcacaaaccagtgaggcagttgagtttactgaattagaaaatggccgactgccccaaccagggtcgtgtaaccgtcagcaagcgtcagagtttactgaattagaaaatggccgactgccccaactgttcttggtgagtctcaatcttggcgagtagtttactgaattagaaaatggccgactgccccaacttcaactgcgaaccatttcggagcagatgaagtttactgaattagaaaatggccgactgccccaacctggaagagatgtgagtgagttgttggttaagtttactgaattagaaaatggccgactgcccctttaacggaatctccgtgatcacggcgaatgcagtgatcacggagattccgtcggtggaatttggtgctcatgcaacttctaaccgcaaggttgacaaacccccaacttcttcgcctagtaagtgatgatcaaaaactctttacactcgcacatggtccatccccatggtgtcggggcgtctcgcctgcctccgccgaaccccgagcaaagcgatgaacaagcctcccaactctcaactcagaagcctgtccccacttgtccccaccaaaatcaaaaactgagcgcccatttgaacccgatgtccccaccaaaacgcgtcgcagttctctccccgctcaagactcaagacttaaaacggtctacccaaccctacccaactttctcaccaaatccgccgactcttgaacctgactacccaaccaaaagcgtcgcagttctatcccaaccgctcactgcttaccgctaaccgctaactgaatcaggcaaccgcatcggaaccaaagtcgaaacccccggctcctgcatcgtcaccccaagaagggtaggggccgccgcaatcgtcgtgtgattgtgcgtaatcgtgatgaactgaataaactcgctgaactccaaaagagcctctgcgaaccgctcaacgttgcgcccgtccaacggagcgtcgacttcatccaagacaaccaaaggcgccggcttatgcttcaacaaagcaaacaaaaacgccgaagcgcagaggcttcgctcgccgccgctcaaaagctgcaacggctgtcgcttcttacccggaagctggacaacaatatcaacgcccgtctccaaaacgttgtcgggatcggtaagcgagagctccgccgacccgccgccaaacaaccgagtgaacatcaccgcaaagttatcgcgaaccgcgttaaacgtgttcacaaacttatcgcgagtcaacttgtccagttccttaatcgaagcctcgacctgaacaatgccgttcatcgtatcctcgcgctgcgcgccaagcgattcaagccgctccgttaaccgttcaaaggcctcaatcgccccaacgttaacatcgcccatcgccttaatctcgcgccgcagccggcccgccagttgctgagcatcatccggaatctcatgaaccccttcctgagcaaccgcatcttcttcagtaagaccgtaagcatccatcagccgctccgccgtcgtagcccgccgcgtctccgcccgcgctcgactcaactccgcctgatggttcgcctgacccagcgccaaaacattatcccgaccctgccgagcctggtccgccgccgcctgagcctcctcctgcttctcccggcgctccttgctcaaatgagtcaaccgcaccatcgcatgaccgcgatccgcctcaaacttctcggcctcctgccgatgaatctcaatctgcgccgaagccttctcccgctccggtccaagattctcaagtcgtcgcccgcgatgcttatcagcatccttagccgactccaaccgcttctcagcggcatactggcgagtctgagcgcttcgcgcccgctcctgagcctcccgcaatcgagtctcagcctgctccgcatccgccgacttagaagcaagttggtgaataatcgcatcccgctcactctcaatcgccggaatatcaacatcctcaatgctggtccccgccgcccgctgaatctgctccaactcaccccgagccttagccaactgtcgctctgcatccttcagctcatcctgcaaagttcgcaggaaactcaaagcctccttaactggctcctccgccgcccgtcgagccaattcgctctccgcaatctgcgttcgaatcatctcaatctgctgagctcgcttcgccttccgcttgtcggccccagcaaccaatttctgcaactcctccagctcccgctcaatctccgccaaatccgacttccgttgaacaatcccatacccctgccgctggttctgtccacccgtaactgcaccactgttatgaacaacctctccgtcaacggtaaccagtcggttccatccggaagtcttcgccaaccgaagcgcatcatccagggtatcaacgataatcactcgacccagaagggaatcgatcacaggccgaacgcggttttcgcaatccaccaaatcgctggccctaccaacaaccccccgctcattcagaactcgccgaaactcgttcgacggatcctgaggtcgcatcaaaggaatcggctggaacgtacagcgccctgctctgttttccttaagccaagccacggcccgcttcgcgtcactttcatgatcaacaatcaagtcattcgccgaagcacctaacgcagtttcaatcgcaagggaatactctcgatctacttcaacggcatcggcaacgctctcataccgaccctgaagaatccctcgttccgacgcctcaataaccgcccgagacccctgcgacaagccttcatgcgcatcgagcgtagcctcgataccgcgcttccgaccctcgagactcgcttgctcggcaagagagttgcgaagccgcgacgcttcttcctcttcaactctgttgatttcagcgatctcagctttgaatgcagcaattccgtccgtgaccgttttcagagtctgatctgcctcatcgaactccttttgggcaccttcgattccttcgttgatgtccggaagcgacttctcaatcccgctgatctcccgctgaagtagtttcgcgcgttcggcactcgcttcttgttcagcttcccacttcaagcgtcgaaccttttgttcacgtgcttcgttgagttgcttctcaacagccgtaagttgcgctgatagtgctttggcctccgagcttgcgcctgcggaatcagactgaattgtttcgagagcgattcggctcgcatcggcttcgattcgagcttcagtgagatccgtttcagcctcctgcaagcgcttttcaatggtctcagagtcctcttcgagagacttctcctgattggccagcgacgtgagacgctcttccaaaactttgatgttggcgacggcgcgctcaaggccactagcagcagtctgctgagcgactcgtgcatgttccattgaggtttcaagctcctggatttgggtttggagaacgcgatgccgcttttcaagttcttccacgcggcgattttcttcgtccacgatccccccagaacttttcagcttttcttcaagggctttaagctcgttcagggccgagcataggtctcgaatcaggagaccgatttcgacttcttgcagggacgctgagagggacttgaagcgctttgcttgctcggcctcatcttcaagtggctcccgctgagcctccaactcccgcagaatatcatccacccgcgatagcgagtcgcgtgccgtattaagccggcgcagtgattcgagtttccgagttcgatacctttgaacccctgccgcttcatcgatccagcctcggcggtcttctgccgatgccgcgagcgcctgatcaatttccttctgtccaacaatcgcgtatcctgctcgacctaacccagaatcggccatgagctcgaccacatctctcaaacggcaggactgtcggttgatcgagtattcgctatcgccagcccgggtgagtcggcgcgtcacccaaacctcggaagcgtcaatcggaagggtgccgtcctcgttgtcaaagcagagcgagacctcggcatacccaacctgctttcgtgcctgggcaccagagaagattacgtcctgggaagaggaggctcgcaggtgcttgatcgagccttcgccgagcccccacagaatggcgtccactaagttcgacttaccgcatccgtttggtcccacaacggccacgactccgccttcgagtgagaactcggtgcggtcggcgaacgtcttaaaaccaaaaatcttaacgcgagtgagacgcatgaaagcgaagcattaaggatacatttcttcggaggtatagcgataggcacggtctgtgcaattctttccaccatgaacaaaatagtcttgaccgcaacgatgttggtcgtcgttgcaggtgctcaggcgaggcaagaacttcgtcaagagattcagcgccggtacgacacgatcgccaaagtagccgtggccgatcctcagcaaatgatcaacgaagctgcccggtttctaacaagtgatttccagtgggttgaaacagctggtagtgaatacaaccgcgagttctacatcggcattcaaactaagcttgctggtcagatttctaaagtttttgccgcaaagaacgagatcgttagctaccgagaaagtgggatctacgtgatttgccgtgtcaagtcaagtcagctttaccgacgaaaaggattcagtagcgatcgacattccgccgtgtcagtcacagacgatacgtgggtaaagacgattcacggttggaagatgtatcgatcggtcggaattcgagattccgacacgatcgttcgcagaggcgttagttctcagagtgcggcggtcatgacggctcgcatgacttctgctggtgttgtccatcccgcggcggccttggcttttccatcctcaagcattgttcgatagccctgctgctgagcggcttcgttgagttcggcaaaagtgacgtttcgcgcaacagctgctctgaactctggggttcccagaataagttcaaaaatgccgattcgaccgcggtaaccggtttgcttgcactcggggcaaccggcacccttcataaacttgcccgtctcgagttcaccgggagtgaacttaagaagttcaatttcttcggcggtcggtttgtaaggctgtcggcactttgcgcagttgaggcgaaccagtcgctgagctagcgacccgagcagaacaccaccaacaaggtaaggctcagcccccatgtcgaacatacgcccgatggtttcgacagcgttgttcgtgtgaagcgtcgacatgacgaggtgaccggtaagaccggcttgaattccgatcttaagcgactcagggtcgcgcatttcaccaacgagcatgacgtctgggtcttgtcgaaggaaggaacgcatgactcgagggaatggcattcgctctgaaacctgcacctgtgcgatgtttttctcgtattcgtactcaatcggatcttcgactgtaacgatgttcctcacccgcgcatcaagggtgttcagcgatgcgtaaagggttgaagactttcctgatccggtcggtccggtaaccagaatgagtccgtaaggtgccgaaatagcacgctcccatttgacgagaatgtcttccggcattccgagtttcccgagatcgactttcatcgccgccgggtcgagaatacgcatgaccatcttctcaccgttcattgacggcaaacaagaggcacggcaggacagtcgacgccccatgtattccatgtcgattcgaccgtcctgaggctctctttgctcgtcaattctcatgcctgcagcaagcttcaagcgagccaagacgttttgagcttgttcgagtggcagctcaccggccgagtgtaggattccgtcttggcgatatcgaatacggagttggtctcgttcgggctggaggtgaatgtcgctcgtattggtctccaatgcattcatgaagatgttgtcgacgattcccactgcgatggaaacatcgtcaccgcccatttcgcgagtctgaccgccctcacgaataatcaatcgaaatcgctttgcggcaccgaagtttgtttgagcgtagtcggtattcattgcagttgggagcatcatactatgaacggatgcctcgacccaacccctttttgctgattacgatgctgttttggggattcaattttgtgtcgatgaagatcgtattcccagtgatggctcctgcggcagtcgtcttttggcgctatttcctaatgggaggcgttttgatcgggctttgtttgttaactcggcaatcactgcggattccaggcgaacatcgaaatgcgattctgatgactggcttttgctcgatgggaatctacatggttctattcttcgaaggggtgaagcgtgccccggctggtgagtcggcaatcatcctggcaaccaatccaatcatggttggcgtgatgagcatggttcttggccgagaacctaagtctttggcgcgtgtcctaggttcggtcgtagctctcacaggggttgcattggtcgtcttagggagacccggcgcgttggtggtttcaaaagagacccaggaccgactcatcggtgacctcctgctattcctcagtgcaatatcgtgggcggcttcggtcattcttgcaaagccagtctctactcacatcaagcctttgcccctgtttacgatgtctatgttgggagggcttcccgttgtcctgatctacggctggagcgcagcaacgagcactcagtggtcctccttcactgcgtggcactggatcaaccttgcgcaaattgcatttggttccggcgtgattgcgatggtcttctactataagggcgttgcagatcttcctgccagtgtcgcatcgttgcaccagttccttgtcccggttctgaccaccttattcgccgctttattactccgggagagtctagcttgggtgcaggctattggggtgctcgtcctgctcgttggtctgtcagttaacgtcggtctcattcgaactaacaaaaaaagtggctccggggatcagaatccggagccacttaggagttgaagcgattcaaacagccttgtgattggtttacgttgcagacccggtgccaaaccctctgagcgttgagcgatctggttcaattactgtgtcctgttaatggaacttcctaagattcgtcaggtgaatctttccgctcttcggtcaggaagtaagctcttggggcgatgcaaggaaagagagcagcagacacggtcgttaccattgccgaagtgattcggcccgacgaggcgaactttttaggaaagctctttgggggagcactgctcgctaagattgacctctgcgcctatgcggcatcggcaaagcactctggaaccacttgtgttaccgccagcttcgaccaagtcgattttcacgaacccatcgaagtgggagaactcgttaccctcaacggccaagtaacttttgtcggtcgaacgtcaatggagatcatggttgaggtttggaccgagaacctcaagcacggggtaaagcgccacgccaacaccgcccgcgtgaccatggtcgcgcttttgaacgggaaaccaattgaagtgcctcgtcttatatgcgaatctcgggaagagaagattcttttcctagagggcaagctccgacgggacacgcgtaaacaactggcagaccaacgggcgacggaatacgctcgcatcgaagcgttaagcgatgatgaactagacgtcgctcttggatattaagaataggcgacgatttcgtcgcctaaaatcacataccaagccatttcttgactttgtaaaccgtcgtgtctcggtttagctgagcaatcgctcgagtcaacggaacttgctttggacaaactttgacgcagttctgcgcgttgccacatccactcaatccgtcgtccgatgtcaagaactcgtatcgctcggagtcaagggtcttaccgaccgggtgggtactgaaca

SEQ ID NO: 1935 - DNA, 9523 bp, synthetic construct
  source 1..9523: mol_type = other DNA
  misc_feature 1..9523: note = Synthetic
gtaaccacgtgggtgtcgccgtcgcgatctgtgcaggggcagatgcgctgttgatcgcaattggcatcggtggtctcgacgcaatcgtgcaggcccatggcgacgtgctgactgcgatcgcgctgatcggtggcgcgtacctgctctggttttcgttccgctcctttcgcagcgcactgcatcccgaggtgctcctgccctcacagcaggagccaaaggccgtcgccgccgtggccttggccgtgctcggcttgacgtttctcaacccccacgtctacctcgacacgatcctgctggtcggcacgatcggtacctcgtttggtgcggatcgttggtggttcgcactcggtgctgcgatcgccagcgtcgtctggtttagcggccttggcttcggtgcccgactgctctcgcccctgatggctcggccggttacgtggcgcgtcctcgacgctgcgatcggcgtggtcatgctgacgatcgcgatcgtacttgtgcgctcagccgtgctctagacagtccgctacggtgaggggcatgttcgaactcgagactcttcccaacggcgcccgcatcctcagcgccccgatgcgcgacgcagccagcgtcgccgtcgtcatctccgtcgcctccggctcgcgctgcgagcagcccgcgtcggcaggcatcgcccacttctccgagcacatgctgtttaagggcacggagcgccgcccaacggcacgcgacatctcggccgagatcgacggcatcggtggcgagttcaacgcctttacgggcaaggagatgaccgcgtactacgtcaagtgcgcggccgccgacgcgccgactgcgctcgacgtcctatccgacatgtttctccactcgaagttcgatgccgaagagctcgagcgcgagaagggcgtgatcgtcgaagagatcaacatgtacaccgatacgccgcgcgacatcgtcggccaggtctacgacaccgcacgctacggcgattcgccgatcggccgcccgatcatcggcacgaaggagacggtgcgggccgcgacgcgcgagacgtttaccgactacctgagcacgtggtacaagcccgagcggatcgcgattgggctgggtggcggcgtctccgagagcctcgtggccgaggtgcgcgagcgctttggtggcctcgccgccgagagcacgcccgcgctgcccgagacgatcgtgcccaccatcgcagagccgatcgtggccgtggagcaccgcgaaggcgaccaggctcatatcgtgctgggcgtcgatggactacgcacagcagacgaggatcgttacgtgatggctgtctggcaggccgtgattggtggcggcatgtcgtcgcgcctctttaccgaggtgcgcgagcggcgtggccttgcgtactacgtgtttggtcgtaacgcgagctacagcgacaccggctcattcgccgtgcaggccggcgtggacatcaaccgtgccgcgctcgccgtcgaagtgatcgccgacgaattgcgtcgcatggtggccgagccgatcccggccgacgagattgccaaggccaagcgctacctgatcggtcataccgtcctcaaccaggaagatccagccggacgtatcttctttggcctgcgccgcgagctgctcgatgatggctgggtcgacctcgacaccgtcattcgcggcatcgagagtgtcactaccgaggatctgctgcgggtcggcgagcgcgtcgtccgtctcgatcatgccgtgctggccgccgttggtccgctcgacgatgtcgacgggttgcgcgcggcgatcggcgcctagtatcagagcctgattctgcacgccgggtagactgccgctgtggaacgtgaagacgatgtagcgcgcatgttcgcgcggatggatgcgctgatcgacgagctggcgggttcggggccgcgcatcgacccccatacgcacctcggcctcgacgaggacggcatggctcagacgctcgaagagctggtcggaaacctcgatgcgcaccgaatcgagcgcgccgtcgccttcccgctacacgacccggaccgcggcgaaaactacaccgtgcctaacgatcgcgtgctcgagtgggctgcacagagcaatggtcggattgtccccttctgccgcctcaacttgaccggcgatccactgacggaggcgcgccgcgcaatctcgctcggagccagcggcatcaagctgcacccgcgcgcgcaggccttcagcgtggacgacaagcgcctcgacccgatctttgcgatcgccgccgagcacaagcttccgatcctgatccacgcggggcgtggcatgccgccgattggcgaccagttggcgacggccgccgagcgccaccccgactcgatcctgattctcgctcacgcagcaatcgtcgaccaagaccgaattgccagcctcgtcgctgggcgtccgaacgtcgtcttcgatgcctcagcctggagccccgtcgatctgcacggcctgctgacgcgcgtgccacccgagcaattggtctgggcgtccgacctgccctacggcacgatccgtgagagtctcttgtcaaccctcgccgtgctgctcgaggtcggtgccagccgtgaggtaaccgccgcgattgtgggcggcacgatggaccacctcctgcgcggcgagcacgccgtgctctcggcagccccaatcgccccgcgcgagcgtgtcgtcaacttggcgcgtcagcgcgtcggtggctacctcgtcgccctcttgccttcgatctggcagcgccgccccgactacgtcggccacttcggtctcgcggccgcggtctgccgcgacgatgagggcgaacttggttccgtcgccgagctgatcatcttggctgaggcgacgtggacggctgcgctggagcgcgccggcacagaacgccctacgctcgacgatgtccgagagacgttcgagcttctgctcgccgcttgggtcttcgcctattcgcccgttacgcagcgccgctgggaggccctcgcatgatcgccactgttgtactcgccgccggacgctccgaacgttttggttcgccaaagctcctcgccgaatggtggggtcgcccactcgtcgagcgcgcactcgagatcgctccgcctggtctcaaggtcgccgtcatcagcacgccaacggccaagctgttgccgctcttccaggcgcatggcttccagtgcatccgcaatccaaagcccgcccaaggccagtcctcttcgctgcgactcgcgctcgatgtgatgcccgccgaggtcgaagcagtgctcgtgctgctcggcgatgcgccggctgtgccgacgactgtcgtcgatcgcgtgctgacggcctaccggcgtctcaactgcgccgtcacagcctcgtacgaggaccgcaccgctccgccggtcgtgattccccgggccgactgggaccgcatcgccgcgacgggtgaccatccgggcgaggcactcgacccccagccaatcgacatgagcgatctgctcagcggtggcgaggacgtagacacccccgaggacctcttccgcctggccgccttgcgcgcgggtgtcgagttgatcgagccaatgagcacgtccgagctcgactcgcgcctcgacgatcccgaaccgttcgccgtgcgtctgcggcgccgcaactcggcaacagccgagcgcccgtccgtcacgcccctcgccctcgagaagctcgccatcgagcatttccgtggcaccgaggtcatcgcccgcgtgggcgacgagtacgtcggcctactcgggtaggacaccacatccgcgcggttgtgatgtcctcaggtgggatattcgctcgggctgaggggacatgacaaaccccggtttgtcatgtcccctcaggagttaccgctgctccacacgaggacatcacaaccgcgcggatgtggtgtcctacccgggtcgcgagcggccctggatcgcgcggcgtggtcgtgcctttcgtcgtcccagagtgctccctgctctagcaggcggcgtgcttctcgagcagctgcatcagctcgacaaggaacgcgtctcgttgccgttgcagatccgcgatcgagcggccggcggcctcttcgtcgcagcccgcgaccatcttgtcgcggagttccttcgtcaacggcggcgcctcaaggcgtgtccagggctcgagcagcgaatcgccgaagtggtcgagcatgtggcctatgccgccctcgccgcccgccaggtggaaggtgaggccgacgcccatctgcgcccagcgcacgcctgggccatagaccagtgcgacatcgcattcctcgacggtcgcctcgtcgttgtcgaccatgtgcagcagctcgcgccagacggcgtcttgcaggcgattggcgacgaagccgggcagctcgttggagcagcgcagcgccttcttgcccgcccgcgtgtagaagtcgagcgtccagtcgacgacggccgggtcggtctgctcgcctcccacgacctcgaccagtggcacgaggtagggcgggttgaagggatgtcccacgacgagccgctcggggtgcgcggaggcacccgccatgtcggtcatgcggtagcccgacgtgctcgacaggatcggcacgcccggcggcgtcgccgcgtcgatctgcgccaacgtgtcgatctttagctgcaacacctcgggacagttctcttggattacatcggcgacagcgccgacctcctcaagcgtgtcgaccatccgcaaccgctcacgcgaggcccccggcgcgagcccgagctgctcgagcgatggccaggcgatgtcgagcaggcgctggagcttctcggccccatcaggcgccgggtcccagaccacgacgtcgtagccctgcgccaggaacttcgcagcccagccaccaccgatcacaccggcgccaacgatgccaacggtctggacttgatcagcgggagtcttcggggtccacgtcatgcagtagaggctagcgagtgggtgccgcgctgggctagggaataagcgtgtcccccgccgtgaggcgggggacactaggactcccctcagagagttgcctgcggatttcgaagccaaaggcttcgccttatcgagcgaaggctgacaacgaatcgagtcaggtggtataaatattatcccacagggcgcaagagtcaatcccttggaaggagtcaccatggatcgggtactcggaattgatctcggaacgcagtccgtgggttgggcgcttgttgatgctcccacagtcgatggtgagatcggtagcgtcgtcgcgatgggctcgcgagtgtttcccgctggtgcagagacagcgggaggcaagacgaagaccactgcgcaggagcggcgtggcgcgcggtctatgcgcaggcagatagcacgaaggcgaaagcgcaagaacctgttgcgtcacgagttggcacgcgttggactacttccagtaaatcgcgccgagcaagatgtgctctttgttgatacccatgagaatcaggtggctgaactgatcgctcgtgcacagcgagagcgagtggagttatacgacctgggtcgtatcgcgtttcatctgtcaacaaggcgcgggtttctgagccttcgtaaaggtgggggtggcttcggcgaggagggcaatgaggaagagacggagatgtctcgattccgtcgtattcaagaggccgagtttctgcgcatctgggaacttcaagccgagtctcaccccgaactaactcgcgcgttgctattcggcactcggggccgtttgacctatccaatcaagccaattgagcaggcgcgctaccttgatcacgaggcactcggtccgtgcgacgagttcggggttcatggcttggtgttttttcaacgagccgtctactggggtgaaggcacgattggacagtgccctctcatcaacggcgaggtgcgctgtccgcgagctgaccgattggcacagcggtaccgcattaatcttgatttgaacaatcttcgttggcggaatggtcgtgatcaggttgatctgacgaccgagcaacgcgaacttggtttctcaaagctttggtcgcagaagcaagtcaagttctcatcgctcgctaaggctatgaagcttcctgccgatacggagttcaatcttgctcgtggcggaaaagacgcattggctggaaatgagactgacgcagctctgcgcgctaagggcgctctcggctcctcgtttgatgatcttgtagagaacgataaggaccgcatcgttcatattcttcttggctctgggtcagtcgacgaattggcggctcgaatcgaaggcgaaacctcgcttgatagtgagaaggcgctgctggctgccgacgtccgtctccctggtggtcggatgcggttttctcgaaaagcactgcgtcgcctgctccccgaggtcgaagctggctatcgcctcagcggcaagggtgcggatgaattcgcccttcagcgcgccggttttggtaatccctttgatcgctcggcggagtcgaatgctgtcacgatcgcctctgcaggtatacacattgatgcgctgattccacccgtgcctcgagacatcacaaaccctgtcgtccggacagcgttgaccgagttaaggaaggtgctgcgggcaatcgctcgcacccacggccgattcgacgtcattcggatcgaattcgcccgcgaggcagcactatcgcaagacgagatcgcccgcaagttacgcgagcagaatgacaaccgcaagcgcaacgaggcagcgcagacggagattgaggaggccggcggttcccctcacgatcgagtgctcgcccgtaaggtcacgctctggcacgagcagggtgaggtttgcctctattccggaaagcagatcaccctcgctcagattttgtctgacaacgcgaccgaagtggatcacattctgcctcgctggcgatcgctcgacaattcgtacatgaatcaagccgtctgtctcaccgcggagaaccgtgacaagggcgaccggataccgttcgagtggcttagtagcgatccggagcgttggggtggcgtggtcgctcgcgcggaggcgctacctcaacccaagcgcaatcgggttttgcaagaggagttggatcaggatcaggcgatcgcggaggcagcgcttgctcagactcgttttgcagcgcgccaatcacgcgactggctcgaggcggcagggtttagagtcgaaccaactcgtgggcagtacacggcggagttgcgtcgccgttggggactcgataaagacgcgtccgatcatcgccgccatgcgcgagatgctgttgccatcgctctgtgcgacaagcggacgttgttttatttggcgaatgccttgaaggcgcgtgcaaattcgtttgccacgcgtgaagaggcaagcgctggactcgaggaaccgtggcccggctttcgagctgacgaacaggttgcgtacgactcaatcctcgtcagtcacaaggttcgtcgcaagattcgcggcaagcttcacgaagagacactctatggccctgtcggcgatggccaggtggtgatccgacgcccgctgtccgctattgatggggcaaagaaactcggcgaggtgcgcgaccctggggtgcgcatggcgctagaggaatcgttgtcggctcgcggtatcgaccctacagacaagtcgtttggcagggacccgttccccgaggcaactccgccccgtctcccgggcaatacgccgatccgtagcgtccgctgtctgatcaatcgtccagctgctcggcggcgtggacggcatacagtagaactcgtcaatctaggcaacaactatggtggagccgtctatcggaaggcatctgggggttggggcgtgatcgtgacaccaatgatcgatgccatcgctcgagtgcagcgccaagagttgtttacagatcttccggacggatcggaactcctctttaccctggcggagggcgaggtcattcggattcaagtggcaaccgacaaggttgcggccggcctctatgtcgtcgtgaggatcgacggcggcgcccacaaccggttcggcgctctcgaactggcagcgagcccgacctctgctgatcgtaattcagccatgaaattgctatctgccaaggccttagagagcgggaatgctcggaaagtcactgtcgacgcagtaggcgttgaacagcgtgcgaccggatgattgctgatgcggcgcactgttgtagccactgacgcctgctcgcgcgtgcgcgtagctcagcaacaattgcatttttcccttacgagcgaaagcactccccattgcgtacccgccgaagatgtcgggctggtgattctcgaatcagatctcgccaccgtttcggcacaagcacttcgcgagatcgccaaggctggtgctgccatggtggtttgtgacgagcgacaccttccagtcggagtcttcctgtcgtttagtgggcactctgaatcgacgcggatcatgcgactgcaggtggccgtctccaagccgcgtatgaaacaggtctgggcacagttggtgagggccaagatccaggcgcaactggcgaactgtcctgctgggagtccagttgccaaacgtctgcaagtactcgtccgtggtgtgcgatcgggtgacccggataacagggaggctcaggcggctcgggcatactggccgatcctctttgccgatccaacgtttcgtcgtcgtccacaatccctcgagcttcgtaacacgctgctcgattacggctacggtgtgctgcgggctgctgtcgctcgagcctgtgtcagcgccgggctgtcaacgtatctcgccccaatgcacatcacccgcgacgatccattctgccttgctgaagacctgatggaaccagtgaggccactcatcgatagtgcggtaatcgcgctgcttggcactgggacctcgagtctggatcgtcctgcgaaggcgcagcttgcaagtgtgctcagccagtccgtcttggttggtcgagaacggggaccactagacgaagcgctcacacgacttgcgacctcctacgctcagtttattggcggtgagcgctccaccttggcaatccctagacgtggatgaccacgctcagcgagtatcgaactatgtgggtcgtcgtcatgtttgatttgccaaccgtctccaaagccgagaagactgcataccgaaagttccacacgttcctgatggaagatggatttacccgggtgcaatactccatctatggtcgtcattgcgcatcacgcgagatttccgacgtgcacacgggtcgcgtacgcggcaatcttcccccaggcggagaagtaaggatgctccagatgacagacgcacagttcgcccggattgagacgtttagggcaaaaactctgactgcaaacgatgcgcctccggagcaattgacatttctctaaacaccgaatcccgccgaatccgctcagttgagcaaaatccgacgggatttggagtttacctgactcgactcggcaccaacgcccgactacgcccctctgtcaggctagaagaaatggagtttacctg

SEQ ID NO: 1936 - DNA, 13878 bp, synthetic construct
  source 1..13878: mol_type = other DNA
  misc_feature 1..13878: note = Synthetic
ttgccccgtacgaggtttccatcatgccgctcgatccgacgatcccggagtgcgccgaggtttgcgaccgcctgactgcggagctgtgcgaggcgggcatcgaggtcatcgtcgatgatcgcgacatccgtcctggcgtgaagttcgccgacaacgaccttatgggcttcccgtaccagatcgtgctgggtaagcgcggtctcaagaacggcacggtcgagcttaaggatcgcgctacgggcgagcgcgaggacgttgcgattgatgaggttgcctccaaggttgccgatcttgtgatctcgcagcgccgttagagtttgtccttcatgtgcgcacgtgctcaaagcatcgtgcgcccatgttgttgtgcatcgtttacctgggagaacctccaatatcagacttcttttcaaaaaagtctgaaaaagtgcttgcacagctttcgaggttcccgtatagtacttcttcgttgcaagggggcgtagctcagctgggagagcgcttgactggcagtcaagaggtcaggggttcgatccccctcgtctccaccacttgcttctttctttctcttcatgggggcgtagctcagctgggagagcgcttgactggcagtcaagaggtcaggggttcgatccccctcgtctccaccatgaaagaccaggtcagggcctatgccctgaccttttttgtgattaaatccagtgattggccggtgattaaagtcaccggcttttcgctattgacgacccccaagtcaccgattgccgaaagttccctttttcagggcccgaaatgtatgatttggccctgtttcgcgtgctaaatgtatatgtgtcttttaagtgattgaatcggcgccgatacccgctgcctgcgggttttaagccgtttttagtcaccgataatcaccgagctaccatggcgtggaatcgcctgattttacgcatgggcttctaccagcgcttttcgtgtcgatttgccttgcgggatttaatcaccgttgatgatttgattccgatcgcgccgatttgcaccgttttgagcggctcaccgcgagggccccgacctccgtcaccagttcatggaaatacacttggtgttgcgttagagttgcaacacactgtctcgttcactataatgaactccgtagtgaattatggaacactaagagaggtgagagccatgtcggatatgtcgccggcggcggcttacgaccgtcccgcgtccaagcgcgtgactctggacgtggtgcgtcccatgacggtctcgatgtcctccttgctcgtgctcgatgccgtggaccgaggcctgggcgggggagagggcggtctatcgctccagaccctcgccgacctcatgggctgcgtcaggtcgacagcatcgcgcaggatcgccctgtgtgaggaggagggcttgatcgccgtccgcgagagggtcgccgaatcgggcgtgtacctcccgagcggatacaagatcttggaggtcggccgcgccaccctcgaggcggcgaggcgcgagggcctggtctagccgggaccgatggcgtgacgcgggtcgtgcggccccgcggcgcgcgaatgcaatcagccgtcagttcccagacggcgcgtaaaggttgggagacagttatgatcatcaccgcaatcgtcaaccagaagggcggcgtcggcaagacgaccaccgccatccagctcgccgcggcgctcgcgaaccgcggcatgtccgtcctggccgtggacatggaccctcaggcgaacctgaccggcacgctcgtgcccgccggagcggccggtgagggtgcgctcacggtctacgaggtcctcgcggacggcgccgacccgaggacggccgtcgtgccctccgcgcacccccacgccggcgtgctcgacgtgctccccgcgtccctgttccacaagagcctctcggtcctcgacgccgcgatcggcaacaaccccgaccgctatcaccgcctctcgggcgctctgaggcgatttgagggcgtttacgaccatgtcgtcatcgacacccctcccgcccgcgatacgctcgcctacaacgccctcacggccgctgacggcgtcgtgatcccgtgcgagccctcgctgtactccgccgacggcatcgcgccgctcaaggactccatcgaccagaccaaggcctacacgaacccgcgcgtcgagatcgtggggcttctgatgacgaactacgagcacggcaccatcgtttccaagcgcatgcgctccgcggtgcgcgacatggccgagtgcctggggacgcgcgtcttcgacacgccgatcagccacaccaccgcggtccgcaagagccaggcggcgcacacggacatcttcaccttcgacgcgaagtgcagcgcggcgcgcgattacgacgccttctgcggccagttcctcgagtgcgtcggcggtgatggcgatggccgataagttcgcgatggacttcggcgcgtcctccatccagagcgtgaggcgcctgaacgaggaggagacgcgctttcagggaatcgcccccgtgtcggtccccgagcccgtgagggcgaaggcggagcccgcgcgtgcgccggagcgcctcatcgcggagggggagggcctggccgacgcgctcgccgacctcatcgaggacgacgcccgcgtgaatctcgcgctcgcggggtgcgagcggatcgacacccacatcagccgcgagcacaagaagcgcatgagggtgttctgcgcgacccacggcctcaccatgaggcaggtcatggcggtggcgttcgaggccgtggtcgcggcgatggacgagtacgatgcgcgcggcgtgtagcgcgcggtttggaggggatatgaggttcgagatcgatggtcttgcccgcttgcgcgaggtcgccgagtgcagccgttccggccgcaggattatcctggaggacatcgccgacgagatcgagtccgaggtcgcccaggtgctctccaacccgctcatcgacgtggacgcgccgagggaggcccgcatcgcggccctcgaggccgaactggccgggctgcgcgccacagccccggcggccggcgagtgatgctgagtatcaggccgggatgccttacacaagaacacatttacacatttacacatttacacatttacacaagaacggcccggtcatccgggccgttccttttcacggcggcaattgtgaaggcggaggaaggccgtttgattccgcgggccgggcgttatacatttgaatcgtcgtggtgccttatcgccggagaaatccccggacacaggatccaagtccgggagaggacgctggtcgcgcgcggaaccgggcgaggggaaagccccgcccggcgcaagtgcgcttcgcgtgcggtatcggtcccatacggcggagacgagccccctggcggccgttcccagcgcagctgagtcccggtctgatggcctggcctcccggtcgcactcgcgcgcaacggggatgtcccgacggggtcgatgtccgagtcggcggaaccgtttcgaatcacgcccactggagaaggaccatgttcgacaagataatggcccgcacggtccttaaggccgtgcgggcctagtctttatggttcatgacgatgaactctcgatttcccgagacaattgaatccaaatcgaacggcccgtcgatacgccctgtcacctgcgatatgatgaatatgcgtcgcggtgtcattttcgcatcgggcggcaaagtgtattacaatacactgcatgggcgtttccccgccctgcgagagagctggccggggccgaagaactgcggcccgacgtcggcgggcgcccccgcccgccgacgcggccggtcgtccgatcctctcgccctcatctcggccgcgctttcggccgattgccgaaaggagagagaggatgtccatcaacaaggtcctcatcacgggcaacctcacccgagaccccgagctgcgcgccacctccgccgggacccaggtcctgagcttcggcatcgcggtcaacgaccgccgccgcaactcccagaccggcgagtgggaggaccatcccaacttcatcgactgcaccatgtacggcccgcgggccgagggcatctcccatctcatctccaagggctctaaggtcgccatcgagggcaagctccgccacacctcctgggagaaggaggggcagcaccgcagcaagatcgaggtcgttgtggacgagatcgagttcatgtcccgcgacgcacgtggacctgaggccgatgacgcgcccgcgctccccgagtgcgaggcgttctgacgatttgtctgggggcggtggccgcctcatcttttgagaagggaaactagaagatgatcgaggtttcgagttcggggatggctctgataatcgtcatctcggcagtgctcttgacgggcgccatggccttcggcatgcggttgatcataatgcgggagagccgcattagactcgtgctgggtctcgcggtcgtcgcattgtcgacagccctcatgtgttgttgcggcgtcgacggcttcgtgggcgtcgcgtcgggcggggaagtcgtgggggagccgtcgttcgagatgacgagtacggcccgcatccgctcgttctccgagagcgagagcgagtccacttccttctcgggtcgcatggtgggcgtcctcgtttacaagaccatcgacggaacggcgtccacctcttcgcacagcaagtacacggtcatggaagacgtttacggcgacggaggttatagccgggctgagtatcccgcggagcgtgtccggatctacgaggacgtcgacgagcccggggagagtccgcgggttgagaagttcgagaagagggtcgtccaaaggaccgaatggctggccttttacaacgaggaggagttcctcgcaggagaagaggtgcggatccacgtcgcgccgggaaccgtattcgatctcggcgagtgacgggcgcgcctcatacgattgacgaaccatacgacactgggagaacgatgaatatgaccgagaacgacacgcaacgctccgagggcctcatcttgggcctcgctcccgatatcgaccatgtcggatgggcggtgatcgatgcggacggccacaaggtcctcggcatgggcgtccaccgtttcaacccgcccctcgacccgaagtccaaggtgtcgctcgcgcgcaagcgccgctccttctactacgccaggattaacaagcgccgcacgaagtaccgcgcaaaggccgtgctgaccgtcctgcgcgcacatgggctcgtacccgagggcgcgggtcccgaatggctccagtcggcgaagggcgagaggcccgtggcgcgcctgcgcgccgccggcctcgacgagccgctgagcggtcgcgagctcgcccaggtgctctactacctcggcctccatcgcggctacgaccccaggggcgagtccacggacggcgacgccgacggcaagaagatgctgtccgcgatcgccggcgtccaggcggcgctcgacgccggcgaggcccgcacggtcggcgagctcatggcgtccaggggccgcatgcgcaaccgcgccggcgactactcgtgcaccgccacgcgccagatgatcgccgacgaggcgcgcgccctgatctcggcccaggaggcgttcggcacggccgacggctcgctgatggacgactacctcgacgagctgctcttcacgcgctcgaccgcggccttcgacgcgcaggtctactcgcgcgtgggctgctgcacctatttcccggacgagcgtcgcgcggcccgcgccgacgtcacctccgagatgttgtcggcaatcgagagcctgaagcacctgcgcatcgtggagccggacggctcgcagcacggcatcccgcacgagtcctgcatgcgctacctcgacgtcatgttctccgatgccccgatcaagggcaacaaggagtgccgcgtccgctattccgacgtgctcaaggagcacggccgaaccgagggcgctaccgtgaagggggtcctgccggccgacctcaagcgcgaggtctacgtgcccagggcattctccctcatgcgcaaggccggcgtccccgccgcgctgctcgcgcgcatgcgagacgaccgcgcggtgggcgatgccgtctgcgaggcgctcacctacgcgtcgagcgaggaggtgctgctcgaccgtctcgccgcggccgaaatcgaactctccgacgcccagatcgccgcgatctgctccctgccgtattccggcaaggcgttctccggctacggttcgcgctccctcaaggcccaggagatgctgctcgagatgatgctctccccggaggtctcgacgctcttcgacgcggaggacgcctgcggcctctacgcggtgaggaccgagacgtccgtcaacgccggctccctgctgcccccctacaccgtcttcgaccccacctgcaccaatcccgtcgtcttgaggaccacggcccgcatgcgaagggtcgtaaacgcggtcatcaagcgctggggcgtccccgccgaggtgcgcgtcatcctcggccgagagctcaagcaatccaagaaggagcgcctgaacgcccagcgcaacaactcgcgcaaccgcaagtcccgcgaggagctcgccgacaccgccgcgtccatcctcggcgtctcggccgattctatctccggcaccctgttgaggaagctgtcgctgtggcgctcgcagggcggcatggacgtcctcgcgggcacggagatcgacctggagaggctgtgccgcgagcccgcctacgccacggtcgactacatcctgccgcccgccatgaccggtgagaccggcatgcgcaacagcctgctcagcctcacgtccacggccgtctcgaagggggcctcgacccccgtcgagtggtgctcgtccgggtgcgcgggcgccccgacgctcgcggagttcaaggagcgcgtggccgagagcacgctgccgtactccaagaagtccaggatcctgctcgaggatttcgagggcaaggcgcccgcgatgctcgacaggtccgtgaacgacggccgctacgcctcgcgcgccttcaggtcctacctcgaggagctcatgcccctgcgggatggcgagcgcgtccgcgccgccgccgtctctgacgcggccgtggcggagctgaggcgcgtctggggcctcgacgacctcttcgacgcctcgtgctcggcctccgaccccgcggtcgaggccgtggtcgccgccgtctgcgacgccggcaccgtccgccgctgcgccgcatggcgagcgggcaggctctactccgagcccgaggagcgcgacgagctcctgagggcgtccgagccctggccctcgttccccgacgtcgtccgcgcgagcgcgcccttcgtgatccccaccaagatgcacgaccacgggtgcacgggcgaggccctcgaatccaccaaccgctcggtggtcgaggtggaggaggggacgggctacgccgtcctgaccggcgctgcgcgcaaggtgggcaactaccgcctcctcgccgacggcaccgcccgcgtggtcggcggcatggccctcatccgcatctggcacgacccgctctccaccgcgggcgggtcgcgcaagggcacggggcgctactacttcgagccagtctattacgccgacgtgccgcggatggacgacgcctcgtacgtcccgcgctaccccgtggcaggcctcgcaccggccatgtggcccgaggttcccgcggaggcgcgcggagggcgtccgatcatcctccatgcgggcgacgtggtgcgcgcccgcggcagggccgcgagatacgtctcctacacaatcagcgggtgcaattggaagctggccgacatcgtcaccggggagccgttgaagggcttcccgtcggcgaactcgctttgcgacgacgacggattcgaggtcatgtgcgaggacgtcctgggcatggcgtggcgggacgtcgagggtctcaccgccctctaagatctgtcgcaaaacccgttgcacgattcggagaagtgtattacaatacactatgtccttcgagcgatgggttttcggcggttgcaaacgccgaggctccgatccgattgtatcaacctgggatctggcaccttcgtggacaaggggcgcccccgcggcgcacccgagagatcagccccgtaccgttcatcggtgcggggcgattctcttttcaagcacttaaatgcgacaatgtgaatacgtggacttgtagtgcggccacccgctccatctccccattccgctagggcgcgctgcggcggctcgtgaccggtccggtcccggctcgatggagatcttcacaactcatgcaccttttggacagtgaagtgtattacaataaactatatggagcgtcacgcatccttccttccatggacggggcttctccccggagccccttccgtgcggcgttagctcagatggatagagcacctgcctcctaagcagggtgtcgcgcgttcgactcgcgcacgtcgcacggaggggaacgcctcgagtaggcgggccgtccactcctcccggcccccgcgagatccgtaccgccatatttgcctgatgggaacggcgcggatccgcgggggccattccatacgcatttgaggaaaggaacgccgatgtcgtgcatctactgcgagaagggctcaacgaatttctgcgagagcctcgtgtcttccacctatgaggcggatgagtcggtctccctcgagatcgaccgcgaccgcgagtccatgacgatcacgacctggatcaacgataacgagcgcgtggacgccgagttccagatcgcttactgcccgttctgcggcgagcgccttgccgcggccgacgccgaataagtctgcgggacggcgatgagcgcgaaacccacgatggtctcgatcgcgcttcgcgatgccttggtcgagcgacttcccattggcggcctgaccgcggatgagatggcgatggtggccgaataccttcagggcacctgcaactcgccttattccgcgaagcgacgcaagtctcatctcgcggcaaagatcggcgtggagggggccagggcggtgtatcccagccttaccgatggcatcctcatcgacacggagaacggctacatgctcgacccgcggctcgcagcgagcgcgaacaggaagaagaaggtccccgccgtgccagcgtcgttcgccgtcgaatccgcctccgcttccgtgcccgcatatttcctgtcgtcgaatatggggccgtctgccggcgctatacacgcgctggctggagaacggctcgatgcctgggttcgctcaccgcgggcgaagagggcccgcctgctcccgttgacgccgcgtgagctgtcctatgagatctggggtgacgagaagatgttggatgacgctgcattgcgccacaatggtccgaagccgactttcagcccggtgttctcacccgacttcatggaccgcgaaggcggctccgtgctcgtcatcgagaatttggacccgtatctgaccctgtgtgacgcgttcatgcagaccggggtcgggcgtttgtgcggtacgggcatctccgccgtcctatatcgcggcgggaccgggttcgactctccctcccacctgtgcgattggctttccaggacgtgtctcgcgggccgcgaggtcctgtattggggcgatatcgacagggccggtatccacgacctgaaccgatactcatcatgcgaggggctgaatgtccggccctttatccgcatgtacgcgaagatggtctcaaagcaggcgaggaggttcaggcaggggatgccgcccgcgcgcgcgagcgagcgccagcccttcgacggggatgatgtctccgtgctggacgcccttccgcgcgacctgagggacaaggtcgtccccatcctcgggcacgggtgcatgatcccgcaggagatcttgactttcacggattatctgacgtgcatcggttggcccgcagccatccgatggctcctgacgggccccaccccgctccataatgatgaaaggactccccatgagtgaccccaagttggtattcggcttcgacctcggcatcgcgtcgctcggattcgcggcggtcgatctcgaacggcacgagctcatccatatggcgagtcatctcttccctgctccccaggagccgaagaccaaggcctccctcgccgccaagagacggggctacaggtccaaccgaaggaacctcgagagggacaagaccaggcgcaaccgctgccgtcggctgctgatcgatgccggcctcgttcccgagggggtcgaccccaagtggttcgagacccgccagggcgatgctgatatcgtcgttttgcgccacagggccctcatcgagcgaatcaccgaccgcgagctcgcgcgcgtccttctctacctctgcaagcaccgtcaatatatcgaccagggcaagggcggcgccgagggctccgaggacggcaaggttctcaaagccctggcgggcaatcgcgtcctcatggagcagggggacgccgagaccttcggcgaggttttgtatcgacgtcacgacgcgggggagcggactcgcaacgccgcgggagattacgagttgacgatcccgcatgagttgatcaggcacgaggcctcactcatcatcgacaggcagatcgggttcgggaatgggaagctggacgattctttcaaggcctcgtatctctccatcgtcagctcgctcaagtcaacctatgagcgcgatttgcgcatctacggcaacgtcggtgcctgtacctaccgcaaggacaaagtccgagccgccaaggcgacgctcacctcggagatcgaggagtgtcgcgagaagctcgcgcatgtccgcatagtgggggagggcggaaccttcccgttgcccggcgcggttcgtcgggcggctgtggcctccgtcttcgatcccatggggaagaagggacagacctcgcttacctatgccatgttgaggaagttgatgaacagcctcggtgcggatggaccggagtcgatgagggagaccgaccatttcaaaggtctgaacgacgagaagggcgagcgagccgtcttgttctccgcgaagcgcttcgcggtcatcaaagcctcgttgggcgaagacttggggttgctggagtccctcatggccgattcatccctctacgacgatatcgcggaggcactgacgttcgcctcatcgcgcgagtcatacgagcgcaggctctccgacctcggcgtcgacgaccgcctcgaaccggccgctctggatgccgtgcgcgggcttccgtatggttcggctgtgttcaacggatacgggaaccgctcgagggatgccctcgagattctctccggctgccttctcgaagatgggatcgactccctttatcaggccgaagaggtcggcggtttgctccagaagcgagtggaggacaggcggggcaaggccagccttctccctccctacaaaacctatgacccgacctgcacgaaccccgtggtgctccgtgccgccgcccgattccgcgccgcgttcaacgaggcggtccgcgcatacggtatccccgatgccgtccggatcgagctcggacgtgacctcaaatgctcggcaaccgagaaggcgaaaatctccaagggccagaagcgaaacaaggacgagaacgacaaggcccgcgccgcagtcgccgagatcttgggcgtcgagcaggaggaggtcgtcggccgtgagatcgcgattttcaggttctatgagtcgcaatccggtcgcgacatctacgtcgacgagccgatcgacctcgagcgggcgctcaaggagccgaagtacgtcgagatcgaccacatcctgccgttctcaaggtcatgcgacgattcgaagtcgaacaaggtcttgtgtctgtcgaagtccaaccaggacaaagccggcaagaccccgttcgagtggatcgccggttccgacgagtccgatccccgttggatcgcgttttgcaatcgcgtcgaggccgcacgcaagtccatcggtggaggaaaggcgcggaaactgaccaaggtcaacttcgatgatgccgccgagagcggtttcatcgacagaaacctcaacgacacgcgatatctgtcttgcgcgattaagaactgggtcgagacctcgatcgcatttcccacgccgaataaccaacatgtcttcgccgtttccggtggggccacctcgattctccgccggcagtggggactcaacttcgggaccggaggtgagaaggaccgcgacgacgaccgacatcacgccgtcgatgccgcggtgatcgcgatgtgcgatccggttttggtgaagaagtgcgcgaagcacggggagaggagacgattcctcagcagggatgagagggaccgtctcatgggcgagtccatgccctggtcgacttttgccgatgaggtccgcgctcgcagggagttcgtcatcccgacgcggagcacgtctcacaccctgcggggctgcgcgacggacgacacggtttacggttatcgcggcgagaaggcgaagtcgaagaaggggaccatgcccctgttgagcaagggtggcaaggtgaaaccctcttccacggcgatccgatgcggtgacggcttcaagatgcagggagacatggcgttcatccgcctgtggctcgatcctgatgccgggtcgaacggcaagtggctcgtcgaacccgtgtactgttcggactatccgagccttgcgcgcgacacctacacgccgaggtattgcgctccaacctacggccatcgctccaactggcccgaaatccccgccaacttgatggaaaactgctcgcctgtggttatatacaagggtgaggcactattgatcgacggtgagccataccgtttcgtcaggttctctgtctccaccaactgtctaattgcagttccgataaagatgacgcgtggtaaggttggtgtggaatcaggtgaacgttttttgccgtcaacggatgggatcgctcgatctctatcaagttgattgacgaggacccgttgggattcgtttggaactctctcgttagagattgaaagcgttcttctcattgccatcacccgcagagtgtattacaattaacttatagacaattgtatcagctggagaattggacggataccaaggctaacctgctacccaacaaaatgttgagagattgtatcagctggagaattggacggataccaaggcacatcggagatgttgaattgtatcagctggagaattggacggataccaaggctccgtcaacgtcaggcccgcgcggtcgaggattgtatcagctggagaattggataggtgccaaggccctagacagtcaatcaaattcccagttgatattatatcaactggagaaatgagtgagtgtcaaaccatcatcccgccgcccctttccgagcagtgtattataataaaccagaggtgtttccccacctcgcagcgagagagatatggtcgtggcttttgcggtttaccaatccgcatgggggcgcgtcgatggtcttgacgtccaatcatttagaaaacttgtcgcgcgcaagccattccctcctgcaccttaccgattgagtatcagggggtccgtacatgtcgaataaccttccggaattcacttcggagcagctgtcgaaagccgcggagaaggccgtcgaggcccgacgcgcccgcgccgcgctcaaggccgaactggcgagcggcgcgatctccgtcaccgatgcgctcgacgacccgcgcgccggcaaaatccgcgtggaccagttcctccgcgccgtccccggcgtcggggacgccacatgcaagaagctcatggttgaaatcggcatctgcgagacgcgtcgtgtgggtgggctcggtgtcaatcagcg

SEQ ID NO: 1937 - DNA, 14675 bp, synthetic construct
  source 1..14675: mol_type = other DNA
  misc_feature 1..14675: note = Synthetic
tccctcttgcaagttcatacatagcgctccagttcacaggctctacaacctttacaagcatgtcaggcgtgaagaaggaacttaagataggtgttcctgtttatttgactgcgacagccctttctctgttaatattaattatatacaaactctcgcagtggagggttatataaaacagacacagcctcatgaaaggatgttatcagatgaaatatcttgttgatgttgtaacacttgaattttttcaggagaaatgcacaggctgcggcaggtgtattgaggtatgccctcacggagtttttttgctccgggacaaaaaggcttttgttgctgacagggacaggtgcatggaatgcggagcctgcgccaacaactgcgaattcggagctataaaagttaattcaggggtaggctgtgcggcggcaataattaacggcatgataacaggcgggccgccttcctgcgactgtggggagcagtctggaagcgactgctgcggatgaaggttgtgaaggcagttgtgcctgagctatcggatgtttttatttatggacttgtatctttctttttggtcactactgagttctttccctccgaaccttgccatctcatacagccttatgaactcaaaagccttttcactcatgccgagttttgacgcctcttctgctatgtcagacggcgtagaggatgctgtaatttttgcgcctttgcgtttcagatagcgcctgaacctcatataatccgctgttacaaaaccatatcttcgaattttaatacggctcaggagaaatatagttattgccataaagcctgcgattaggaatatataaaatactgcttttagtccgtcaattctgatttcaggtatcttcggtatttttacaaacggcattgaaatatagctgattaaattcttctggtctgatgagttgaagtttacgacatatctgtaccatttcagtcgcagggagtcaatatacagggaagggagagacggcatcttaaactgaggcgcaggcggagttggatcaaatctcttccatcttctgtcaataacagcttcgacccatgaatgggcgtcgctctgccttactatgatgtagcctccgtatttgttcttctctcctccggcaaagccggtgacaatccttgatggaattccggcacgtctcagcattagcgccattgcggttgcataatgttcacaataacccgcctttgaattaaaaaggaaattttctatcgggtttgtgcctgctgcaggaggcgcggttttcagagagtatttgtagttggttttaagatagttctctattttagatgctttctcaatgccggtttttgagttttttgtaatttcatctgtaaatttacctattttttcaagtttagaaggaaactggagataatccgaaatattatctgatgcaggttgttcttccaatacgctgtatgccgtataagccagccgtttgggtgatttttcaggagcaaaaactgctcccgagccgtcagtgaacatagctctaagatcaatctctattcccacaatactccccaatccgaatataacatcagagtctatcggctctataaatatcttttgcacagtggcgttatcaagagatacaggcaggataacaaagatattttcgtatttactgaccctgtctcttttctttatggtgtccagccatgatgttccgtcaaagtaatccagtgtcatgcctctccagtaaagctgggccggcgttttttcaggcatctcaactctcattacaattgtggaatcaagtttcacttcgccgaatgagccgaaagctaccttttcggaaaaacccgcagtttttattcctgtcacgcggcttttccctacgatgcctccttttacccttggagcggaaatgaaaaacatgcctgttgtaagaagcgtgaggatggatataactgtcacaggcattttgagttttatcttcctgtaagtgccctccttcagaaaatgcgaaataaccattgccgtgacgagggctataaggaagatgataaatacagctccgaagactatagatcttgtaagttcggaggcgataatcaattgtaataaggacatgaaatacacctgaagatggtcccacggctccttgaggtcaaaactttttattgcctgaaatacgattgtaagatgcgcaacagcgataaaaaagtctccggtcactatcaatgcgtcaaatgcgaaaagaaatagcgcagacaccgaaaggctgttcactatccacttttgcgcagggggcatatctttccatagcctgatatatcccggaattaaccccaaagccggtatgagcataacaggatttaacggccctgttatgaaaagccctgcacagcctgtaactgcaaggagcgctgtaagcaccttataaatccggggcataaaccaccatgctgcacgcaggcgcagccttttttaatgcggactcgtctgattttaatatcagaacgcctgtcccgtgcatctcgtccatcatcggacattcccatgtatcgtcttcatctatgacagcaagggcgtcaagtattttgaataagtgttccagcccgcttccaaaaggtatgagctttttgcaggttatgagccttacaaagaaaccgagcctgataaatctgtctgcaagcgatgctgcgaatgatacggccttttcaaaggattccgcgtgcagtggtttgatgttgtccagtattattgtaagaagcctcggctcatccgtgcctgtatctttcaccatgagttttcctgtttttgcggaggtcttccattgtatccggcgtacgctgtctccatatctgaattcgcgtatcgtcaggaattcatctccgggggcatggcgggtggtatgtgctgtataatcagtcttcgtcagttcgggtattaattcatctatttcttttatctcaggatatactatgacctctcctccaagatgtgctttaatatttttcctgaacagcgagaagggaaacgtgctttcaaacgtgaaatctccgtatctgtatattcccctttttgtaaatgtgctttccatgtctgttatggtatgtgataatggagggacataaggcacaacgcattgtccggcgatgcctttgggaatagttacatgtatggaatatgaaggcatgagttttttcttattggacagtgatactttaaagaccgctctgttttttacaaagacaggctgcgcaacggaaaaagcgagagtcagacttttcagattatatctgagaattaccacagagagcagaatcatggagagcatcatggcaaggatgagaaagataaggttatttcctgtgttaaaggcggcaactgctatgaggagcgttgcaagcagaaaccttataccctcttttgtaggcctcattatttacgatgtatgatgcacgatgcatgatacatgatatttttatcttgcatctttacaccggcacggggatgcgctccagtattcccttcattatctcctccgcgtcagacgcagaagttcttgctttgagtatcagcctgtgtccgaggacggttgatgcgagattttttatatcatcggggacaatgtaatcccttccttcatagtacgcatttgcctttgcagccttaagcaaaaactgcgcccctcttgtgcttgcgccgagccttatcttttcattgtttcttgtagcggttattacagccattagataatcaagaaggctgtcatcaactttcacataatcaacctctttctgcatcctgagtatctcgtctcctgttatcactggctgcatattttcaaggaactcaaggcttgactgtccgaggagcgcctgtttttcgtatcctgtttcagggtatccgagcttaagatgcatcataaacctgtcaatctggctttcaggcagcggaaacgttccgtgatactcagttggattctgcgttgcaatgaccatgaaaggctcagggagcgtatatgtttttctgtcaacggaaacccttctctcattcatagcttcaaggagcgctgactgggttttagggttcgtcctgtttatttcgtcggcaaggactatgtttgcaaatataggcccttccttgaattcaaagttctttgtgtcgggattatatatgcttactccgataatatctgtaggaaggaggtcgcttgtgaactgaatcctctggaatgagcagttcgtagcctttgcaagcgtgaatgcaagggttgtctttccaacgcccggaacgtcctcgataatcagatggcctcttccaaggagggtaacaactgccatcttaacagcgctctgtttgccttttattacagagtctattctttcctgcaggagtctgagagaattctctgccatgaagatattctaccatatgaaacctgccgggtatgcaaattgaggatggttaaaaaaatttgtatgttaacaatatgcctgccgccgcgagagcaaacaggatggctattccgagcgctttcttttttatatcttcggctggcgcggcgtatatcatcttttccggaaattgtgcgcctgcctctgtgtctttaggagctttaacatagagcagttttttatctgctgagagttcttttgcagccttttcttcttgcgggagtgcggcgcctcttcctgcagccagcgccagtttgaggcttaaatcctccgtctctgatgtttcagcatctatgatatccctatctatctctctatccctatctgcccgaattaatgttatctcattttggggtgagatgttttcggacgttttttcatcaattcctgcccttaagtcagcgagcgtatcattgggttcctctattttgttgaggtattcaacctctgtttctgtgttttggggaaggttattcaatattaaaggtgatgtttccacaaagtctgtttttatttgctcctctgttttataattcgcttccagttctttgcatctcaattcgctttttctcacagcctcaagcgtagtatccaggtctgcctgtatttcctgaagctgaaactcttttttctcaagcgtggatttcagctcttcaatggcattgtctctcttataacaatcctctatgagttcatctttttccttaagcagaaagtcccgttcatctctcagcttgtcaagccctgccttaaagtccagtatctccatatttcttactatatcaatgtctgcaatcctgtcctgaagtcttttcttatcctcaaatgacttgttcaatgcgtggaagagcctgtctttttcttctgctgtggatgctaatgctgaatttttctcttctaatgtcttttcaagatgcgctatctcttttagggcatttaaaaacctttctcttatgacttcagtattaagcggttctgcgccctgtttgtgcttagtatgggcgctggacggctctcgtatctgaagcctgtttatcaggccttctggagttatgtcttcaaaatctctctcacccattcattttgctccttaaaattacgcacataacgcttacatctattcttatcatgttaaaaaatgataactatccgcatgttctgttgtcaacaggcagcgccattgcaatttttgaaaaaaatggcattattaactttaagcgggaggttaaaagggattgaattctgctataataaaaaacaaatgaaggaaggaggtgcatgcaatatgacaatgctgaaaatcatatctaacaaagaggatgcaacagatgttattaaatcagctatttctgctgaaataaagaggatggaaattgggttaaacaggacgaagagagaaataaagagttttgaagaaaaatacaaaatgtcctcagagacttttgcaaaagaatttgctgctgaggatttaaaaaggggcgatgatgagtatattaggtgggcaggcgaattagaaatgagcaagaggattaaagaggaacttaaaaaacttaaagatatagaatatgttgctgcctgaatatttacaggattctgtaaaggtaattgatgattattcaaagacaggctttattgttacctctgaagtaaggattgatttaaggacggaaaagattggcgtgataaaatctactatagtatttactgacgattcaaagctatttgccacagaatatattgacttaaggtataagattgaaaaattttcatattcgtttcattttcaggacaaagacggcaatctgatatttaggtatgataatgcatctcataaaccagattcaggatttaaaaatcacaaacactttaaaggggttctttgccgagccgaggctccagaattaagagatgttttagaagaaattataagcaattttctgagaaccaaataatgatattgaaatctttaaaaaaaacatatccggcctctatttgagagggttttcatagctgctgagagatatataccaaacatcctctggcgcgaggtctttcagtagggttgattaagtctcaatttctctcggctcaattaagagcccgattccatcaattatctgtttagtgcgagattttgacaaagcgccaattctctcaccgaggtctgatttatcaacggttataatctgggttatattcacaacgctgtcttttttgagtccgccatctccttttttcagaaggacgttgccaggagattttgcccgtttaagattagaggtgacggcgcatacaactactgtgctaatcctactctcattaaatacattattctgtataaccacatgaggatgtcggtagccgggggcagagccttctggaatgtctaaatcaatccagtaaatatctccctgttgtatgctcaataccgctcctttaaaactttatgagagtaatatctcttgctcttttgtcttaaagaaagctcctcgcttgtctcttcttccggaaaggcctcattaatagcattgagcagttttctggagttgattttctcaagaaattccttgattgcaatagtaaaaaactcactccttgagcagttgaatttccttgcggctttttcagcttctttaaagatttcatttggaatggatatcgcagttttcatactataagtatgccatatggttatacctatgtcaatacagccctgttgctacgggcttgcgccataatatatattgaaataaaaatcatcttccggcgcgaggtctttcagtaagccccgacagaagcgaagcttcacttttaatttttaattgacattgtcagtgtgtatgttgagtttttataggtgataatattatcatatcactatgccggcctcagaaaaagacaaaagaagcttcgcccgatactgcataaagtcctcccttaggctgaatataaatggaaggactttcaatgcagatgccgtgaattactcctttgatggaatcggagcggttgttgaaaatacccggcctattgcaaaaggcgcgcttgttaatgtgcacattgataatcctgatttagatacaagaggggaaattgtctggatacagaagacgcccatcgggaccacagtcggcataaaaagaaatgatgcgcctcgtagaggtattttagaggattattctctggctgatgtgctcatagggctgcagaggagcggaagaacaggcgtgcttgaagttgtaaacggctctgtcaggaaaaaaatatacattaaagacggcgatatgattttttcttcgtcaaatcaggacaatgacaggctcggggatattcttctcaatgaagggaagataaatcttgagcagtataatcagtctgttgaactcctgaaagaaaccggcaggaaacagggcgctgtactcgtcaggctcggttatctcaagcctcaggaactcgtccgggcagtaaggcatcaggttgaagagataatcttgagtcttttcagtcttgaaggcagcagttctgaatttgaatttaaagaagggccgctgccctctgatgaggtgattactcttaaattaagcgcggcaaaccttatacatcacggaataaaaaagattgctgacccgcagaagatattcaatctcttatgtgtgcctatggatgcagttctctgtttatcgtcaaacccgctgaacctgtttcaggatataaaattaaatgaagaagataaaaagatattgtctcttgttgacggtaggactgtaataaaggacattgtttctttatcttcacttgatgagcttgaaacgctgaaggcgctttatgccctaatgagcgtaagactcatagaggtaaaagcagaggatggagctaatggagggctttctgccgctgatattattgaagaagatgagattaagatagatgaggaatttgcagacaaagtagaaaagatatacagagagcatgagcagatgggttattacggtatcttggggattaaacaatgggcgtcaattgacgatataaagaaggcatattataaagcagccaaagagttccatcccgacaggcatttttatattaattctgacacagtaaaagaaaaattgaatgcgctcttttcctatataacaacagcctattcagccctttcaaattctcagaagagaaaagaatatgataaccgtttagcctataagacagcggcggcgccaagcaagcaggagacggcccgagcaagatttaaagaaggcaaggcagagttcaggaaagaaaattattccgaggccttccagcttttcgggcaggctgtatatattgacagtaccgcagcagagtatcattattattacgggctgacacttatcaggcttaagaggttcaaagaggctgagcgggctatgagccgggcgcttaaatatgagccctctaatttagactatcttattgaggaagggtatatctgtattcagcttggtttccgccagagggccagaagcagttttgaaaaagcaataaagattgacccgttaaataacagggcggcagaggggcttaagaatatcccttaacccatggaaaatttttttaaatctctgattaatacctttatccctatctttgtggcaatagatatttttgtggtcctccccattttcatctcaatcacagaaggcatgtcaaaggctaagagcaatgcaattgtcagagactccatacttacagccctcgcagtgagcctggcatttgttgccttaggagaggcgatattcaggatactcggcatcacagcgaatgattttaagattgccggcgggctggtgcttcttgtctttgcaatcctggacatagtaaaacacagcgaggaaaggagaaggccttcaggcaggatgggcgttgtgccgatagcggtgccgttgattataggcccggcagtgctggccactcttttagtgcttgtggaccattacggcattctgccgacgcttgtatctcttgtattaaatctgattgttgtatatttcttttttatcaaggctgaggcaattactaaattattcggccggggcggcattgcggcaatatcaaaggtaatggctatattgcttgcgtcaatagccgttatgatgatacgcatcgggattgagaatataataagagttaaaggttagaagataagatgctgattgggattcttgccgatacgcatgacaattagctgcagccctccttgatttgaataaaatggaagccgagataatagagctttaaaattacatgtgttgaggtttgacttaaaattgtttttataggactcgggttcctaaaaaattgacagcaagttttaagagcatttgcacttgagtgagtgcgcctaaaaattaacaacccgtcaaccgtttccggtaggacgggttgaggtgccccgtggggcaatccttacgagacggtaagtctcttattgagacttgcacagaaaccgccgctcaagtacaattactaatataattaccaccattaaaataatttgtcaaggaggaaatttttcatgactgaaagaaccaataatttaaccctcggattagacctcggctcaaattcgctcggatgggctttgattgaaaatgaggataatggacaaaagagaatcatagacaaaggtgtaagaatttttgaggcgggacttgataatcttgagcaagacggcaggggagagtcgcgcaatgcggcgaggagagatgcaagaagttcaagaagaaggcttgaaagattaagcaggcgacttgtaaaactcgccggtattcttcaagaaaatggttttttgccggaagggaatataggcgatccttcaaaaagaaatgggctttttactgaacttgatagaaaattggataatccttacaagctaagagcaaaaggacttgataataaacttgaaccctttgagtttggaagggcgatgtatcacatttgccagaggaggggatttttaagtaatcgtaaggaattgcccaaaaagaaagaggaagaaggcaaagtaaaggcagaaataggagaacttcaaaaaaagattgacgagtcaggggcaagaaccctcggagaatatttttcaaaggtcaatccccatgaagaaagaatcaggacttggtacacgtcaaggagaatgtacgaagacgaatttaaccgcctatgggattcgcagaagaattattatctcaacatcctgacagatgaccttaaaaagcaggctcaccatgcgatattttttcaaagagcgcttaaatcacaaaaaaatcttgtggggaaatgcgagtatgaacggacacagcgacgcgccgcatgggcgatattggacgcgcaggagttcaggtatcttcaaaggataaatgaccttgagattatcctaaacaatgaaagaagactgctgtcacctgatgagagggtaaaactcataaatgaacttgagagaaattcatccctaaaattttcaagcacacggaaggctacattaaccatcaagaaaattcttgaattacctaaatccgcaagtttcaaccttgaaaaaggcggagaagaaaatcttcatggaaataaaacagccacaacattaagggagatatttaaagacaggtgggatgaattttcacgtaaggacaaagaccaaattgtcgaggacatcctgagcattcagaatagcgatgcacttgcaagaaggggcacaaagaagtggggacttgacgaagaggcggcaaagaaatttggaaatataagtctacagtcaggttattgctcgttttcaagaaaagccctattaaaaattcttccgaaactgagagaaggatttcgtcttaatgaaattttaagagaagcttatcctgatagatgggaaatgcaatccgagccgcgtgatattcttccacctgtaaaaaatgaagatattcctgaaatcagaaatccgattgtagagcggactctttcggaactgagaaaagttgtcaatgcagtgattaagaagcatggaaaaccggaatccatccgtatagaacttgcaagggacttgaggcagaatgctaagcagagggaaaggactttcaagtcaatgcgcgaaaacgaaaaacaacggaaaagtgccgcagaagaaatacttaaagaatgtgggcttgctaatccttcacgaaatgacattctaaagtttatcctgtggaaagaatgtagcgggcattgtccatatacagataactatatagggccttctgacctctttagctctcaacctaattttgatatcgagcatataattccttttaaaagaagcctcgacgattcttttatgaacaagaccctctctcatgtagcgactaatagaaatattaagaaggacatgactccttacgaagccttttccagcaggccggaatgggatgacatcatcagcagggtaaaaaaatttaataatcaggaaaaacttaagcgttttaaaatgacggaaaaagaggtagaggaattcctcagcgatttttcttcccgccaacttaatgatacaagatatgccactaagcgtgctaaagaatatttgggtcttctttatggtggattaaaagaagatgctgctcaaggaacggaaaaggttcaggcagtcggcggacaaattactgcatatctgagaaatgtctggggattgaattccattcttaaagatggccccggaaaatcaagggacgaccaccgtcatcacgtagttgacgcgattgtcatcgcccttactgaacagagatgggtcaatgaactgagcaatgcggcaaagaatgcgccgaaggcaggcaaaagaagattcgctgcagtaatgcctccgtggaatggtttttgggatgatgtcaaaaattcagtttcaagtgtgattccttcgcatcaaattaccaaaaaggttaaaggtgctttgcacgcagagaccttttatggaagaccttacaaagacgggaagggtaagcagtttacaaaaacaagagtggcacttgagaaacttacgcctaagaatgttgaaaacattgtagataagatcgtaaaacaaaaggtaaaggacaaactcaaggaactcggcaaagcaccgaaagaagctttcaagaatcctgacaagaattcaaacctgcctcttatcaaaactaaaaccggcaaggagattcgtatcaaaaaagtccgcatagaaatgccgtttgaaactcatttgcgagttggtgaaggatacagagaacgatatgtccgctcctgtccggattccaatcatcacatggaaatatacaaagacctggcgactggaagatgggacggcgaagtagtaagtcttttcaaggcacaccaaagacttcgctctaagcagccgataattagaaaacatcatggtgaagaaaagaaattccttttctcgcttgctggtggagagacgatagagcttgatacggaagatggcaagagaggtttgtttgttgttaggactgtacctcaaagcaaacagatcgtttttgtcccaattaatgattcaagaaaacgtaaggatattggcacaacgggtctaacggcttatcctgagagtctcaaagaacggcactgtgccaaggttttgataacacctttgggagaagtccgccgtgcctctgactgacaggattatagacatatctgagaatggggctgatttaagtgtaaaacatagtcagcttgtaatagtaagcagtggcattgaaacaacagtgcctcttgtagaaatagctgttcttgtaatctcacatcctgcggtaagaatgtcccatgccgtgctttccggtttatgcgcatcgggtggtatttgcgtattctgtactgaaaaacagcttccggctggaatgctcttgccaattgaaggcaactctgttcaggctgaaagatttgtaaaacaggcacaggctccacttcccacaaggaaaagaatctggaagcatattgcaaaggcaaagataatatctcaaggaaaactattgacaaagcttaagggtaatgacagaggtctcggtttcatcgcaaacgaggttcgggctggagattcatctaatattgaagctcaggctgccagaagatattggactgctctttttggcgatagttttaagcgaaatccttttgcttctgaccataacaaattgcttaattacggatatgcggtcttaagagcaatgaccgcaagagctatatgctcatccggtcttcatccttcaatcagtcttcatcatcataacaaatatgacacgttctgccttgcagacgatttaatggagcctttcagagttattgtagatgaggcggtttatcggattatagaggacaaaagttctgatgtaccactagataaagaaaacaaaaggataattataaaaagcattgtagaaaaaagaattaatgtaggaggtgaattgaggtctttgtttgacgtcatgactaaagttactgcatcgctggcaggtgtttacactaacgaaaagtctgatatttttcttccggagttttagcgtggctgaaagcagggaaatttccgggtataattcaatgtggcttattgcaatgtttgatttgcctgtggattcaaaagaagcaaggcatagatatgcccgcttcaggaaagcccttttgaagaaaggttttaccatgcttcagttttcggtatacgcaaggttttgctcaagcgaaaaaacaagcaatgtattcaaaaaaagaatcagagagattctgcctacagatggagaagtaagactccttgcagttacagacaggcagttcggtaaaatggagatattttttggaagaaaacgggcagaagttgagaaaccacccgaggagtatcttcttttttaaagttgaaacaaggaagaaccccttgcaaatcagagtcttgcaaggggttcattgtacttgagccgcagttcctgtcaagccccaaccccaggattgattaatgagattgagttaatattgtacttgagccgcagttcctgtcaagccccaactcgcagagagagttggtcggctgttcgctcaattgtacttgagccgcagttcctgtcaagccccaacgcattttcttcaattccgacttgttatgcaattgtacttgagccgcagttcctgtcaagccccaactgagtgatatgaaagaccgcatccctgtctgattgtacttgagccgcagttcctgtcaa

SEQ ID NO: 1938 - DNA, 14610 bp, synthetic construct
  misc_feature 1..14610: note = Synthetic
  source 1..14610: mol_type = other DNA
atactattttttgaggtcacggatatcgaatgccccgagtttatgggtaacaaaaccgtgaattcagtgccgattccctcgatgctccttacttgaattttcccaccgtgatttcctacaatattattgctgattgaaagaccgaggccggtccccttggccttttgcggcccccaaacccctttagtgctgtagaatgggtcgaatattttatctagattttccttgctgattccgattccattatcggagatttccacgtaggcgttctcaatatcgtgccagatgctgattgaaataataccgttttcggcgacggcgtgaatcgcgttaatcaagatgttgagaaatacttgctgaagttgattggacgacccgtatataggaggcgtttcattataattggtaataaggtgaatgtttttgtcttttagttctttgcttatcaatctgacaatatctttgaggatctgagtgaggttgacctcgcccataccttcgttgccttttcttcccgaataagacagaagcgattgaaccaactcggtggcttgatccgccgccctgaccgcatcatcgagcgctttcttgaataaatcgttgtcgtcgcgattgttctggattagcgacaaattgccgataatgccgcataataagttattgaattcgtgggcgactcctgccgccaaaacgccgatagccgccattttttctgaatgcgtaatctgttcttcgagccgttttttctccgtgatatcaattatcactccttcaatacgtttgattgcatcggcactaccgaaacccggcgatagcaacagcgatacggtttttaacgagccgtcgcggtggataattttattttctaaagagataggcgttttggtccgcacaagcttagttattgattgcgctatttgttcaagcgattcccgggttaatagttcgcggtacaaggatggttttttcatgaattcatcgacggtgtagcccgttaatttttccacgttagggctaataattaaaagtttaccgttttcgatgtcataactccacatcgttaccggcgccgtctcaatcaagccgcgatatttttcctcggaagcgcggatttttatttcggccgacttaatttgggtgatgtcgcggatgctttcgatggcgccgacaacatttccccgcgaatcgcgtaacggcgtggcgatgcaccagagataaacctcacggccggccaaattatcgatatgggtctcggcacagatagtttcatcatgcctgacaactgagctgtagttcagggtcaatttctcggaaggtattaaagccatatcaatcaatatggggcgcttttcgccgtagaatggtatcgcatattcataattgcccttaccaagaatatcagacgaggaaacgccggtcattttttccatggccaggttccaggcgataaccacgccatttttatctattacaaaggtcgcatccggcaagaaatttattacatcggcaagcctgcgtttcgattcggccagagcctctttagcccgtttttcggccgtgatatcctgataagagcccagtattccgattgtccgccccgcgttatctttaagcggcactttgttaatcctgataattcgatcactgccatcgggcattgtcagaggttcttcataatcaaatttgggcactcctgttttgattatctggatatcgtcggcgtgatatcggtcggcgttgtttttccagcttaattccaaatcgcttttgccgattacctcagatattgaccccaaccccgtgtcatctacgaaagcacgattacagccaagatatttaaactcagtatctttccagaaaacccttatcgggatattatccaaaacggttctgagtacccgttgcgactcgcgcaatttctcttcaacatttttccgttcggttatatcgctggcgaatatcaaagcggcaggcttgccttcccaggatatcttcacagtatttacatcaagccatttgatactttgatttccgcatataacccgcaatttataattgccggtaaatcttgagtaatcttgattattcggatatttctgtaaaaatatcccacggtcatccggataaatatagtcgataaaaggtttattgattaacgtcgacaactcgcgtctgattaattcggcggttcttgtattagcaaatttaattatatcatcctgcaccaccaagatagcttcattggcgttttctatcagaacacggtacttttcttcggacgctcgaagtttttcttcgataaatttttgttcggtaatatcccttaaaatagtaaatatgatatttccaccgcgataaggtatgacggacatcgagacatcaacgatgatctgctctccggcggcgttatatctggtccattcgaaatgatggccgcctttttcaatcgccagttttatcatctgctgttccatttcgcttgataactggccgttgggttggaatttcggcgcatactggacggggcgttttcccagcaaagcggtcttatccttaaaacccagcaattttagggcggcttcattgcaatcaatatatacgccgttatcaatcaataagattgggtcggttgatttatcgaacagcaatttaaatcttatatcgtcattaaagttttcaatatccgatccccccagattgctgaaatcttccagggtcaggactattcgagaaaccgcgccttttttaagataggttgcttttccgcataattgacaggtggtgataacaccatcgcccttttgcacctcagtgaccaatttttccggcgaagggttagaatcaaattgggccaggaataacttgaattggttttggtatcctgctacgagaatatcggtaaaggcaacgcccgtaatccggctttttttaagcttaagcgtctccagccatgccgaattggcatttacgataattcctttaccgtcgataacacagcaaggtaccgggaagttttcgaaatcaaactcatcgtccggattgttatcgaaaaaacgccgattggtggactcgcgccttttcgaaagaacgtagctgataattgccgcgagcacgaccgcgcccattataatcatgcccatgattagatattccgacttgatgagtgaattaatgggcatatcatttacgttccgttttcaccggccctctaaaaatctcggggccggcgattaccatttttcttgaaaaaacagtattatcgataaacagctcgcctgggaaagaaatgccaacgcaccattttcccgacaaaccaaacgtcccggattgttttagcctaaccggttgtctacaattgatatttcggtaacttattgggtaaatttaggaaaacgattcataccgacgcgggaaaatgcgattctcgatacaaagacagcgttagtttataagcaaagcggttattgggtcgattgcgacaatttacggcgataatcccgggcggcttccagttttttagagacccttttttcgaccgatggcgatagtttgtattcgagggctttttcgaaataatatagagccttttgcttgtcccctttgatgtaaaaagcctgtccgagataaaaatcgcaagtaaccagattgtaattgttttgatttcctctctttattagcccctccttgattgattcaaaagcggcaatcaatccgtcggcatccgattgcgctcggcataccgtcgccttcagccattgtacctggcggccatcctggccgcatgcgattaaactgtctattatttgacgcgataagctatattttttttggtcgtaatatatccagcccaagctgagcgcggctgataaattaccatatttgccaaagatggccgctttttttaattcttggattccttgctctcgttggtccgccacaaacggaaggcttcgtaaaattcccagcttggccgaacgcaagtagtggaaaaagcccaaccccagataagcatcataaaatgtcgaatcaatatcagccgtgcggccgaaaagctttccgactttcagaccaagactcaacgttttaaaaatgctgccatgctgtccctcccaaacggcgttataactgtatgccgtccccaaaaagaacagggcccagggatcattcggcaggctatccagatgtttttctagagcatggcttgatgaatcaatcatagacatgaagtaatctttgcgctcgtatgattcgtcatcggccatttccatatataaaactccggccttaatcacgatggccggataataatcgggtgtttgctctataatactatcgaggcagcgatacgcctgggcgaagctatccttataggcataatataaagccttctgaatcaaggaatcctggtaacgattgggcgcgtaggttgaaccggctatcgccccagaagtcaggccgatgactattaaggagatagcgacggcttttaatttggtcgtcatggccgtcaatatcgtcatatctgaatgcgttgtccattagtttatataaaaatgtataatttttgcactttcgacatcgataaccatattttcagcccgcgatttttcgcgcgatgtttcatcggaataaacgaaattctgttatttccaaattaaatatcggtgaacttatgacgaaataagaaaataggtattcgtcgctgacttcgacctgaaccataatgggtggaggagctatggcaaacatcatcgtaatcgacgatgacaaaactttacgaaaaaacctcgctttttatttgagaagtcagggatatgatgtcgatattgctgaatcgggcgaggagggcgttgagaggataaaagaaaagttttacgatatcgtaatcaccgattgccgcatggggcagatgtcggggctcgaattattaaaaatcgctcgtagaattcgcccggcctccgatgtaattataatcaccggctatggtgatataccgatggccgtggaggcaatccaaaatggcgcgcgcgatttcttaagcaaaccgtttgaatattcccgactgcttgatataatcgaaagggcgctatcaaatcgcgaaactaaagtcacggacaaagataataaatacgagaggataatcaccaaatcccagaaaatgaccgatattttggatttgatagccaaggccgccgacacagcggtggcggtgcttattgaaggggaaccgggaaccggcaaagagttggtcgcgcgctctatccacgccaggtcgtgtcgtcgtgataaagcttttatcactatcgaaagcggcactctcaatgaacaagaactccgtcaggaattgttcggcaattgggatgaaaaagagaatcctgatcccggcggattagtcgaggccgacggcggcactctgtttatccgcgatatcgaaaagctttcgccgaatctgcaggcgcggttattgcattttatgcaggatggttttttcacgacgccggagaaattccaaaaaataaaatcggatgcccgtattatttgttcgagcacaaaaagcctcaaaaaactggtcacttccaacggtttccgcgaggatttattctacgcgataaacattatgccaatatacattccgcctttacgaaatcgagtcgccgacatatttccgttggtcagttatttccttgagaaatactcggcgaagttcaaaaaagatattaaggctttatccccagatgttttagcctggatgcagacctatcagtggccaggtaacgttgccgaattggaaaatgtaatcgcccgtgccacagcattggcgacaacagaatatatcgatgaatcattgatattcaccctaccgaaagacacgccggccagtgaggaaggccctgggttcttgaatctgacattgcgtgacaatcaaaagacattgatactgaaagcgcttcgccaaaacagcggcaatttttcgcggactgcccagcagttgggaatatcccgcacaactctatggcgccgcatgaaaaaattccagatcgataaaccggtcgacgagggaatgacgacagaatcataggtatttacaagtctgatatttgataaaggcgatccgaacagatcgccttttttattggagacgaaatatcgggcacaatgaatgcgcccctacaggatataatacaattcaggggatgtcaaaaataaaaaaggcggccattgatagaccgcctttacaattgtataaattaataaatcttacaatcgcagtttcccgataaattcgtcaatctcgggcgacccgccctgaaatatcaaataaccatcaaacggttcgcgttcggtgatttcgccggcaaaaggagtcagcatcagttctttgactttttcaggatcgtggctgtgccccagagcccagcccaattttacataagcaacttcgggaagcatgtttccggcagggactactcccagatgcattagatcgcggccggtatcgtaaacgaacatctgtacataaccccagagcgtttggaccgtcatgtaaacggcgactccttttttaaccgcgtttctcaacggctcatagagaggcttattgacgtgtccaagacccgtgccggcgataacaatccctttataaccgttatcaacaagactgtcaataatatccggtttcatgttgggataatagtaaacgatactaacccggtcgtcaaacgatgtgtcgattttaatctcgcggtcgttacgtctgtgcttgtagtcggtttttatgggagtcattttgcccggttcaaccatcgccagcgggacgtcgcctatagttcggaatgtcgagcgataggatgagtgcatttttcggactcgggtgccgcggtgaagaaggttatatttatcggatgtcgggccaaacatgcaaaccatcacctcggcaatatcggcgtgagccgcggtccagacggcgcagcgaagattgaaagcggcatctgatgaaggcctgtccgacgaacgctgtgatccaaccataactataggtacaggggaattttgtaccataaaagacaggattgcggcggtgtgatgcatagtatccgtcccatgcccgattactataccgttgacgccgttttttacctcgcggccgattgcctcgcctaaacaaatccattgttccggccccatgttttcgctaaagattccaaacagcttttcggttttgagattgcagatatccgccaattccggtaccgcgccatataattcaccagggctgaaagccggaattacagctccggtgcgataatcaagcctcgatgcaatcgttcccccggtgccgaggagcgtaacgtttggtttttcgggatcgttgggaaaatccttttcgggtattttatagtgcgcttctttataaccgatctctttggcctctttaatagaggttgccagcacgccgatattgtagccgttatgcatctttaagacaatatgccgatcattggcggtttctgaacgcggtagaattactcctttaaaagatcccttatccgtgattatttccacatcggaccatactctgacgccgagctcttttagtctggcaagagcaagtcccttataccccttgaaagaggttgaatcatttacattgttttctgattttgccattgtcatattctgcttttatttggaagctttcagggcgatttcctgatatagcgacgccccatcaagtcggttggcgtatttatctttcatgcggccgcatataaaatgaatccgtttcgtttcatcatgaaaaacgccgttagatgtctcttttaaaagcatctggatagaatcttgtacttcggggttttttatatcgattgttttataatctgcgataagttgccgaattgttttgtcgcaaccggcgccgatttgtttaaaaatggcgtacagcgcatctttggatatatcgcccgatttataggcctcaaacgctttgaccaactcgccattatagattttcagattttcccggtctttaatgttgaggtttcgcaatacactccagattaactccggcgatagtttaagtttattatagattttttcaaacacctccaaatatggcgatacaacaacttttatcactatcgattcgggtacacctgcttttacaagtcgttcttcaatcttatatgccggctctggaagttcagcgcgcagtcgggaaatccattctccggtgatttccaccggcggactgtccgtatcgggatacattctgtccgctccgggcagaattcgttcaaaaccggtagtgccgtccgcgtgcgcctgacgggtttcatttggaacgcccttagtggcttcgatagcgcgaatctttatttcggataaggccgtttgaacatcggcggcggcgccccaaacaaccaccatagcatcagtatatttgcaatcgcaagctttgcggattatttgccaatcttcgggggtaaatccggccatgtgcggtatgtcactgaccgcgagattcggcttatcatccaaacaagcaattacctggattcttccggagagctcatcggtaaaagttttcccaggttgcatcggccagcttaataccccagcgaaaccgtcgatttttattccttttaccgaccacccattattaaaagctttttggattatcggaattttcgtatctttcaaaataggagccaggtcgattttctcgccatgaattgttttttcatttataccacgtaaacgcaatgcttcttttatctgcaacagggccgcctggcgttcagcctctatacttgtgagcttttcgaccatccaggtttgcggcacgccttttatctcggcacgctgaccgccgttaattgacacattaacatcctgccgaacagacccaatcccacgcctgactaatccggatgcttttaaaatccttcccagaagctcgttaacttccatggcctcgcggggcgtttgcatatcggggccggtgataacctccagaagcggcatagacaacctgtcggtacggaacacgatatcgtggcctttgtcggatatttcccggcaggcatcttcctccaaacatagatgggtaattgttattttacggcctttatatggcacccagccgtccacaccaacaatggcggtgcgctgaaatcctgtcggaatagagccatccagatactgcttgcgcgagacatgaagctcatcgacaatagcgcaatttaacaacatcgccagcttgaaagcgatatccagcgcctctgcgttaataggaaatggcggtgtgtcgtccatttcgtaggtgcaggcattatcccgataaagctgatagataacatttttcttggttttgaattccattaaggcggtgccatcatattcgccgagctccgaaagggtcgggcgcatgtggcggataatttcgccttcgggtttatcgttgcgataataagctggacagcggcagaacagtttcctttgggttaaaagttgttgatggatttccaggccgcatttaaaacccatctcgcggtatttattgtcggattcgctaattgcaatcacctccacacaagactaaaagtcaaattatcttagtcttataagatatataattttttcaagatgtaaaggagaaaggggaaacgttttaaaacgggcctatcggcaagtccgataattggttagggtaccgggaagttgcctcgagaatcatacggccatatacagcccctctaaaagcaaccggttttttggggagaaagttaaagtagttgcaaatgtagcaatcggagtgtatattttaactatataataaaaataaaagcgctcgtactgggttttgccctggacgagcgcgggtggctccgtagagccaagccttcgaagtctctttactggagttatcaaagagaccgtcggttgagtacactatggtattagtaaaacaaaaacataattttgtcaaggaaaatgtatgaaattggaaaagggtaaagcacgggcaacaattttgggcttggatatgggaccgaattcccttgggtgggccataattgaaactgacacgaacaataaccccaaaagcctgcttaatgccggcgtgcggatatttaaggctggactggatgacctggaaaccgatggcctgggaaaatcccgcaaccttgccaggcgggaagcaaggggccgcaggagattgctgcgaagacatcggcaaaggctgattgagctgggaatcagtcttcaaaaacatggattaatgtcaaacacttttgattttaaagatgacgatgaacggcacaactttttcctgaacctcgataaaaaaatcgaatcaccctactcgctgagagccaaagcgctcgaccataaattggagctttttgaactgggcagggttttatatcatctctgtcagaaaagaggattcttaagcaatagaaaatccgcccctaaggatgaggatagtaaaaagggcgttgttaaaaccagcatatcaaatttagaaaaagacatcgccgaatccggttcaagaaccctcggtgaatatttagcgtcgcttgacaaagataaaaaaagaattcgcggtttctacacgagccgaaaaatgtacgagaatgaattcgaactaatctggaacaaacaagccgattactatcctgaaatcctaaccaatgaattaaagaagcaaattcaacacagcatattttatcaacgcccattaaaaagccaaagtcatcttataggcgaatgcgaattggaaccgggccacaaacgggcgccgatctgtttattgataagccagcgctttcgatacctccagaccgttaacaatatgcgcgttcttgaagacaacggattcaaggagcgcgagcttacgggcgccgaaagagaaaaaataatcaatatattggaatacaaaggaaaggttactttcgcgactatacggaaagaattgaagctgccaaaaggcactaaactaaatcttgaggcgggcgacgcgaaggaaacaagagggaacagcaccacagaaaaaatggtctcaatattcggcttggaccaatggaaggctttttccgatatacaacgagataagataatcgaggaatggcgcagtatagtaaaagatgataccctgaagcggcgagctataaaattatggggattaagcgaagagaaagccaccgaattcagccggcttaacctcgaagagggatatattgggttttccaaaaaggctatcgccaaattgatgccatttctcgaaaaaggtatatctctgcaaaccgccattcaagaatgttatcccgaaaggtttaaaaaggaattagaaccggtaagccagttgcctccaatagacaaatcgggtctcggcgaactgcgcaatcctatagtcggacgctcgctgacagaattacgacatttagtcaatactatcataaaagaatacggcaagccggatataatacgtatcgagctggccagagaattgcggcaaaccccaaaacaacgcgaagagacaatcaagaaaaatcgcggtaacgaaaaagcccgtaaagaagcggccgacctgctgttaaaagaggcgggaatcaccgaaccgaaaaacagcgatattataaaagcacagttatggattgagtgcgggcaacgatgcccttatacgggtcaacaaataagcgccgaagccttattcggcgaacatccgcaatttgatgtcgagcatattattccctacgagcgttcgcttgacgattctttcgtcaataaaaccctatgttatgccgatgaaaaccgccgcgttaaacataaaaaaaccccctacgaagcttattacggtacaccaaaatgggatgaaattttatcgcgggttaaggcattcaatagtcggttggctaaagaaaaataccgtagattttgtatgacgccggaggaagtcgacgcgctatgcgaggattttacggcaagacaacttaatgatacccgctggacctccaaatgggctaaaaggtaccttggtttgttgtatggcggcacgaatgaaatgggtatcgataatcagggcaaattgaaagtccaagccgtaactggccaaataaccgccaagttgcgttacgcctggggcttaaacgatattcttggagatgataacaccaaaagccgcgacgaccacagacatcatgctatagatgctattactgtcgcccttaccacgcccgggatggtgaaagagctgtctctggccgcccagcgcgcgagcaacaacataggcagattagccaaagatatggtccgcccatgggacttgttctatcgggatgtcgaaaacaaggtcaaagaaatcgttgtctcccatcggctcgaaagacgtgtccgcggagcgcttcatcaggagtcgtattacggtcaaaacaaagattccaagggaaaaccatatatctgtatcaggaaaccgattggcgccttaagcgaaaacgacgtggacaatatcgttcatgccacgattagaaaaatagtccgggacaaattgagagaaatcggcaagccgcccaaagacgctttcaaggatgaaagcaactggcccaaggacagccagggcaatagaatcaggcgggttagaattaaagtaggcggctctgaagtgtttcgtctaaagcacggtttcgtaaagtcagatacgaaccatcacatggccatttttaaagatgacaaaaccggcaaatgggattgtgaggtggtaagtctttacaaggcttatcaaagattgacgaataatcaaccaattgtgagacgcgatttcggcgaagggaaaacctttgttttttctttggcaggcggagatataatcgaacttgacgatataggccaaaacacccggtcattatacgtggtcagaaccgtgccccaaagtaaacagatatactttgtacccatacacgatgcgcggccattgaaatatatcgggaaaactggtttaactgcgcttcccagtacattggcagaacgtcattgtcgtaaagtaatcgttaccccattaggcgaggtccgctatgccaacgattagcttcaaagatagttaaggttatctcgatttatgcccgataataatatcgggcatgcaagaacgaataatcgatttatcggaaaccccggcggccttaagcgttcgttatgaccagctggtcataaaacgcgaagagggggaattccccacgccgctggccgaattggcggttttaattgtcgccaatcgcgccgttaactacacccattctgtgctggtcggtatttgcgaaaacggggcggcattactaatctgcaacgaaaagaaaatgcccgccggcatgattattccctacgccggccacttcatgcagacatccagattggccgcccagattaaaaccggccgggccacgcaaaaacgtatctggcaacaaataattaaagctaaaataaccgcccaggcgtctttattgaaagaggtcaagggggaggactggggtttgactcggatggccgaacaggtgacctccggcgattcctttaattttgaagcccaggcgtcccggcgctattggtcggcattattcggcgataagtttcggcgtctccccgaggcaagcgattccgtcaattcgatgctgaattacggatacgccgttttacgaagtttagtggcccgggcaatctgtgcttccggcttacacccatcgattggcattcatcaccataaccgctatgaccagttttgtctggcagacgatatgatggaaccttttcggccgacaatagaccgggcggtgataaatactatcggattctatggcgatacgaccggattggatcgcggaagtaaatatctgttgttggaagaaattttcaaaagcaaattcgcgataaatggcgagacgcgggatattttcgacgcggttagattcatggcgtcgtcgctggcggatgtctttgcgcaaaaaaagaaaaaaatcatcttgccggaaatctagaaccggcagtacccagctaagcttatcggggtacaagggaatgtggttgtttgccttgtttgacttgccggtcgtcagcaaaaaagaccggaaaaactacgcggatttcagaaaagcgttgttgaaacgcggctttactatgcttcaatattcggtctacgtccgctattgtgcctgtgaggagaacggccgagtccttatgaagggtattgagaacgaaatcccgccggccggccagatacgattattattagtaaccgaccatcaattcggcaaaatgcaggtattcagcaacgcaaaaataaaagaaacggagaagccgccggagcaattgatgttgttttaagcgattttaggcggtggaaccccttgtattataagcgaatacaaggggttctaatgtactcaaccgacggttccctgtcaactccagcgcagacacttaaagcaattgggcggcgtcgaatgtactcaaccgacggttccctgtcaactccagcagggacgttcgagggcgtatcgccaacgtcaaatgtactcaaccgacggttccctgtcaactccagccatattcttg

SEQ ID NO: 1939 - DNA, 17173 bp, synthetic construct
  source 1..17173: mol_type = other DNA
  misc_feature 1..17173: note = Synthetic
caatgttacatcgataatcccgagttgatgaaagatgatgaggaatttaagtccatacgtccgttgatggcttttgaaaatgcgcttgaaggggatggcgggttgcttgaaggatatttgataaacgacatggtgcgcttgtcgggtggccctgaacctttagttgaattgtcgttgcaatgtgcgttgattcaaaaagacattgaagcattctggccgcggttcattttatatgcacgcacgcatgaccgcctgccggtgcactatcaggaagcagcaatattgtattcattcttggagcacaagatagattatcgtcaatttaagattgatgaggctgtagaagccaggttcaatcaatttatgaacatgtcgcagcaatatgccggaatcccggagcagaatcttaagggattgttcagcaaccagtatggtgacacgttctggtattattacttctttgttactaatcttaagacaagttaaagggtgacggaagttcctcggaaaaagatatgacaagtgcctgcatcgaaagcgaaatgcaggcacttttttattgtggtcaggtgaatattgaataatggaagagacgcgagatttatcgcttcggacgacgtaaattcggcataattacaatttgtatgtaatatgcttttgtcaagatgtgcgaagaggccgaatatgcttctcggcctcttcttattcaatgaaatttgtgtcaaatgtgtggttgcttgttatttttcagtctcgttgctctgtttgtcattatcctcttcatcgttagtatcgtcggtgatttctcccgagtcgtcaacaaatcgtttcatgtactcgctcggatgtataccgaattctttcttaaaacatgtgctgaagtacttcgggtcgttgaatccgattgcataggcaagctctgatatgcgtatatgacgtttttcttccattatctggcatgcagcctttatgcggatgtttcggacgaatgacgagtagctgagccctgtgagcgacttcaacttacggaacagcgtggacttgcttgtgcccatgtcttcgacaaagcgcgactggtcgtaatctgggtcactgaggtgctcttgcacgattgaaattgccttctttaggaattcctcatcgatgctggtgtaattcagctcgttgacatcaaatactagttgcttcttgaagtctttgttggcgcgttcatgcgtcttcagcaagttggtgatgcgagcttgaagcaggctgaggttgaaaggcttcttgatgtaagcatcggcccccgactggtaggcctctattctatcctcttcacggtctttggctgtcaacaggatgacagggatgtgactcgtttcgagatggctttttatgtatttgcagaattgcaggccgtcagtgtcgggcatcatgatgtcggaaatgatgaggtggatgtcattatttgaaatgatgtcgatagcctctttcccattgtgtgccgccattacattgtattcgtggctgagcaggcgagccatcacttgcagcaggtcgctgttgtcttcgactaatagcagagtatattccttggcatttcgctttgattccttggcaggttcttttggttgtggaatattgctatcgttgtcgtcgacgattatttcgcgctgcactatcggtaattggtcgcgagagtcatcgatgcagtcttcgctgtatgcttccctgtttatcggaatctttatgacaaattccatgcctttgccaggctcgctgtgtccctcgattgttccttgatgcaactgcacgaggtctcgggcaagcgacaatcctatgccagtacccgaagtgttatacttccgatagtcaccttcgtagaatcgttggaacaatgtcttttgcgcttcggccgtcatgccttctccatcatcttttaccgagagtattgcatttttcttattggccgacaaagtaagagttatccacacattgccgccctccttgttgtatttagaagcgttcgacaacaggttgtacaatattttgtcaatcttgtcggagtcaaaataggcatgaagtggttcaggattgcattcgaccgagaaatgtatatcctttttcttcatgagtggcttgaaactgtttgtgcagttcctgacgaaagcggcaaggtcgccttgagacactttgagtttaagattgcccgtttctgccttcctgaattcgagaatctgctgtatgagtcttataaggcggttggtattcaccagcatggccttgtaggtgtctttgtattgtggcgcattggctttcaattcttcaatcgaagccgaaatgatggtgagcggcgtcagtaactcatgggtgatgttggtgaagaattgcaacttggcatgattcatttcttcggctttatccgaaatgaatttttcaagctctcgttcgttatacagccttatttttttctttgcgaatctgtatccaagtattatcagtgccagcaacaagacggcataaatagaatatgcccaccaagagagccatggcggaggcaagatttttattttcagcgtttgtggacggtcaatccatttaccacttgagttggttgctcgtagcacaaattcgtaggtccccggcgcaaggttattgtattgggcatatcggtgcttttcgtcgacatacctccattcatccgagtaccctttcagcatgtatgagtatctgttttgttcagggcttttatagtcaagggccgcaaattctatcgagaaattgttttgtttgtaatccagggttatttgttttgtgaaattaggcgtttcgtttgaaattttcgcacggtcgcttgcatcaagcgtcatccatgatttgccatgaataagtatatcggtaatggctattggagcgtcgaagtcggcagttttaatcttttcgggatagaaactgttgtatccgtggtgtcctccgaaaaacatttcgccatcggcttttttgaacgcgacattagtgttgaaaatgttgctttgcagcccgttggccacagtataaagcctatatattggttttgtcggttcgccgtcggtgaagatgaggtttacgagaccgctgttggtggccatccacaggtttccatttttgtcggcaagcatgctatagatgtcgtcgcccgggagttcccactcagcatgtttcgagacaaaagtatctttttgtgggtcgtacaggcttaaaccgccaccttgggttccggcccatatcctgtctttggcatcgatgagcaggcttatggcatttatggcgttcagtcgaccattgtcgggagcataggtctttatcgagtattctgatgcttctccgccttccccctccaagcgtataatgccacttgtgcgagtgccaatccactttacaccgtttttgtcttctacaattgaattgacaggtatctcgtttatgtttagtttgcctgccttgatgttgtagaatttagcataagagcctcccgaaggagagtacatcccgaacccgtattgggtcccaatccacatttgccctcggtggtcttcggtaatggcgtaaatgcggtttcccggcatccattgtgtgttttcttgcttgtagcagttcacagtttgagttgacgggtcatataccataaggcctccgtcgtaggtgcctatccaaatattccctgtgattcgggattgtgtaattgccattaccgtgtatccacgggtgcttgcaaatccaggaatctcgtcgtcgcatttccagtggccggtcttcttgttgatttgtacgaggtgttgggagccgatgccgagccacatgttgtcgttcttgtcgatgaggattgagcgcacagagttggattgcaagcgtttttgtatatcgttcaggctgtttgtgtagaaatcttgtggtggaatgaagttgaacacgtcaattcccgatccaagcattcctatccatagggagccattgtcgtcggtcaggatggaatttacctcgccgcccgaaatggaattagtgcttttgtcgggatagaagttagtcaatatctcgccggtgtttttgtccagcacgcttatccctaccggggtacctacccatattgaattcttccaaggtccttcggttattgtatatatagtgttgtcaattaatgagttattgctgttgtgcgaggtgctggcatatgtttcccacgacagcttgtccatgtcgtatgggttctttagtttatgcaggccgtagccccatgtcccaatccagatgttgcctgagctgtcttggtatatgtagtgggcagagttctgcttgttcattttagggtatgatatgtatttgcctgttttagcgtcaattctgaacaagccttcattccatgttccaatccagatgttttttttgtcatcttcaaggagagattttattgccgtttggggcattatgtcgccggtgctttgtcgtgtcactaccgtgcaagaatctttatcgggatggtaaatcacaagtccacggtcggtggcaatcattatgctaccatcacttgctggcaatatttgtgctattgggttgtttttgaacgcttggctgttgattttcctgaatgagcctgttgctttgtcgagcacgttaagcccatcgattgttcctatccacaggttatcatcattgtcgtctatgatgcatgtgatgtcgttgcaactgagaagatcccaattgtgcaggtttgacttgaatgtagtgaatgaatgcccatcatataatgaaagcccattattagtagcaatccatatgaagccgtcgttgtctttgtaaatctgctttacttcatcgctgcacagtccgtcgtccagcgtgagtgttttcttagtgaaatccagtatatggttattaaattctgtctttgcaatagagaaaacaggaaatgcgaggacattcaatgcaattgctatgaataatatgccgaatatacgttttaaatacatagtattttcaatatatgttgatcggtggtgtttttatgcaacgtatgtttatgcctgtggcatagggttttgtttgttttggttcttttgttgtgtaatattactaataatttgtcagatatgcaagaatatcgtttttaaaaaggcaaaaagcgtggttttgtctaatttgccaataagcggctcgtgaatttcggatataggaaaggcaactgttgaatattgattcaggcagttgccggtgcgaggcaagtagtaaaaagtacttgcgctaaaactgattcttagaaattgaatttttcaagtttcagtgaaccgaggcgttccatttcgggaacgagagtacggaagtgttcagattgctcgtgtttggcaagcacttcggcatcggcccaagtttcgcatatcatgtacacgtcatcacgagtggcacttgcaaaaaggtcgtaagccacgcatccgttttctacttttgaagcttcgacaagctgtttagccgcgttgagcaatgcagcgcggttttcttcacttacttgaataaatacattgattcttatcattttagaaaatattttaatggaagttttataattgtgataacttaacagggtagctttatgcctaagtaatccaacaatcgggttatgtcataattcatgacaagctcttcgggaaagtcggcctctttgaccaattcgagagcccgttccacatgtccgacatcgaatgaaatgtgggcatcgctgcctaaaatcacaggcacgccatgaattttgcaaagacgcaatatttcaagattgttggagcgtgctttctctttgtgccggaaaggattgagcgagctgttgtttatttcgagcaaagtgtggtgctcgcctgcggcacgcactattgggagaaaatcgaggtcggctgtgccgtcgcccggatgacttataatgttgacgtgtggattggcgatggcttttaccattccggccgtattttcttcttttgtccccggtgtatagcataaagagtgtatgccggctattttcacatcaaggtatttcatcatctcgtcgggcatgtcaatgtcgccgtttgtgttgagaatgttaatctcggctccaaggagcagattgactccatacatgttccttggcacgacatgtaggtttcggaagtatatcggagcacagctcccgggtatgccggaggagtgctcggtgattccaagcaatttcagtccagcttgtgatgcggcatgtaccatttcctgcaatgtgctgaaggcgtggccgctcgctattgtgtgggtatgcaagtccagttcaattttcatactccggatttttttggtgacaaaaatagtcttttgcctgttacctgtcaatatctgccaagttaagttttttgaagcctttgttaaacaattgacatttgcttgcagtggctctcgactttaattatctttgcaattagctgtataataaaataaaaaagcatgagaaaaaaattttttggtagcatggtcgctattgcgtcattggctgtgagtgtggcgtcgtgtggaggaaattctggtagctcggaatcggacggcattgacagtactgtggtagtgaatacaaagtgcgatggtgtatcggaggttatgattgattcagtaactgtcctttatactttgcaggacaatgccggcgagcatcgcatgcctaatgcgttgttttacggagccgacaataaggattcggctcgtgtcgaggaattgtcgccaagtggctcggttgcatcttcaatacattgtttcttgatggaaaagcagggcaagaaagtattgtttgatacaggtgtaggcgaacatgccggaggatgcttgctggcaaggcttgattctataggcgttgctcctgaagatatcgattatttgctcatcacgcattttcatggtgaccatataggcggaatgctccgtggtgatagcgcggcattcccaaatgccgaagtctatgtgccggaagtagaatatgactattggtcaaaatgcggagaaagcggagagaatgccatcaagaccatggctgcttacggcgataggttgcatcagttcagttttaccgattctacagctttgcctctcggcataaaggctatggctgcaatgggacatactcccgggcattcgttgtacatgtcgggaagattgcttgtaattgccgatttgatgcacggatatgacttgcaggttcaggacatgaatatttgtccggtttatgacatgaatcctgtgcaggccgtggaatctcgtaaattcttctttggctttgccgagcgcaaaaagcttgtgatggccggcatgcacatgcctggcaatggcatattggttaacaagtgatgttgtccgattaagggaaaaaacaaaaatcccggagcttcgcacaaaagctccgggattttttgtatcgtgtcgtacctgcttggctatgcttgctcggtgacgattttacatatttcgatgattgtgtcggtggctttttccattgaggggatgggaatgaattcatatcgtccgtggaagttgaggcctccggcaaatatgttggggcatggtagacctttgaacgacagttgtgctccgtctgttccgccgcgaattggttggacctttggcttcacaccggctctttccattgcttcttttgcaatgtcgacaatgtgcatcaccggcttgattttttcaagcatgttgtaatactggtcttttatttcaatctcggcgcatcctgggaattcgttgttgatttttcttgcaagatgttccaactcttttttgcggcgttcaaagcggtcgcgatcatggtcgcggataatgtaggtaagtacagtcttttcaacattgccttcaatgcctacgagatggtagaatccttcatatccttcggtgtgttcgggagtttcccagcgtggcaacattatcgcatattggtttgcaatgcgtattgagttgatcatcttgtgctttgcatatcccggatgcacgtttcggcccgagaatgtcaccttggccacggcagcattgaagttttcgtattcaagctcgcctatagctccgccatccatcgtgtaagcccaatcggcaccaaatttctgaacgtcaaatttgtgtgcaccttggccaatctcctcgtcgggattgaaagctattcttatgtcaccgtgctttatctctggatgcgacttcaggtagtctatggcggcaattatttcggctattcctgccttgtcgtcggcaccgagcagagtgttgccatcggtaacgatgagtgcctgtcccttataatcttcgagttctggaaattgctcgggcgacaatactatttttttgtcggcgttcaatgtgatgtccccgccttcatatttttcgatgatgcgtggcgatacatggtgacccgacatgtcgggcgatgtgtcgaggtgggctatgaaacccacggtcggaactttcttgtcgcaatttgacggcaaagtagccatcaggtatccgttggaatcgagagagatgtcagacagcccgagttctttcaagtctttttcaaggtgctgggcaaaaatcatttgtcccggggttgaaggcgtaaggttggtcaattcgtcgctttgtgtgtcgaatttgacatactgtaaaaaacgatctacaacagtcattttgtgtttatgtttcgtgtggcgtgcattcgtgcttgtttcattgagtcgaacaggccacgggttaataattcttgtggacgcaagcattacggttttgcgctggcaacgccgtaatggatacggatgtacaaaggtagtgaatgtcaagcgcaatgagaaaaattggtttgcttattttcaattattgacgtggtatgtttagtatgttttatggttaaggattatttttagtaaatttgtgtcaacattgtatgatattatggcaagacgcagtagacgcaggaaaaacaaaaccgtgacaggagcgataaacaaaataatgaaaacattgacatcggcggcatggtttgggctggtaatagtagtattgtattttgtgggccggtatgtggcagatgatgcttattcttctgagttggcgcatgatgtggcaggttgcgacctcgaaagcgttaaaatgcctaaggggattgacaatacgaaggtagtgtatagagggtttacagtgtatttcaacagtaaatatcatgtgccaaattgcgtgatatatgaattgacaggaaaggaaaccgacggtaaagtgcctcgctataagaatttcttggtcgatgagcaggtgtacggatgtgccgagccgcaagattacacacactcgggttacacgcgcggtcacatggctccggcagccgacatgaagtgggacagggaggtaatgaaagaatcattctacatgaccaatatttgtccgcaaaaggcaagcttgaattcgggcggttggagcaagctcgaagacaaggcgcgagattgggcgcgtcgcgacagcgccataataatcgccgccggaccaatatacagtagcgacatgaaaaccataggcaagagccgagtggtggtgcctgataaattttataaagtggttttagctccatttgcaactccgatgcgtgcgatagggtttatttatcccaacggaagcagtaaaggcccgataaagaattatgccgtgacggtagatgaagttgaagcgttgacgggaatggattttttccacgaacttgacgacactgccgagagcaaggtggaatcgtcgttcaacctgttgcagtgggacataacccgttaagcaaaaaattagtttaattgcttgtaaaacgaaagcgacactacaccataagaatggttggtgccgctttaagtgttttcacaacggaataatccttattgtgatatgcttcaaatttgtattacaaatatagcgaaatgtattttagaaattggattgtcgaggtgggaagaataataaattattgttttttaacattgtgttgtttaatggccgaggcagttatgaaaattatttaatatgttgttctataagcattaatttcataaatttgagaattatcatgaataattctcaaaatatgaaaagaatcttaggtcttgatttaggcgttgcgagtattgggtgggctttggtaaatgaagcagagtcgagcgatgagcaatcttcaatagtgcgtttgggggtaagggtcaatcctcttactcaaggacaagatggagaaaaagataattttgaaagaggtaaaagtgtttcaactaattcgggcagaactctgaaacggagcatgcgcaggaatttgcaacgctttaagttgcgacgagaagcgttgatagattgccttaagagaaataatttcataaacgatgaaacaatattgcatgaacaagggaacaagacaacatttgaaacttacatgttgagggcaaaagcggcaacagagcgagtgtcgcttgaagaacttgctcgtatattgttgatgcttaataagaaaagaggttataaatgcagccgtaaagacttgacggtaaatgattctacatcagttgacaaggttaaagacgaggaacaggaaaactatttagcaaaaatagaatgtcgaagtaatgaactgcatggtctcactgtcggacaatatctgattgacaagcttaaggaagagccaaattatagcttcaaaaacaagattttttatcgttcggattatttgcatgaatttgaagttatatggaaaacacaatcacaattccataaggagctttcatttgaacttaaaaaagagattcgcgataaaattattttttaccaacgtaggttgaaaagtcaaaaaggtcgagtaaattattgcgaattggaaagatggcctattgaggataaggatggaaagacaagaattttaggtgcaaaagtgtgtcctaaatcttctccattgtttcaagaatttaaaatctggcagattctcaacaatgtgatagttacggatacaagcacagaggaacaacgtcgtcttgagccggaggaaaaagacatcctttggaatgaacttaacttgaaacgtaagttgacgaggaaagaagtgctgaaacttttatttaatggaagcaagagccataccatcaattttgaagaattagacggaaataagacacaggcaatattgcgtggtgcatatcagaaaataattgaacgcagaagttcccaatcttataattttgcaaagatgaagagtaggcaaatcatggaagtactcaaaagcgaatttgtcaaattgggatttgatttacgaattttgacattcgattcatcattgccgggtatggaactcgagcgtcagcccatgtacagattatggcatttgttatattcctatgaaggagatgcgtctgaaagtggtattgatagcctgataaaaaagattatggcacagtgcggtatggattttgaggcggcagaggttttggcaaatgtagtatttgagcaaggatatggtagcttgagtgttaaagccatgcgtcggattttgccttttatgaaagagggtaacgattacagtacgtcgtgtgagatggcaggataccggcattccagtcgttcgctaacgaagtcggaaatagaatcaaagcaacttgttgaacagttgccattgcttcctcataacagtctgcggaatcctgtagttgagaagattctgaaccaaatggtcaatgtggtaaatgaaataatggcctgttacgggcgacctgatgaaataaggcttgaaatgtctcgaagtttaaagagcaatgcaaagcaaagagaaaagatgtcgaatgacattagaaaaaacgagcgagagaataaagatgtagacgagacattgaaaaaagaatttggattaaaatatgtcagtcgcaatgaccggatacgttacaagctttataaagaattggagaaaaacggatataagacgttgtattcgggtacttatattgcaaaagataaattattcagcaaagattttgatattgagcatataattccacaagccagtttgtttgatgattcattatcaaataagacattggaattgagctatgttaataaggaaaagggaaaacgaaccgcatttgactatgtggcagaaaaatatgggggcaaaggtgtagccgaatacaggagcaaagtgatggatttgccgttgcctgaaacaaaaaagaaaaggttgctgatgtcggcatccgaaattccgtccgatttccttgcgagagatttgaataacacgagttatatagctcgaaaggctgtggaaattcttgaaaatgtcgtcaaaacagtagtcacgacaacaggtgcaataactgcacggttgcgcgaagattggcaactcgtcgatgtgataaaagaacttgattgggaaaaatacaataaacttgggatgacagaggtgatacaaggacgtgatgatggacaaagaataagaagaataaatgggtggtcgaaacgtgatgaccaccgccatcatgccatggatgcgttggttatcgcattttcgaggagaagcataatcaattattttaataatctcaaggctcataaagatgagaatgagaattgtaagaggagaattatggttgctccaatgcctaagagtgtttttaggactgaagcaaaaaaacatttagaatgtgtgcttatttcgataaaatcgaaaaataaagtgatgacatccaatataaacaagataaaaagacgtggtggaataatttgtaaagtacaacttacgccgagagggcaattgcatgatgagactgtttatcgtcgtgtaaagaaatattcaacaggatacatgagcgtaggaaaagctttcgataaagaaaaaatcatgacagtggctaataaggaatatagagaagctttattggctcggctggacgagtatggaggagatgcaaagaaggcttttacaggcaagaacagactggaaaagaatcctgtgtttgttgcaggaagtggtactcgttgcgttccgtcgaaagtgaaagtcgtgatgtttaggtatgattatacatcgagaaagaagataactcctgacttgaacattgacaaggttttggataaggaggtgaaagacactctcatggacagattgaatgcttatgaaggaaaggatgtcaaagaaaaagcaaaaaaagcctttgtaaatcttgacgagaatcctatttatctgaaaaacggaaatgtgataaaacgagtgacagtttctggaatcagcaatggggtggcattgcatgataagagggattacgatggcaaacttgtcctcgattcaggaggcaatactcagcctgtcgattttgtaagtacaggtaataatcatcatgtggcagtttatcgtgatgccaaaggaaatttgcagtctaaggtgatgtcatttttcgaggctacggctcgggtctcacaaggactgtcggtaattgataaggattatcataaagatgaaggttggcaatttttgtttacaatgaagcgaaatgagtatttcgttttcccagatgaagactctgatttcgatccaaataacatagatcttacggatgagggaaattatactgaaataagcaaacatttgtatcgagtgcagaagttggcggataatgattattggtttaggcatcatttggaaacgagtatcaaagacgatgctcgcttaaagggcatgtcatataaaaggattagtagtttaaaaaatcttgagcgtgtggttaaagttagagtaaatcacataggacagattgtttcggttggtgagtattgattttaagatgcgtgtatgattaaaaaaactttgtatttcggcaatcaggcatatttgtctcttcgttcggggcagattgtcataagtcgtcccgggaataaaaaagatgaaagtaccgatgaagttactcgcccgattgaggatattggggttgtcataatcgacaacagcaggataacaataacttcggggttgcttgaaacattgctggagaataattgcgcagtaataacatgcgacagttgtcacatgcctacgggcttgttattgcctctgtatgggaataccatacaaaatgaacgtttccgccagcaattaaatgcgtcagaaccattaaagaagcaattgtggcaacagacgataaaatgcaagattattaatcaggctcgtgtacttgaagaatgcttaaaagatagccatagatgtatgtatgtttgggcaagtgatgttcgtagcggggatgtggataatatggaggcaagagctgctgcatactattggaaaaatatgtattcagcggtagaaggattttgtcgtggaagggaaggtgtacctccgaataatttgttgaattatggatatgcgatacttagggctgtagttgcacgatctcttgttgcgaacggtttgtttcctacgttggggatacatcatcataataggtataatgcatattgccttgccgatgatattatggaaccgtatcgtccttatgtggacaaacttgtatttgaattgtttcgcaagcatgtgtcgcatgacgatgaagaattggaattgactcgggatataaagacagagttattgtcgattccgacgcttgatgtggttataaagggaaaacgcaggccgttgatggttgctgtagcggaaacgactgcatctttgtttaaatgttttagtggcgaattgagaaaaatatcgtatcctgaatattgagtcgaataagtgaatatagggtcatgtgggttctggtgtttttcgatcttccgactgaaacaaagaaagagaggaaagcatatacactttttcgtaagaatcttgtcgaagacggatttacaatgtttcaattttcaatatatatgaggcattgtgcaagtagggaaaatgcgattgttcatgtaaatagggtgaagtcgttcttgcctgacacgggaaaggtgggcataatttgtatcactgataagcaatttggccaaatggaattattttatggggcaaaaccatctaaggtcaatgtccctggacagcaattggaattgttttagtctataaaaataaaacccgtttagtaacgggttttgtaagatttgaacagcttgaaaaattaattctattcttgggcgtaattggttgacatgtagttgattgcatgagatgtgctgtttagaatactacaaaaatacaaatttgaaagcaaatcacaacgggaaagggacaaatacagaaccaacacgggctgtttagaatactacaaaaatacaaatttgaaagcaaatcacaaccggatgcacccgcccccgacggaaacgacggctgtttagaatactacaaaaatacaaatttgaaagcaaatcacaacccacaatcacctcagtatccttggccatctgctgtttagaatactacaaaaatacaaatttgaaagcaaatcacaaccatttcccgaaaaagcccatggcgctttccgctgtttagaatactacaaaaatacaaatttgaaagcaaatcacaactaaagtgttcatcatctgaagtcgtgtaatgctgtttagaatactacaaaaatacaaatttgaaagcaaatcacaacgtaaaatttgaagtatcttcttcgggtcagctgtttagaatactacaaaaatacaaatttgaaagcaaatcacaaccacatgtcagcaataatcttaattccaccggctgtttagaatactacaaaaatacaaatttgaaagcaaatcacaacctttttcgttccgacccgtttaatgtggaagctgtttagaatactacaaaaatacaaatttgaaagcaaatcacaacctatggtggatttgtttctattcctggccagctgtttagaatactacaaaaatacaaatttgaaagcaaatcacaactgttcttggtgagttccaggcctctttacagctgtttagaatactacaaaaatacaaatttgaaagcaaatcacaacggctaatcatgtatgtattatcagccctgtgctgtttagaatactacaaaaatacaaatttgaaagcaaatcacaacttatcataataggtctacgagagaatattagctgtttagaatactacaaaaatacaaatttgaaagcaaatcacaacgggttgctcctattaatgacgaatacctttgctgtttagaatactacaaaaatacaaatttgaaagcaaatcacaacccgtaatacattatcttgttgtatcgaggagctgtttagaatactacaaaaatacaaatttgaaagcaaatcacaacgctgaagctcagaatattgaaatacaaaatgctgtttagaatactacaaaaatacaaatttgaaagcaaatcacaacgatcattgaacgttagcggagtaacagctcgctgtttagaatactacaaaaatacaaatttgaaagcaaatcacaacactaccaaatctccttctccaagtaaacgtgctgtttagaatactacaaaaatacaaatttgaaagcaaatcacaacccatcgattatgaaatgttttacttctttggctgtttagaatactacaaaaatacaaatttgaaagcaaatcacaacagcatattattaacattaaacaaagcagatgctgtttagaatactacaaaaatacaaatttgaaagcaaatcacaacaagctatcttgcaggatagtttcgccgaacgctgtttagaatactacaaaaatacaaatttgaaagcaaatcacaactatgaatttggcattgccgtctactcttgtgctgtttagaatactacaaaaatacaaatttgaaagcaaatcacaacaatcgttattgggaatctggagctaccaaggctgtttagaatactacaaaaatacaaatttgaaagcaaatcacaactcttatgtctaatgttgagcaagtcaaagggctgtttagaatactacaaaaatacaaatttgaaagcaaatcacaaccaggtgctacctgtatggtaaaaaaaattggctgtttagaatactacaaaaatacaaatttgaaagcaaatcacaacgacttgaagcttcgagcttcacttgcaaatgctgtttagaatactacaaaaatacaaatttgaaagcaaatcacaacgacttgaa

SEQ ID NO: 1940 - DNA, 23336 bp, synthetic construct
  source 1..23336: mol_type = other DNA
  misc_feature 1..23336: note = Synthetic
gggcggatatacatctgttgtttgtatgccgaatacagacccgactattcaggatgaaacgagcatagaattcgtgcacagaatgggacgtcagactcgaaaaacccacgtttacgctatgggagctctcacaaaagaccgcaaaggcgtggagctttctgaaatggggcttatggcgggcgccggagccgcaggctttacagacgacgggacaggcgttcaggatgcctcggtaatgcggaaggcactgaagtatgcgagtatgttcgggcttgtggtaagccagcactgtcaggacagttcgctttcggggaacggcgttataaacgcaggcttcaattccatgctgctcgggcttcccggaatgagccctctggctgaagagcttatgctctggcgtgatatccagctcaataaatccatccgagccaaataccacgcccagcatatatctaccaaaggctctgtggatataatcagaaaagccaaacaggaaggtattccggttacctgcgaggttaccccgcaccaccttcttctgaatgaacaaacagtggcggagtacgatactaattacaagatgaatcctccgctgaggacggatgaagataatgcggccttgaaagaggcagtaaaagacggcataattgatgcacttataaccgaccatgctcctcacctacagagcgagaaagagctggaatttctttatgcacctttcgggattatcggacttgaaagcgcactgcctctgtttggaaaggccctcatagaagatggaataattgactggcctgagctggttgcaatgctcacttgcaagcctgccgagatactcggaattgacgagacaaaaggctcgtttacaaagggcaaatggggcgatataacaatattcgaccccgaagagaaatggcagattgatgtgaataaattcttttcgaaagcgagaaactgccccttccacggctgggacgtgaagggaaaggtctgctatacaatcgttggcggggaagtgagatacagctcggagagggactgatattgaggtatctgatagacggccacaatcttgtatttgcgatgaaaaactcaggggaacagctggccggctttgaggttcaccatgcggcagatttgctgtgtaaggctttggaaagctatctagtaaaacgaaatgagcgggctgtgctttattttgacggtacaggcccgattgataaaagcttctataacagcctgagcaatgttgaggtctgcttttccggcgaggattacgaagcagacgattttctcgtggaggatatagaagacgattcggcaccatcaagccttgcggtggtttctaatgacaggggggtgcgcgatgcggcaaagcgaagcaaggctgtaataaagctcagcaatgatttctggctcgacctcgttgaggacataaaccgaaaaccgcccaagagaaaggagccggaagccaaacgaaaaggcatagacccatgcgaggtggatatgtggttagattatttcggtattgatgagtaggcagatatgaaatatgaaaaggcacgtttctggcataaaaaacttggcagcactgtaaaatgcgagctgtgcagcagggaatgcgtgataaagaccggtgaaacgggtttttgcggggtaagacagaatgaacagggcgaactgaaaacccttaactaccactgcctctgctctgcaaactcagataagatcgaaaagaaaccgctgaaccacttcctcccttccacttcaagcttttccatctgcgctcccggatgcaatttcaggtgcaaattctgccaaaactggcagataagccagataaatcagcagctgctggagaggacaagcaaagtttgccctgaggatattgcagaggctgccctgaagcataactgcaaaagcatctcttacacatacacggagccgacaattttttacgagcttgcagaagacactgcacttgctgcaaaagagaagggtctgaagaatgttttcgtaactaacggctatatgaagcccgcggtttgggagaaggcctcagaatggctggatgcagcgaatatagatctgaaagcaaacactgaagaattctaccgtgatttctgctcggcagctcttgcccctgttaaggaaagcatcaaaactgcgtacaaactcggaatatggatagagctgaccaccctgctgatacccggactcaacgacagagatgaagaaatacgctctacagcagaattcattgcgggcgaggtgtctgaatttgtgcctttgcatctgtcggcattctacccttgtgcagagatgagagatacgcccgctcaaacgcctcaaagaataaaagaggcctgcgatatcgcacgagaagcagggctgaagtatgtttatccggggaatgtaatgctcgatgcaaatacgtactgccacaactgcggaaggcttatcatctcccgatcaggtttctcagcagacccggacggagtgtctaacggaaaatgcgagctctgcggggcagagatcccgggagttttcgaataaacgcagcagagtgggctttaatcccctgctctactgctccagcttcgattcagactgattttctctatgggaaagcacgctcctcacagcgtaggtcgggcggttttgcgattcgtgatatgttcgaaccataagctcagcaagcagacccatcattataagctggagagcagcaatcgttaggattgtgccgaggattagaagcgggtttctgttgatggagtatccgtttgctattttctggtatatcataacaacaaacgaaaagcctgctgccagtccgctgtatatgctgaacctgccgaatacgtagagcggctttgttgaatagctgttcataaacgaaacagttatcagatccagcactaccttatacgtacgtgataggttgtatttcgttttgccggctttacgcgggcggtggtttacctcgatctcgcctacctttgccccgagccactgagcaacagcgggaatgaagcggtgagtttcgccgtagagcttggtttggcttatcacctccctgcggtatgccttcattgtgcagccgaagtcgtgaatgccaacgtttgttatcctgcggattatgaaattggcgagcattgatgggagccggcgggtgaatgccctgtctttgcgggattttcgccagccgcttacgatatcgtagccttcatccagctttgccataagggcggggatgtctgcagggtcgttctggaggtcgccgtccatggggattatcacttccccccgggcacgttcaaagcctgcctgcatcgcagctgtctggccgaaattacgccgaaaattgaccaccgttacatttgaatcattgctgaatattcctccaagaacttccgctgtcccgtcccagctgccgtcgttgacgaatattatctcatagctgtagtcaacgccgccggttttcatggctgaagctatctgttcatgaaggggctgtatgttatcccgctcattaaacacaggcactattacagatatatcaatattttccgacatccatattctcccaaggaattaactcagcttacgataaaccccgcgtcttacaaattctataacgcctttatcccgcagcacctgaagcttctgccgtatttttgccctaacgttattgttattcggatacttactgctcaaggatctttcaaaactgtaaatctgagccaaagtgaaatactcgctttgaatctgttcaacgattttgagtacatctatcagccattcacgctgatctaatttgctgttttccaaaaagctggtcttgttccattctctaagcacctctgcttttggctgtatttctttatttctaacaatataaaccttgccgctttctggaattttgttaagcagtatatcgcagccgacccatccacttctcttcgcgtttttcgccaatggctttctcttttctataatatctggagtgaaatagaaatttggtataacaagaaaattgctgaccatccactcagttttatcataggttagaaaaaagaagttagggttttcgctagacacaatcctttcgatcatttttttatatgcgctgtctggtgcttttttgccaactctttccccgctcctgcttttgagttcaaattgttcactgcaacgcttgcagtacaaatcagccacaggttggttgttagggaatgaattaagagccaaatttccgcagcttgggcagtagcagtttttctttgcccaatgttccgttaaaactcgagcaacctgagatttgcttctatagccttctgccttagtttgatcaaaatacaaattcacaaaaaattccagaagtaaagtaaactccgcagctatttcaaggctttcattgcgatgtcggtgcggaaataagcgccttcaaaatcgatctgtccagcggcggcgtatgccttttctcttgcggcttcgatattctcgccaagagctgtaacaccgagcactcttccgcccgcagtaaggagctctccgtcctgaattttcgttcccgcctggaaaactttcacatcctccatcgcctctgccctgctgatgccagtaatcttttttcccttttcgtattctcccgggtatccacctgaagatatcaccacgcacacagccggcctcttatcccattggagattcacatcttccagccttccctcgcaaacagcaagcatcacctcgagaagatcagttttgagcctcattaggatcggctgggtttcggggtctcccatacgcacgttatactccagcactttcggcccaaccttcgtgagcataagccctgcatataaaacgcccctgaaaggagcgcctgccatattcattccgttcaccgtaggcacaaggatctcgcctatgattctgtccataagcttttcatcaacgatatccgccgggctgtatgcccccatacctccggtattcgggccggtatcgccttcgcctatcggcttatggtcttggctggtttccaaaacgtagatattccttccgtcaacgagcgcaagaatagaaacctcggggccggagagcttttcctctactacaatcttgctgcccgcatcgccgaaaatcttattctccataatctcttcagcagcgtttatagcctcagagggctcatcgcaaacgtaaactcccttgccctttgcaaggccgctggccttcactacaagtccagcatctcttgtagcgatataatccttggcatcctcgaaattctcgaacgtatgaaactcagcggtggggatggaattagcccgcatcatctttttagaaaaatccttatccgcctcgagcctggcggcatctttagaaggcccgaaggccttaatccccgcagcctctaaggaatccacgagccctgcagcgagcgggtcttcagggcctacaaccacaagccctatatttttgtccacagcaaatttcaccacggcatcatggtcgcttatatcaattgctgctgtagggccgagctttgccattcccggattgcccggagcggaatagagctttgtgagctttttgctctgtgataatttccaagcgattgcgtgttcgcgtccgccgctgccgataataagtacgttcatctcaagctcctttacttcaccactaccttcgcgaatctccgtttgcccactttaagcaccatcccgtcttcgggctgcacttgggctgacgggtcgctcattttctcgccgttcacgctcacgccgccctgcttcacgagccgcttggcctcgccgccggaggctgcgagccccgcttctgctaccattttgctcaaagcgatcggctgagaatccaaaaccgcctccggcatatcatcaggaagctctcggcgggcaaacacctgctcgaaatcttcctccgccttttctgcggcctcactgtcgtaaaactggcttatgatatctttcgcaagggcagccttagccttcttcggatgcgttttttcggagttgatcagctcggcaattttcccaaaaggcacatctgtaagcagtgtgaaataattctccatcatctcatcgctgatgctcataatcttgccgtacatatctgagggctcatcggtaacgccgatatagttgttcttgctcttgctcatcttctcaacgccgtcgagccctgcgaggataggcagggtcatcactatctggggtgcctgcccgttgattctctggaggtctctgccagcaaggttgttgaatgtctggtctgtaccgcccagctctacatcgctttcagtcatcacagaatcatacccctgcatcagcggatacaggaattcgtgtatgcttattggttcgcacttcttgtatctctgctcgaaggtgtcccgctcgagcatacgagcgacagtcattgagctgcacagcttgattatcgctgccaagtctaaatccctgagccattcgccgttcggacgaatctcaagcttatcctctgaggtatcgaggatcttctctgcctgcttgaaatatgtctgggcgtttttatctatatcttccccgctgaggacggggcgagtggtgttctgccctgtggggtcgcctatccttgcggtgtaatcgccgataatcaaaacagccttgtgcccgagatcctgaaactgcctgagcttgcgcatcacgacagtatgcccgagatgcagatctggggctgtaggatccataccaagctttattctgagctgcctgcccttttttcgggcatcgattaacttttccttaagctccttttcggagtatatctcaaccgtacctcttttgagaatctcaaaagactgctcaatatcctgcgtcatttattcagttgtcctgtaaagaaatctttcaagtaacgtttacgatgtatgttataaaaccagctgcagcgattactgaaataaccaaaatggcaatccacagcattgaaatatatttgccctgctttgcaatctgcacattgagctttgcaaactcagcacacatagactcttcaaacccgcagctcttatcaaccgagcttttcacctcggcgattttctcctgctgaagccttgcctgctctggaatttcctttgccacctcagagaactgctcagtaacttcggcctgctcttcgaggtgcttatgagttttttccataaggtcggtttgtttttcggtaagctcggggatcacctcaaaacgcctcagcagctcgctctgctgtgaaacgtgcttctcgagatggccgttaatattttcgagcttgtcaaccataccatcaaaagaggaatttagcttatcgatattctcctgctgggtttttctaagctggagctccttctcttccatgagctcggctttttttgtaaacttctcgaaaaagtccgtcttgctctgctgctcgccggcatctgcctgctgagagttctttttcttcggcttgaaaatgtctttgagttttttcatgtaattaagctctccttctagctcactttcttatttttcccgctgacaggcgttttcttcttcctgctgccaaacagatcttttttcccgtcaaccacgtttttatcaatcttcagtacgctgccttcctttttctcgtccggcaggcgatacattatatcaatcatcagctcttccactacgcctcgaagcgcccttgcgcccgtatcacgtttgagggctttttctgcaagcacctcgagagcgccgtcggtgaattcaagcttggtatactccatctcgaacagcttaacatactgccgcacaatagcgttcttcggctctgtcataatatttacaagcgttttcttgtcgagattttcgagcgaggcaatcagcggaagccttcccaccagctcagggataattccgtaatggataatatcctccggggctgccttcttcattatctccgcccgttcgaggttcctgtctcgggtttggccggagtcttccgcgccgaagcctatagccttcttcccgagccttcttctaacgatatcttcaaggccaacgaaagttcccccgcagataaacaggatctggctggtgtccacctgtatgtaagactgctcggggtgtttgcgtcctccctgcggcgggacattcacaacagttccctcaagcatcttcaagagcgactgctgcacgccctcgccggaaacgtctcttgtgatagaaacgtttgcggaggttttgccaaccttgtctatttcgtctatataaactatgccacgctgagccttctcaacatcataatccgcgctctggagcagcttgaggacgaaattctctacatcctcgcctacataccccgcctctgttaccgttgtagcatcgcatatcgcaaacggaacttcgagctctcttgcgagcgtttttgccagcagggttttgcccgagccggtagggcctatcagaagcacattagacttatccagctccacatccggcgaatcgttctggaagtgaatcaggcgtttatagtggttgtgcaccgcaacagcaaggaaccgctttgcgtcgttctgcccgattacatactgatccaaatattcctttatctctcgcggagtggggagcttttccggttcaaagctgcttttcggcacttcaatttgctcggcaacgattttactgcatatttcaatacactctccgcagatgcatacgtcttcaggcccttgaacgataggcctttcatcggttgcataacgcccgcagaaactgcacatttgagctggcttattctttcctgttttagccatatattcctctaaaaattttcttttcgaattttccggcagggttattctataacatccaccccctgcctgcaagtaaagtttacattcaaaacgtcatatatgtgcgggaaattaaaaattcaatcattcaaaattcaaaacaaacccgcaggagcgggcaaaagccggcgagaggttgtcaaatttgcccttattctgtcaaattggcacctgctgccccgaattaagcgtgtggaaacggctctgccgggctctctgcgaggggctgagtttggcacggcgcttgcatatataaaagcgaaatgaagccggccggctttaaggtgttaggaaaaatgaaaatgttaacgaggtaaatcgaaaggagaattaccatgaggaacgtactttcaagaaggaacaataatcagactccaaacgcacctatgagtatggcagataagatcgacaggatgttcgatgatatgttcagcggcttccccgctttcgggcctgcggaaggattgatgagcaaatttgtcccgagcgtggatgtttccgaggacgagaagaactacttggttaccgctgagctggcgggcatgaacaaggatgatattaatgttacgctgaacgacaatacgctgatcctcgaaggcgaaaagaaggacacaaacgaagagaaagattcaaactattaccacgtagaacggacgttcggttcgttcaggagagtggttccgtttgctcacaacgttgatgagaacaaaatcgatgcgagcttcagcgacggactgctaaagattactgttccgaaaaccgaagaaggagccggcaggaagaaaatcgagatcaaataattaaacaacccaaagccccgagaaatcggggcttttttttatgcggcgggaaaatatttgattatattatatcattattacttgattctaacttttaaaatgctaaaattaaatttaaaatctttttgtattttataaaaggaatgttgggattggcaggtttaaatctagaaagggcaagaggaatgctcttacccttagaaaacaataaatgaggggataccgaatatggctaaccccgcaacctttgctaagcaaaggcttattgtaacttgctttcgaatattattatagcgtttaaaaaataatttcaaggaaaaaggttttacaaatggcaaaaaacagagttgttttaggactggatataggaattggttcagtaggctgggctttggttaatcttgaagaagaagaatatgattaccaaacatacgaaggcgaacacaagaaaaaactaaagatatcgggaggagaaataatagattcaggcgtaaggacttttcagccgccccacaatgaacaaaaaagccttgcaaaaataagaggcgaaaaacgaagggcaagattaacaggaagacgcaaaacgaaaaggatgaaaagatttgtttctcttgccaaggaatttgggcttatagagccaaacataagattcaaacaggcctgcaggaaaatgatcccccctgccagcaccgacaaaaacaaatggagcccatggaatattagaaaagaagcactttcaagaaaacttacaaacgaagagtttttccgggctttgtatcacatagcacgacatagaggcgtttcatttctcacaaaagcagaagaatcagaaaaaccatccggatcttccgaagaaggaaaggttaagaaaggtctgcagaatatcagagagcagctcaaagagagcagatgccaaacaattggcgaaatgttcgctgttaattttttagaaggtgaaaatgtcaggcttcgcaattctgaaaatgattacactaaatccattcaccgaaatttacttaaagatgaaactataattatttttaaaaaacagaaagcacttggcaacgaatcagcgagtgatgaactgcttaggagatatcttgatgaagtgctgctttatgaagctggaatacaggaagataaactcctcaagatgatgaaccggtgcaaattcaccggcgaaatatgcgctccccgcgaaggctatctcaatgaacgctacgttttgctgaacaggctgaacagtcttctgataggcggaaaacctccaactgatgagcaaagggaaagcatcaagaagcttgcctataaaaacaaaaaactgaaattttcccaaatccgaaatttccttgatattaacgaaaatattagattcaacctttgctcttaccaaatggaaaatcctgaatataatcagaaactgtcctgcaaggttaatgaaaaagaacctttgtttgaagataaacatcaaataaaagcggcagcaattcaatcattagaccgagagaccggaacattagagcacgtggaagattattcgcaagaatataaagagcttataaggaaggtgtatgcaaggagagcagaaaagtacggcagttcgaaggttcaaaaaatcgacttttattattatattctaagagccaagctcgagattccttcaaaatacaggtttgtccagatactgaacaaataccctaagggagaggaagaattcaaaagcaaacttgagtatctcaaacaatttgaatcaaagcaggatttcgttgaattaaagggataccacaagataaaagactgcatcacaaataccctcggcaatgataaatggagtgagatagctgatagccctgaaacaatagaggcaatttctgaggcccttgtttaccataaaacagatgaaacaagaggaaactattttaaagaaaaaggtattgatgaagagattgcaaaggctgctctttttatcaatatgaaggaagttgccaatttttcaaaagaggcttttcaaaagctgcttccgcatatggaagagggtaaatattttgaagatgccagaatagctgctgctgaaaacgatccccgcttcaaagataaggaacatgaaaaacaatccatactccaaccctaccatggggattttgaaaataatcctgttgtaatgagaaccttcagccaaacaagaaagctgataaatgctgtaatcagaaaatactccagcgaatacccaatagaccaaatcaacatagaaatagcaactgaactcgcttcaagccagaaaaagctcaacgacatttacaagaaacaaacacgctacagagatcagaaagagcaggccaaagagctttgcagggaattcgggctcaatccggaagaaggccagaatctgctgagattcaggctcgcaatgcagcagaaataccgctgcccttatacgggccaatatatccacgcctgcccatacagcggcgaagatatttcaggcagtctgctggactgcgaaattgaccacattatcccgataagcaggtcattcgacgacagcctcaacaataaggttctctgcacaaaaaaggccaatcaggaaaagaaaaacatgctcccctttgaatatctaagcaaggatccaaagaaatgggaagagtttgtagttagagtggggcatatgggaacaatgccttctgccaaaaaacgaaagcttcttacaaagaaatttgacgaggaagataaagaccgcttcatttcaagaaatcttaatgataccagatacgcagccaaagagattgcgggttttctcaaaaaacatctcgatttttcaaaatcacaaagagaagacataaacgaaaagagcagagttcagctcagatcaggaagggtaacttcgtttctgcggtatcactgggggcttaagaaacacagagaagaaaacgatcttcaccacgctctggatgcaattgtagttgcctgttcaacacaggggcatgtttaccttgcttctatgatagccaaagatttggaaaataagggaaaggcaataaacggcaggcttaaaaactgcaattttgagccgtgggagagtttcagagaagatgtgctcaagaagttagacgatatctttgtttctagaatgccgaggaggaaagttaccggagaagcccattctcaaaaccctaaaagctggagaaaagcaaatatcaagggaagggttcagccgttcaacaagggattttgcggaatgggacatatcgtcagagcagatttttacaaaggacctgacgggaaaaactatgctgttccgctttacgcatctgattttgcagcaaaaagccctcttccttcgaaatatctttcaaaaggagatacgccgtatgaagactggccggaactaacaaatgagtttgaattcaaattttccttatttaaagatgacctcgttaaattccaagatcaaatgtattacatagattatataaggggggggaggcctgtgatatcgctaaaaaaatatgatggatcttcatttgacgaggagggaaagagtttcactaaagaattctcttacaaaaatgcaaaattagaaaaatttgaagttgatatgatgggaaaatattattccgtaaaaaaaccagagagagaaggtaactcatatgaaaaagaatggaaataatgctaagaagcgtttctctgagtgtttttttaaatcatttccgcttgtaaactccttcatatcaggagcttacaagcggcgaattgtaagcgatatgaaaatgaaagcaagttacaactccgtaacgcatgcctctaaactgcacgccattgtaagcgatatgaaaatgaaagcaagttacaacgtttcctccgtttttaatttccgattcggcattgtaagcgatatgaaaatgaaagcaagttacaaccagactcgcaaagggaatcgaaatgggcgcattgtaagcgatatgaaaatgaaagcaagttacaaccagactcgcaaagggaatcgaaatgggcgcattgtaagcgatatgaaaatgaaagcaagttacaacgacaccgtgtgcttcagcttcgcttcgcagattgtaagcgatatgaaaatgaaagcaagttacaacgacaagcgtatattggtttgacgatacagattgtaagcgatatgaaaatgaaagcaagttacaacttcggctgacccgcttatataccaagtagattgtaagcgatatgaaaatgaaagcaagttacaacaaataaggttaactgttcaagagctgcgctattgtaagcgatatgaaaatgaaagcaagttacaacatttttcagcttcttcttttgtgccgaagcattgtaagcgatatgaaaatgaaagcaagttacaacgcaagggttatcttacagatagtttttggaattgtaagcgatatgaaaatgaaagcaagttacaacttgacgcaattgtaggatattcgtccgcacattgtaagcgatatgaaaatgaaagcaagttacaacgttcattttcgcagcactacaattcagagaattgtaagcgatatgaaaatgaaagcaagttacaacataaaatcgccatcacgtgcatatccattgattgtaagcgatatgaaaatgaaagcaagttacaacacaacgctgtattcggacgattcaaatatatattgtaagcgatatgaaaatgaaagcaagttacaacgtagcccttagcgtcaagcacaccctctatattgtaagcgatatgaaaatgaaagcaagttacaacaagggttgacaaatttcgattttcgattaaattgtaagcgatatgaaaatgaaagcaagttacaactaaccttgttatattctgcgtgtctgcctcattgtaagcgatatgaaaatgaaagcaagttacaacgctccatggctttaactgcattctctttaattgtaagcgatatgaaaatgaaagcaagttacaactttaggggggggggggggggtagataatgaaacgaattattgaaatatcagaaaattcctgcaaactgaacattcgttatggccaattggtaatcgcaagccaaaatggtattgaacgatcgatcccatgtgaagatataggaattctcctgatagacaattcggccgttttatatactcacagcgtttttacagagctgcttaactgccgggcagcagttgttctttgcaatggagaacataaccccgcaggtatgctgcttcccatagattcaaattctgttcaaacagaaaggcagaagcagcaaacccaagcctcccagccattgaaaaaacgcctctggaaacagcttataaaagcgaaaataactcatcagggaaaaataatatcaaattataatcctgaagtcggaatagggattgctgagcttgcctctaaagttaaatcaggtgatcctgaaaatattgaagcaagggcaagcaggcttttctggaaatattttttgggcggaagaaaattcaagaggcaaagaggtggcgaaccgccaaataatctgcttaattacggctatatggttcttcgggctgctacagcgagagctatatgctgtgcgggccttttgcctactcttgggatacatcactgcagcagatacaactctttctgccttgcagatgatataatggagcctttccgaggctatatagaggaaaaagttctgaatatatggcatgaaaatcctaatcccgctgagctgcaggatttatctcaattacataaagcccgcctgctggaaacgctgcattcatccatcgaaatggaaggggtttccgggcctcttatgacaggtcttcataaaacagcagcatctttaactaaatgtttcgataggtcagcaaagaaactgagccttccagagctttaaggaaaagattatgaatttaagcgagtacagaatgatgtggatttatgttatgttcgatctgcccactgatacaaaaatggcaaggaaaagttattctatctttcggaaaaatcttatcaaagacggcttcacaatggttcagtattctgtttatgaaagattctgccccagcaaagaaaatgcagaagtacacaccagaagagtagaaaatttccttccgcctgatggagaggtaagggttcttgtagtaaccgacaagcaatacgaaaaaatgaaggttttttggggcaaattgagccgtcaaaaaccccctgccccaaaacagctggaacttttttagtttttcattccccgataattttaacgagaactcttttctttctgttgccgtcgaattcgccgtagaaaacctgttcccacggtccgaagtcgaggcgtcctttagtgatcgctactaccacttctcttcccattacagttctcttgaggtgcgcgtctgcgttgtcttccatgccgttatgcttatactgcgaatggggcttttccggagcaagcttttcgagccatttttcatagtcttgatggagtcctggttcgtcgtcgtttataaatacgctcgcagttatgtgcatagcgttgcataggagaaggccttcctgcacgccgctctcagcgaggcactgctcgagatctggagtgatgtttatgagctgtcttctctgcttaatttcgaaccagagctgttttctgtatgatttcataattatcccttcttttttgaattcaatttttcatctcgcctgcggctaaaaggataacactaaacgagccttgtttaaagctaattcagcagtaggtatataaatgaaaccgcagagataaaaacgcagtatatgctgaagtattttagctttctttttctgcttgcttttatcaggagcttgagtgcgatgatgcctgtaaggcaggccgagagcatccctgatacaatcacgcccggagtcagcacgcccgcaccgaaaagctccttatgctcgagagcagtgagaagtgcgccgccgaggatggcgggcatcgcaatgagaaagctgaattccaccgcccatttgcggtgcaggccgtataggatggctgcgcatatcgtagctccgctgcgtgaaattcccgggataatcgctcctgactgtgcaacaccaatcagcacagcgcctataattccgaaatcgtgaaatctgattcgagagcgtttctttttgtctgtaatgtagagcagggctgctgttaccagccacataatgcataccagccagagctttcgtgagccttggagaggctcctcaaagagcttgtatataaccactgttgtaatggttgttatcactgcgcagaaggcaaaatgccaagcgaaattcttcttgtacagctggattgggtttaggccggtgcgatggaagcttagcagattgcgggcgaaaagtgcgatgccctcgcggaatacaacgataatcgagaacactgtgcctacgtgtacggcaaggtcgaaaaggagcatctctttgctttccgggtctaagctggggatgaatgtttcgaacatcaccagatggccggaggaggatacggggaggaattctgtgagcccctgaacgaagccgagccctatagagccgcttaggccggagaggtagtcgcagatctggaagaggcaggggtttaaaagctcacctgcggaatgtacccagccgaaaagcgaaacaataatgaaaatgattccggcatataggccggccataatgtcgtctgcgaggatgccgattccgcccaagagactctcgaggcggtttgccggccagattttcgctatatcgaaaaagcggaacaataggaataaaattccgatgcttatcaaaggatatgaggcaaatgcggaaacgaatgaaccgatgagcagagcaagcccctggccggcgaattcatccgataccacctcggacgggtcttccctgccggcaagctgaatagcgtgcgaagagaatgctgctgtagcccaggagaagaagactgtaaggccggcgagtgcgagctggctcggccagagctgaggggttaaagctgcgattgcaatgaatacggcgcagggtagaagcgagccgacagtgcccggggcgaaaggcgaaaagcccagcccgaagcatgaggtgataagcctttttgtgttcatagatagattgctcttgcgtttaataattaattaagactgtaaacgacggtgcagattataacaaaaacacaaaaatattaagccaaaaatcgcaagagattctgcttttaagccagaaaaattcccgattcaatgagattatgtattggcgaatcaggggtcagtttttaatctgggatttccagtctgaattatcaaaataatccacaacattggagaaagcctttttgagctcgttgaaaaagcccgaaagatctgtgcagggtgtttgttttgaggcgttttcaagatttaaggcggcttgggcaagtttatctgcagctatgtatcttgccgagcctttgattcggtgcgcataaagacacacctgtccgcagtctttgccggcaagcccctcttcgatcttgtcaaggcagtattttccgtcttcaacaaaaacatccaccagctcttctactacttccggagatgcacagaattcagagagagagtcgagggaaacaagagaactttccgtataacccatttccgaatctcctatcagtattttaattccgcaaaaaacggaataatgtttcataaaacaaaagcaaaccgcctgtaagtaataacacgttacaaaaagagcgttaattttgttttagattagaaaattttcttgttaaattttagaattaaaataggggcatgtcaagaacgaaagacggttttataaaaaaatctggccaaaaagattaaaaccgcaagaatatatcttctggatactaagattttttagttttctgcgagagtttatatgaaagaagatatcagaaaatacgcacttgagcagggatttttgagggctgggtttgccagcgccgaagatctgccagcagaaaaccgccagcgttttggaaagtggctcgaagcagagatgcacgagaacacaggttatctcgaaaggaatttagataagcgtttctcgcccgcaaagctctttaaagatgcaaaaagcgtgattgtgtttgcggcaggctataataaagcgcagggggaaaagcccgattcagagcaggcagggaaaatatgcgattatgcctgctttgaagattaccacagcaaaatcaaaagcagaattttcaatatcgcagattttatccgtaataagtataaatccgatctgaaaatcaaggcctgcgtggattcagtgcctataaatgaaaggtcagaagcagttcttgcagggctggggtttatcgggaaaaacgggatgctgataatcccgggtaagggatgccgagttttgctggggctgcttataagcaatcttgaaatagagcctgatgaaggagttatcgaaaaccgctgcgggagctgccggcgatgcattgaggcctgcccctccggagcactcggtgaaaacggactacttgactgcacgaagtgtatttcgtttcaaactatcgagaagaaaaccgaaatgaacagggaagctgaagaggctttgagcgaggagctcttcggctgcgacaggtgcatcgatgtatgccctttcaacgaaaaccagcaaagcagcttcctgaagcagaggcttaataaatggctgctgattgatgaaattctggaaatggacagcgacacattctctgcgtctttcggcggaactgttgtcgaaagaaccggccttgaaaaactaaagagaaatgccgaggcaatctcaggtaagaaacgttaaagctgagctttatcttacactgaatccttcggacaatccttttttcaggttttcgagactctttttctgtttgggggtcagggaggttttgtctttgccgattaggcatacccttacggtacttttctcgccggcccagctgtggtccgggagacagggcttctggtttttccacctgtgtgtaggctggataagcccgtcgggcgtatcgccgagattattgcagattacgaaatggtaattgagctgctcatctgaaacgcagccgttcatttctgcaaccagcgacaaatcaccagaacgcgttgctgtgaattcgacatcaacctctgaccatcttgccgactttactcctctggccaaactcaaaacatcaccgctttccatagcagatacaccggaagtgtgggctttgaggctgtagccggagaattcgataggcttatcactgcttgtatccataaaaagaagcgcaagcgtaccgatagtgagtgatacaacaagaaggaaactgaccctcatcatcctgactcggtcgttcatttaaataaaccctccgtgattaagttacagctaattcggacggatatataatagcaaaagataaaatgtaatcaagaatttttaccggaaaatcagaattttttgaaattttttcttgaaaaaggccgcaaaacctctcaattcgtgatgttttcacatgaaaaccggcggtaaagaagcccattctctcactgttatcggctggattatctaatcgcagcaaaatacaaaaagccgctcaacaggacttgccatattaagcggctttgaagattcaagggatgcaaagctaagcggattttcagaacagcccttccactttgcctgtctgcgtatcaacatcgattcttctgaaggcagggtcagagcctgtaccgggcataagcttgattgttccggcaatggggacaataagccctgcacctttataaaccattatatcccttacagggagagtaaatccttccggccttcccttaattgcaggatcgtgcgagaggctcaggtgcgttttaaccatacaggttgccatctttgagctgtcagggtcctgctcaatctgctgaatcctctcctctgcctcaggcgcaaattcaacaccatcagcaccgtacacctcttttgcaatcagttcaatccttttctttaccggcatatcaaaatcgtagaggaatttgaaatctgagggctcatcagccgctctaatcacagtttcggcaagctcttctgccccctctccgcctttcagccagtgctctgaaacagcgcagtatgcaccagcagcctctgcggctgtgcgaattgcttcaatttctgcaggggtgtcggtatggaagctgttgatgcatacaacgggtgttaccccgctctttattaccgtttcgatatgtgctttcagatttgagcagcccttctctacgagctccacattttgctctgtgtattccttgggcaggggcttgcccggcttaacctccgggccgcctccatgcatcttgagggcgcgaaccgttgctacaagcacaacagcatcgggcttgaggccggaatatctgcactttatgttccaaaacttctcgaagccgatgtctgccccgaagccactttcggtaacgtggaaatcaacgagattagagccgaggcggtctgcaattacagagctctgccctatggcaatatttgcaaacggccctgcatgcacgaaaacaggatttttctccattgtctgcatcagtgttgggtttatcgcctcaacgagccaagctgtcatagctccggctacctcgagatcttctgttgtaatctcttcgccggatttgctgtatgcagcgactattttgccgattctctcacgcaggtctttgagatctcttgctacagcgagaatcgccataatctcacttgatacactaatcgcaaagcccgaatccatctcgaagccgtccatcttcccgccgatgcccatacggatattcctcagtccctgagcgcagaaatcaattacccatttgagctgaactttttgggggtctatatcgaggcgttttagatttctctgggcgagcttttcgtcgtcgtagttgttttcgtgctgcattctcgcatttagggcaaccatacaaaggttatgggcgtttgtgattttatctatatcgcctgtaaggccgagggagaatggggtgagcggtatgcactgtgcgagtccgcctcccgctgctgagcctttgatgttgaaggttgggccgcctgaaggctgcctaatcgcccctgctacgctctttccgagccttccgaggccgtccacaagcccaatggttgtggtggttttgccttcgccaaggggtgttggggtgatagctgttacatcaatgtatcgagcttttttctgcccctctgttctgtctaatacctttcgataatcgaccttggcaagatttttgccgtaataaataagctcatcttctctcaggccgagattttcggcgagctgagctatgcttaacattttctcttcggcagctttcgcaatctgccaatctttcataaccgtaggatctaatttcatacaaacctctcgatccaactcaaaagaacattatatactcattccgatactcttctcaagattgaaaactcaggaagaggagaggttagtctaatgatttgttcattatttgcaaattcgtgagtttcgcctttctggtctgtgagcggttttgggagggttgcttcggataaacggccgtttgggagcaatacttcgagcttttcgcctgcgaaaattttattacgtacccgaataaagcagccattatctgaagtctggtctgtaacgtttgcagcaaaaacagttccgcccgttgaatggttgtcctcaagctggcagtccttagattctgcggggccgtcgataaatccgcgtgagtagccgcggtttttcaccctgccaaggagcttgaaggcctcttcgctgctaatctcatctccgtcgattattcttctgtatagcgagacaaccgagcctatgtagtgtacagatttcatcctgccttcgattttcatcgaatcaacgcctatctcagccagtgcaggtacgtattcaaaaagagcgagatctttggaattgaagaagtacaggcctctgtcgtcttcaaaaacaggatgatactcccctggccgctcttcctccatcagatggtatttccagcggcagggatgagtgcattcgcctctgtttgcccgccggcctgtgaggtagtcgctgattgcgcagcgtcctgaatacgaaaaacaaaccgctccgtgtataaagacttctgtttgtatttttcctgaaaccgccggcagaattgcttttatctgctgcaaagagagctccctggcaaggtttacccttgaagctccaagctcggcatattcgagggcagtctgtgagctgagggtgtttgcctgagtgctgatatgaacagctgccctgatcccttcacgcttgagcatcataagaacgccgagatctgcgacgataatcgcatcggcattcatttcatcaaaattgcgggcaagggataaaattttatcatactcatcagaaaatggaaaaatattcagcgttatataggcctttcttccgaaacggtgaaggtattttatgccttgttctgcctgagcgagtgaaaaattgccggcaaaatttctcaggctgtattcagagccgaaataaacggcatcagcgccgtattgaactgcccatttgagcttttccagattgcctgccggagcgagaagctcg

SEQ ID NO: 1941 - DNA, 8820 bp, synthetic construct
  source 1..8820: mol_type = other DNA
  misc_feature 1..8820: note = Synthetic
gggtacgaccggccggtatagaccttctccgggctcccggcctccttgaagcgccagtccttctccatgcgctcccactcgatcaccgtctcaatcttccgcacggccggcacggggacgtactcgtacacctccttctccaggttaaagatcttcagccgcgcgccgcgggtcgtaaagattcggccgggcactttggcgccgctcgaaagttctacatatcccggcacggcatcctcgcggaccccagcgtcttctgccgcgccgaacgggttggccggttcctttctttccggtttccgggttccggtttccgcattctctgttgtccgcagtccattctgcacttcgcactctgcactttgcactgcctcgcccccctgcccctcatcaaacgtgatatccgccgcccatccgatcccgccggccacgaccgccgccaaaacgagtcccgccgcgaccttacatctcatgccccgctcccgccgttcaaagccccgggatgagtcccgatgcaatcgggacgaatcccggggacgccgttcaccttgaaccttgaactttgaacttgttgctcccatactgccgcccatggccccgacacgcatcggcatcctgggcggcacgttcgacccgatccacctcgggcacctcgtccccgccgagtacgcctgcggccatctccggctcgaccggctgtatctcgttccctcggccgcgccggttcatcgtccgcgccacacgcccgcctcgccggagcatcggctgcggatgtgcgaactggccgccgaaccgctcccgcgcttcgccgtctccgactgcgagatccgccgctccgaaccgtcctataccatcctcaccctcgagcattttgcccgaaccgccggccccgacgccaccattttccttctcatcggcgaggacaacttgccgctcctccacacctggcaccgcatcgccgacctcccacaactcgcccgcctcgccatccttcccaggtccccccgccacggcgtagccgaaggcgaagccgggccgccaccccaatctgtcatcccgagcgcagccgaggcttgccctgagcgaccggagcgagccgaacgggaatctcgccgggatgcctcgccgcctgccctgagtgagcgcagcgaatcgaacgggtcctttccggtttccggactccggtttccggattccgacatggtccacatcccctcccccctcgtccccatcagcagcaccgacatccgccgccgcatccgcgacggccgacccattgatgggctcgtccccgcctccgtcgccgactatatcgcgcgccacggcttgtacctcccctaacctctgctcccttcatctttctgcggttcatcattccctgttcatcattcgtctttcccgccacgccccgcccaaaaggtcgccccccgtctttcgacgaggggcgttgcctttcggatcctctcacgactcaaaggccgtgagggccttggtgtgaaaagatccgtaccaggatcggatacacctacaaatactattgcaaaacgccccggacttgtcaatactattcttccgcacctcgaacttgagaaaggggggccccatggcccgctacacgctcggtttggacctcggcagcaactccgtcggctgggcaatcgtcacgcaggacggaacccgtttcaaaaaccggactcctatccttgccggggtccgtgtttttccggaaggtgtcgccgacctcgaccagaaaaaggaacgtccacggggccaggaacgccgcgaaaaacgatcccagcgccgcgtccactaccgccgccgccagcgacgggcactcctccggcgtgccctcatcgaagccggcctctgtcccacagatccccaagcgcgccgcgcctggatcgcccagaatccctatcccttgcgggcgcgaggtttggacgagcgccttgaaccgcaagagttcggccgcgcgctttaccacttgtgcgagcgccgcggcttcaagtccaaccgcaaaagccagtccaaggaagataacaagatcaccaaagacgcctcggcccttcaacaggagattgaatccgccggctgccgcacgctcggcgaataccgcgatcagcgattggatgcaacaaaccacagccaacgtatccgaggccgctacaccttgcgagacatgtacgagcatgaattcgattcgctctgggagagccaacgccgcttccacgccgacattttgaccgacgatctgaaaatcaaatgctacgatgccatcttctttcagcgccccttgcgcttcgatccacaggttatcggcgactgcgaattggagccgggcgaaaaacgatgccccgtctcccactggctcgcccagcggttccgcatgcttcaggaaatcaaccaccttcgcgtcatggatgccgccggcgaccgccccctcacgcgccaggaacgcgccgcactcgccgccgccctcggagtaaaaaaggaaatggacttcggcgccatccgcaagtgccttggttttcttggcacgcagaccttcaacctcgaaactgaaggcaaacgcaagaaactcaagggcaacggggttgaggcggccctccaaaacaaagtactgcgaaagtggtataaagaacttcccgaagaacagcgccaagcagtgtacgatgccctcgccgaagtccaggaccctcaggaattacgccgcatcgccgcagaccaatggcgctgcaacgccgaacaacttgagcaactcctcaagtttacgccacccggcggctacctccgcctttcgaacaaggccattcgcagaatcctgcctttcctggaaccggatcacgtctgcgacaaaccttgccgggaaatgttcccagacagcgacccagaatccggccacgttttcagcgaagccaagaccctcgccggctatccgcccgaacccgaaatccctacgtttgaatccgtcccccccatcccgcgccgaggcgacaaaaaagcctgggccgctgcccatccaaccctccgccacatgggcaccgccctcaccaacccccttgtccgccgcgcacttgctgaaacccgcaaggtcgtcaatgccatcgtccgtgagttcggcaaacccgaggagctcgtcatcgaactcgctagggaaatgaagcacaccaaggaccagcgacagcaaatccactgggacaacgtcaatcgcgccgaagaaaatgagcaaatcgccaagcgcctcaccagcgaattcaacatccaaaacccctcacgcgacgacattctcaaataccgcctttggcaagaatgcagagaggtttgcgtttacaccggcaaaaccatccccaaaaataaactcttctcccccgaaatccaaatcgagcacatataccccctcgaccgcagcctcgacgactcctacctcaacaagaccctctgtttcggccacgaaaccaatgcgctcaaaggcaaccgcacgccctacgaggccttcgcggacacgccggatttcgaccccatcctcaaacgcgccgagcgattgccttggaaaaagcgccgaagattcaccgtgaaagaagtcgccttcgacgacttcgcccaacgacaactcaacgacacccgcttcgcttcgcgcctggcctgccggtacctccgaaccctcggcgtccccgtccgacccgtcaaaggccaaactacgagcaaactcgcccactactggggcttgtacggcgttctcgggaccgactactccaaggcacgcgacgaccaccgataccacgccattgatgccgttaccgtcgccctcaccacacgctcgcacctccaacgactttccactgtcctcggacgctccgcccggcggaacccattggacccgccctgggacggcttctggaaccacgtccgcgacgccgtcgcctccatcaacgtctcctatcgtccggcccacaaactggctggcagccttcacaaggataccgctcttggcccaacccaaaaacgcgatacatatgtttaccgcgtctcccttgaagacctcaccaccgccatggtcgccgacatccgcgatccagtcatccagcgcatcgtccgggaacggctcaaggagcgcggcatcgaggaaaaaggaagcgcagccctcggcaaagtcctcaccgaacccaccttggcaatgccctccggcgtccccatcaaacgcgtccgcatccagaccgtcgaaaaaaccgctatccccatccgaaaagtcaacggccaaacagtgaagttcgtcctccccggcggaaaccaccacgtcgaaatctaccagaaacccgacgcctcgtggaccggacgctgcgtctcgcgtttcgacgcctgcaaacgactccgcaaaggtattcctgtcgtggaccgcgcagaccaacccgacggcgccaagttcctcttctcactttgcatcaacgatatggtccaaattaccgaccgcgataccggcgaggtgaaactatatcgcgtccaaatgacttcacacaaccccgaacttgacaaaccagacgtgaccctgcgcctccacagcgctgcacgcatcgaggataaggaaacggctcttcgacttgcctcttggagcgccttccagaagcaaacacctcagaaagtgcaggttgaccccctgggaaggattcatccctgccgtgattaaacgcaccatcgaaatctcagggcaacacaacaacctctccgtttctctttgctcgctcatcatccagcgcgacggagaggaagtcggacgggtccccctcgaagacctcggcgtactcatcctcgatgccgccgataccgtctatacccactgggtcctggccgaagccctcgccgccggcgccgtcgtcgtgccgtgcggacgcgaccacctcccctgcggcctctttctgccccaggacaattccctccagactcagcgcctcgccgcccaaatcgctgcgcccctccccctgaaaaaacgcctctggaaacaaatcgtccaggccaaggtccgccatcaggccgccgctctcccccaggattcgcctgcacgcgggcgcatcgcgaatctcataacccaggtccgctcaggcgacccgaccaacgtcgaagcccaggccgcccgcatctactggcaagccctcttcggtcccggcgcgccgggattccgccgaaaccccgatgccgaggacggccccaacaccttgctcaactacggctacgccgtcctacgcgccgccgtcgctcgcgccattgcaggcgcaggactccacccctccttcggccttcaccaccacaaccgcggcaacccgtttgctttggccgacgacctcctcgaaccccttcgcccgctcgtggaccgaaaggcaaaggcgctggtcgaattcggccaagccaatattacgcccaacaccaaacgcgaactcctctcgctccttaccgaagaagtcgaggtggccgacctcaaggggccgctcctcgtcgccctcgaacgcaccgtcgcctccctcgtccgctgctacgccggagaacaggccaaactcgacctccccgaaattctgcgcggcgggtctccgcacccgccgcgacagacagaacaggccaaccccgacctccccgcaccatgcaactgagcgcctaccgaaacatgtggctcctgacgatgttcgacctccccaccgacaccaagcccgccagaaaacagtacgcccttttccgcaagtcccttctcaaggacggctttactatgatgcagtactccgtgtatattcgccactgtgcgagcgccgaaaacgcccaggtccacgaaaccagggtccaggaccacctgccccccgacggggaggtgcggctcctgctcgtgacggacaaacagtatgagagaatgcgcgttttctggggaaaaagaagaaaaccgaccgagcctccgcccgcccaattggaacttttttagccccaaatcggcggcaaaggcccggccggcaacaacttacacccgcactagtgtacccgatcctggcacggaatcaatccacaacacacccaaacatcgtgcttgtttccatttaagtgtacccgatcctggcacggaatcaatccacaaccaaaccgcccctgccgtttcacgacctgtaagtgtacccgatcctggcacggaatcaatccacaaccacgatcaccaggtcgccgtcgcggtagtcagtgtacccgatcctggcacggaatcaatccacaacggcaagggcgaggccgtgaagttcaccctgcagtgtacccgatcctggcacggaatcaatccacaacgcatggtgcggtccacgaaaggagacaggcaagtgtacccgatcctggcacggaatcaatccacaaccgaaagagcgcgttgagcggttccttggggagtgtacccgatcctggcacggaatcaatccacaaccggccttggctcacctgctacctcgacggcagtgtacccgatcctggcacggaatcaatccacaacggatattggaacgggtgcatcgggatcgctaagtgtacccgatcctggcacggaatcaatccacaacacaggccgcgccaggctcgtccgtgggttgagtgtacccgatcctggcacggaatcaatccacaactgtttttcttgagcgcgtgtgcgaaggtggagtgtacccgatcctggcacggaatcaatccacaacgattgcccttgcggttctctaactgctaaagtgtacccgatcctggcacggaatcaatccacaacaggcccgcctcgaccgactccgccgccgttagtgtacccgatcctggcacggaatcaatccacaaccggtgcaggtgaggggcgcagtccccacatcagtgtacccgatcctggcacggaatcaatccacaacgggtcctccagaaggccctgcgcccccgcgcagtgtacccgatcctggcacggaatcaatccacaactctgaaatcggccggtagccggggtttaagagtgtacccgatcctggcacggaatcaatccacaacgccagatagaaccagtcccgtccgcagcgtagtgtacccgatcctggcacggaatcaatccacaaccaccagatcgtcggcgtccccggctcgcggagtgtacccgatcctggcacggaatcaatccacaacacgacgaacgacggggcgaaagggaagaacagtgtacccgatcctggcacggaatcaatccacaacgccagtatctcgcaagcgaaggcttccctagtgtacccgatcctggcacggaatcaatccacaacggggcagtggtggtcaacgcttccgaacggagtgtacccgatcctggcacggaatcaatccacaacacgcgcatgccaggaccgcgcccgtcttgcagtgtacccgatcctggcacggaatcaatccacaactacgggaccgcgccgcaggtgtggggcccgagtgtacccgatcctggcacggaatcaatccacaaccatacgacctgagcctgcaccttgatcttaagtgtacccgatcctggcacggaatcaatccacaacacttagaccttctgcgtagaaaaggtcttaagtgtacccgatcctggcacggaatcaatccacaacatattcccggtccaggtgtgcacaaatccagtgtacccgatcctggcacggaatcaatccacaacgacattgccaatcttcgccgcgagatggcaagtgtacccgatcctggcacggaatcaatccacaactggtagaacgccgtcgccttcgtcccgtcgagtgtacccgatcctggcacggaatcaatcgtctcaacgcggaacgcggaagtcggaactcggaaccgacaacccgcctcacttcgggcactcaggcacgcaggaactcaggcacattccaactcggaactttgaaccttgaaccttgaactttggaccttggaccttggacttgggaccttggactttggaccttggaccttggaccttggacttgggaccttggacttgggaccttggactttttcctccccttccgcccccatttctccctcggaaaaccgagacaaaaaacgacaaaaaacagcacaaaacccgcaaaaaacacgaaaaaagtgaaaaaacccgatagatacgatcatctttggcaatccacaatatatggtgggtttacggcgttccgataccgcaaatggctatagcagacccaaaacgtaaccccgcacaaaaaagttccacgtggaacaccgcggtctgcctgaacagttcaccgacacgttccacgtggaacagccgagatttgctattcgaggatcgccaaaatgcggtcaaggtccgcgtggttatagaactcgatgatgatgcgcccggaccccggcttgggcccctcctcgacactcactttcgtgccgagcgcctcccggagtcttgcctccacgtccctgacccccgccgatttctctttcctcttcttcccccgccgaggcggcgccaccgggctgaccagccgttctacctggcgaaccgaaaggccttcccgtgcaaccctctccgccaccgccacttgtcgcttgcggtcctcgatggccagcagtgcccgggcatggcccatcgccaccatcccaccccggaccagggcctgcacctcgtccggcagttccaggaggcggatcatgttggcgatcgtgctgcggtcgagcccaagtcggccggccgcctgttcctgtgtctggcgcgtgctcgcaaggtaagtccgaaaactctcggccttttcgatcgggtccaggtcctcacgctgaaggttctcgatg

SEQ ID NO: 1942 - DNA, 5666 bp, synthetic construct
  misc_feature 1..5666: note = Synthetic
  source 1..5666: mol_type = other DNA
cggcgacttcgccgccatcaccaccgacgggtacttcgaggccgtcgccccctccggcgagcagttcggcatcccgcgcctgctggaggtgctccgccgctgccgcgacctgcccgcacgcgacatgatcctgaacctccgcaaggccgtcgagaccttctccgccggacagaagcaggccgacgatatgaccgccatcatcatccgcaggaaatagcgccggcgccgacccgcggcgtttgcgggatgttcttcctgccccgtctgggcgacgctcgcgcggcgggtttccgaacccaccgcgactcccccccaaaaaagggacctccgtcaggggttagctgacggaggttggccctgcggaatcttgttaccaagttccttggtgtgaaaagactccggaacagggtcggttacactggggaatatcttgacacctcgggggttccatgtcaatatgtccatcccgcatttgcgcattattttctttgtcggggaaaggggccgaatatggccaactacgtgcttggactggacttgggcgccaactccgtcgggtgggcgatcatcgcacaggatgggggccagactacagacggaaaacgggtgttgacgggagtccgggtcttccctgaaggcgtcgataagttgaacaccaagaaggagaagccacgcggtcaggaccgcaggcttgcccgtgggcagcgtcggatgcaccaacggcgccgccatcgtcggcagaagctgcttgcggttctcagaagcgccggcctcctcccccaggattcaggtgatctcctgaatctgctcgcatccgacccttaccctctccgcgcaaagggactggaccagagacttggcctgcacgaactgggacgagcactgttccacctttcccggcggcgcgggttcaagtccaatcgcaagcaagagaagtccaaagaggaaggcgacgtggccaaggagaccgcggaacttcggaggaagatcgacgaatccgggggccggaccctgggggagtaccttgctcgcctgggcgagcatttccgccacgattccctggagtccgagcgcattcgcaacagatacacgttgcgttccatgtacgaagtggaattcgagaagctctggcccgcccaggtcccgcattaccctgacgtactgacgaacgaactgaaagaaaaggtcaaggacgccatcttcttccagcgccccttacgattcgacccggatgtcatcggccaatgcgaattggagccgggggagaaacggtgccccagggcccactgggtggcccagaagttccggatgctccaggatatcaacctcctgaaggtcatcgacccgaccggggaggaacgtcccctgaacgcccgggaacgagcgacgctggccgaggccctggcccccaagaaggagatgaccttcgacgaaatccgccgcctcctgggcttcctggaatctcagaccttcaacctggaggaactgtccaagcggaagtccttgaagggcaatcccgtcgaggccgccctgtccaagaagcccctggacaagtggtatcaggacctgccccagggaacccgcgagaaggtctatgactccctggccgaggagcaggacgaacagaagctccgggccttggctatgaccgaatgggccctcaacgacgcccaggccgacaagctcttgaagatcaccctccccacagggcatttcaaggtttccctcaaggccatccgcaagatgatgccgcacctccagagcgggcacatctacagcgaggcgaaggaacttgccggatacggtttcgttccccagggggaagtaagggaatgcctcccacctgtggaagaggccgtcaagcaccttacgaaccccctggtccggcgcgcattgacagaggcgcgcaaggtggtcaacgccatcgtccgcgacttcggtaagcccggcgagatcgtcgtggaactcgcccgcgacatgaagaacaccgccgagaagcgccgggaactcttctgggagaacgtcgaacgcagggagcagaacgacgagattcgcaagcggctcgtctccgagttcaacctggcctctccatcccgggacgacgtgatcaagttcaggctctgggaggagtgcgcgcgaacctgcccctacaccggccgctcgatcccggccaacaaactcttcaccccggaaatccagatcgagcacatcttcccctattcacgcaccctggacgactccttcatgaacaagagcctctgctacgaggacgagaaccgccgcaagcacaaccgcaccccgtacgaagcctactcccaggaccagcccaagtacgacggaatcctccagaggacggctaagttcccttacaccaaacggcgcaagttctcccagaaagaggtcgaactcgacgagtgcgtccggcgccagttgaacgacacccgctacgtcagtcgggccgccgtcggatacctccgcgtcctttacgacgacccgcagaaagtccgctgcgtcaaggggggcacgaccgccgaactccgccaccagtggggcctcgatgaagtgctcggcctcaagggcgaaaagaaccgcgacgaccaccggcatcacgccgtcgatgccgtcgtcatcgccctgactacccgctcggccttgcagaggctatcctcggtcaagtacaacccccagcgcccccggttcgatcctccttgggaaggttttcgggaggaggtcgccgcctccgtgaccgtcatcaacgtctcccacaggcccacgcgcaggctcgccggggcgctccacgaggaaaccgcctacgggcccgggaaggaaccgaacaccttcgttcatcgcgtccccgtcgagaacctgacggggaaccaggtctcccagatccgcgatcccgtaatacgcaagatcgttcaggaagccgcgaaggaaagggggcttggcaaggccctcgtcaacccgcctctgcggatgccctccggggttcctatcaggaaggtccgcatcgaaacggtggaaaaaaccgccttccacatccggacggacgaccaggggcgcccaatcaagtgcctcctccccgggggcaaccatcacgtcgagatcttcgaactcccggacggctcctggaccggccgggcggtctcacgcttcgacgccaaccagcgactcctccagggaaagcccgtcgtaaatcgaaacccgtccgacggggccaggttcgtcatgtggctctgcaacaacgacatgctcctcatagacaagaattcccaacccctcctgtatcgcgttcagaacatctcggtcagctcacccctgcttgttcttcgccttcacactgctgcccgaacggatgacaaggaaaagacaatcaaggccacacgccacctcgttgcgacgtgggacagctttcggaagcttgcccccaagaaggtaaccgtaggcttccttgggagggttcacccctgcaatgattaagcggaccatcgaaatctccggcgacggcaaccacctgtccgtctccatgggctccctcatcgtccgcaagggcgaacaggtcatcggccaggtccccttggaggacgtcggcctgctcatcctggactccttcaccaccacctacacccactccgtcatcgccgaggtcctcgccgccggggccgcgatcatcccctgcggcaagaaccaccacccctgcgccctattcctgccgcaggagaacacgctccaaacccagcgcctcatccgtcaggcccaggcgcccctccccctccgcaagggcctctggaagcaggtcgtgcaggcgaagatcgccaaccaggccggcgtgctggaggaggacgccccgccgcaaaggatgctccgcaacctcgtcccccaggtccgctcgggcgacccggccaacgtcgaggcccaggcggcccgaatctactggcaggcgctctttgcggacaaaggctttcggcgatccccggagggcaacccccccaacaacatgctcaactacgggtacatggtcctccgcgcctgcgtcgcacgcgcaatctgcgcggccggcctgcacccctccctcggcctgcaccaccacaaccgcgccaacagcttctgcttggccgacgacctgctggaaccccttcgccccctggtggaccgcaaggtccgggccctctggtctgccggacgagacgagatagaccgggacgtaaagacggagttgctgagcctcctgaccgcggaaatccaggtcgccgacgacaaggggcccctcatggtcgcgctggaacggatgaccgcctccctggtgcggtgctaccagcgcgagcagaagaagctcgatctgcccaagctatggaactgagcgggtacaggttcatgtgggtgcttgccatgttcgaccttccggtcgataccaaggccgcccgaaaggcctacacggattttcgcaaggccctcatcaaagacggctttacaatgatgcagttctccgtgtacgttaggcactgcgccagcgaggaaaacgccgacgtgcatgacaaccgggtagcggcggccctgccccctgacggggaggttcgcctcctgcggatcacggacaagcagtatgaacggatgcaggttttctggggaagaaagcgcaaaccgaccgagcagccgccgcgccagctcgagcttttctgagctgtttttgcggcaactgcttggttcccgggcacttaggggcgaggtagtgtaaccgatcctggcccgaaatcaatccacaactgaaaccttagaaacaaccgcgcaacgccagtgtaaccgatcctggcccgaaatcaatccacaaccgtgcggaccaggggaaaccggcggaagtaagtgtaaccgatcctggcccgaaatcaatccacaacgtgctggtgatcgggtagatgtcgaattcgagtgtaaccgatcctggcccgaaatcaatccacaaccaaggagaacgaacatgacgacggtggcagaagtgtaaccgatcctggcccgaaatcaatccacaacgttacctgcagatgcgggcgctcgtcctgcagtgtaaccgatcctggcccgaaatcaatccacaacggctttcatggcggcatcgccgtcgtcgtagtgtaaccgatcctggcccgaaatcaatccacaacgtgaagttggtgttggcggcgtagttgttcagtgtaaccgatcctggcccgaaatcaatccacaactgggcagatgtgggcgtcctcggccagttgagtgtaaccgatcctggcccgaaatcaatccacaacatacccttgatctgggccgtcgcccggcggagtgtaaccgatcctggcccgaaatcaatccacaaccgattgtggtgtcggcaagccagtggtgggagtgtaaccgatcctggcccgaaatcaatccacaacctagatgaggattcttcctgttgtcttctgagtgtaaccgatcctggcccgaaatcaatccacaacgatttctccggctgttacgccggcggtgtgagtgtaaccgatcctggcccgaaatcaatccacaaccttgacgggttgcgtgaggcgcggccttctagtgtaaccgatcctggcccgaaatcaatccacaacggatgccagccgcggaactgcccggtgttgagtgtaaccgatcct

SEQ ID NO: 1943 - DNA, 4333 bp, synthetic construct
  source 1..4333: mol_type = other DNA
  misc_feature 1..4333: note = Synthetic
ccctccacttccgccgacccccaccggtgcccgctcccccgcgcgcctgagccccccgcaccgcggggggatgccgcccacgtttagccgtcggcggtacgccgacggtgatatccccgcccgccaaagaggatgcctctcgccgtttccgacgagaggcattgcctcgcggatcctctcacggcaagccgtgagggccttggtgtgaaaagatccgtaccaggatcggatacactcacaaatactattgcaaaacaccccgcacttgtcaatactatttttccgcacctccagaacttagaaaggggggccccatggcccgctatacgctcggtttggacctcggcagtaattccgtcggctgggcgctgatcgcgcaggacggaaccctcttcgacaaccgtacacctatcctcgccggcgcccgcgtcttcccggcgggcgtagccgacttggagacggggaaggaaaaggcgcgcggccaggagcgccgcgagaaacgcagccaacgccgcattctctaccgccgccgcacgcgccgtggcgatctcagacacgccctcgccgacgccggactttgccccaccggcagggacgacgtccgccgttggctcgccctcgaaccctacaccctgcgcgcccggggcctggacgaacgcctccacccccgcgagttcgggcgcgctctttaccacctctgcgagcgccgcggattcaaatccaaccggaaaaccgagtctaaggacgataacaaggtcaccaagggcgcctcggccctccaggccaaaatcgaggccgccgcctgccgcaccctcggcgagtactgcgccaaacgccttgcgagcacggaccaccgggccgattccgaccaacgcatccgcggtccctacaccctccgcgcgatgtatgaacaagagttcgattcgctctgggacagccagcgccgattccatcccgacctcttgaccgacgacctcaagcgacgcgtccacaagacgatcttctttcagcgccccctacgatttgaccccaagacgatcggcgattgcgaactggagcagggcgaaaaacgctgcgcccgcgcccactgggcctcccaacgcttccgcatgctccaggaaatcaaccatctgcgtgtcatggacacgggcggcgaccgcccgctccgccgagaggaacgagaaaaactcgccgacgccctcggccaaaaaaagaaaatgaccttcgaccagatacgcaagtgcctcggcctccgcaaagaccagcccttcaacctcgaagaacaaggcaaacgcgactggctccacggcaacgaggcgcaggccgcccttcggggcaaggctctaaaagcctggtacgagaccctgccagaagaaacgcgcatccaggtctgggacgcactcgccgacgtccaggacgaggacgaactgcggcgcaccgccctgggcccttggggttgcaccgagccccaggcggaccaactgatcaagatcagtctgacgaccggccacttcagcctttcactcaaggccatccgcaagatgcttcctttccttgagccgtcgcacgtctgcgacgaccgatgccgagaactttttcccgaaagggatacagaggcgggccacgtcgtgagcgaagccaagcaactcgccggctacgccctcttgccagaggtccagatccacgaccgccttccccccgcacaaaccctcttcaagcagatcaccaatcccctcgtccggcgcgccctcaccgagacccgcaaggtcgtcaatgccatcgtccgtgagttcggcaaacccgaggaaatcgtcctggaactcgcacgcgacctcaaacatagccgccaacagcgccaagagatccactgggagaaccgcaaccggggcaaagagaacgacaaaatccgcgaacgcctccaacgcgagttcaacatcctcacgccttcccgcgacgacatcatcaagtaccgcctctgggaggagtgccaaaacgtctgcgtttacaccggccaatccatccccaaaaccaaactcttttcccccgaagtccaaatcgagcacatctaccccctcgaccgaagcctcgacgactcatacctaaacaaaaccctctgctacggagccgaggtcaaccgccgaaagggcggacgaacaccacacgaggcttacgacggcacgcccgaatacgaacaaatcctccaacgcgccaaaaccctcccctggaaaaaacgccgacgcttcgaggtcaaggacgtccagttcgacgagttcgcacgccgccaactcaacgacactcgctacgccagccgaatggccatgcagtacctccgctccctcggcgtccccgtccgccccgtcaagggccagaccaccaacaacctcgcccactactggggcctctacggcgtcctcgggaccgactactccaagacacgcgacgaccaccgctaccacgccattgacgccatcaccgtcgccctcaccactcgctcccacctccaggccctcgcccgggcgatgcactcgcggcacagccgggccgcagcccacaaactcgcacccccgtgggaaacgttctgggatgatgcgcaggcggcggtcgagcgaatcaacatctcattccgccccacccgcaaactcgccggtaaactccacgaggaaaccgcctacggacccaccgaaaaacccaataattacgcttaccgcgttcccgtagaacgcctgacgcctgcgatggtcgcggggattcgcgatacggtcatccggggcattgtgcgcaagcgactcaaagagcacgccatcgaagaaaagggaagcggcaccctcggaaaagtccttaccgagccgaccctgcgaatgccctccggcgtccccatcaagcgcgttcggatagggaccgtcgagaaaacggcgattgagattcggcgagtgaacgggcaggccgccaagtttgtcctccccggcgggaatcaccacgtcgaaatcttccagaaacccgacggctcatggaccggccggtgcgtgtcgcgcttcgaggcccaccagcgcctacgccagggaaagggtgtcgtggaccaccaaggcgagcaggattggaccttccttatgtccctttgcatcaacgatatggtccaactcacggacccagacaccggcgaggtaaaactttaccgtgttcagaaaatctcctcggggtctcatatggtcgtcctccggcttcacacggcggccgaaattgaagacgaggcaagcgacggcccaagcgacagttgcaaccagttacgccgctggaggatggagaaggtccaggtggaccccttgggccgggtgttcccctgcgacgagcgagcctgatgattaaacgaaccgtcgaaatctcaggccaaggcaaccgcctttccgtctcgctcggctccctcatcatcaaacgcgacggccaggaagtcgcacgagttcccctcgaagacctcggcgtactcatcctcgatgccgccgatacggtctatacccactgggtcttggcggaagccctcgccgccggcgccgtcgtcgtcccctgcggccgggaccacctgccctgcggcctgttcctgccccaagacaatagcctgatgacccaacgcctcgccgcccagatcagcgctccgctacccctgaaaaaacgcctctggaaacaaatcgtccaggccaaggtccgacaccaggccgccgtcctcccccaggattcgcctgcacgcggacgcatcgcgaatctcgcaacccaggtccgctcaggcgacccggccaacgtcgaagcccaggccgcccgcatctactggcaagcactcttcggactctccttccgccgaaaccccgatgccgaggacggccccaacaccttgctcaactacggctacgccgtcctccgcgccgccgtcgctcgcgccatcgcgggcgcaggcctccacccttccttcggcctccaccaccacaaccgcagcaaccccttcgccctggccgacgatctcctcgaaccccttcgccccatcgtggaccgaaaggccaaggcactccttgagttcggccaagccaatattacgcccaacaccaaacgcgaactcctctcgctccttaccgaagaagtcgaggtggcgggcctcaaagggccgctcctcgtcgccctcgaacgcaccgtcgcctccctcgtccgctgctacgccggagaacaggccaaactcgacctccccgcaccatgcaactgagcgcctaccgaaacatgtggctcctcaccatgttcgacctcccgaccgacaccaagaccgcccggaaacaatacacccttttccgagagt

SEQ ID NO: 1944 - DNA, 9373 bp, synthetic construct
  misc_feature 1..9373: note = Synthetic
  source 1..9373: mol_type = other DNA
aaaaaatatcgtccgaagattaaatctctcaaacctctctttgaatcagccaaaaaacacctttgctaaatagttaatgggacactagtgaaaaaagttatttatcaatgagactggtgattctttgtatattccagcttatgttcctcatcaaccaattaatttggacaatgctgaggtggcttttgcgattgtttcacgcaatgatcctaatgagcaagaaaatatggttttgtacaatccagatttatagaaacaacttattcgtttatacatgtgttttcatttcgtttttcctcaattgatttttgaaattaagtttgatgatgttctaaatcaagttaaaatttagactttgaaattcaattaatcaagcaaaacttaagtaataatagaggaagtctctttcatgaatcagacagcaaatgaagtttttgatgtagcaattattggagctgggccagttggtatggctgctgcattttatgttgcaagtagaggactaaagcctgttttaattgatgtcttggattcactaggtggacaatgcagcacgctttatcctgaaaaaatgatttacgatattgcttcccagcctggctgtactgggcttgaactcattcagaagcttactgaacagcttaatcaaattgatcatgaattaaggctgggtacttcaatttcaaaattagaaagagaaggcgatatttggtctttgcatacaactgaagatgaagaaattaaaacgaaagtcattattattgccgttggtaagggtgcatttgagccaagaaaattaggcaagcctggtgaagatttgaaaggtgttttttatactgtcaaaaaattagatgtatttgcaaataaaaaacttttgattgtcggtggtggtgatagtgcaatggattggtgtttatcactcaaagacaaggctgcgagtttaactcaaatacatcgaagtgatcaatatcgtgctcacggaggttctattaatcaagtcaaagaagcctcagaaaaaggtcaattaacaatgtcgcctttttgggaaataaaggaaataagaggactagaaggcgaagtcagagaagtaactatctatcacaataaaactaaagaagaaaaagttttggcagtagataatgtcattatcagtgctggctttttgactaatttgggagaaattcaaaattggggattagaaattgaaaatcaaaaaattattgtcgatccttctaatggttttgcaactaatttgcccaatgttttctcaattggagatattgctcactttgaagggaaagtcgaattaatcataactggttttggtgaagcggcaaccgcagcctatttctcgtataaagcaattcatggggatatcaaaggtgctgcttggtgcgctaaattgccagtagttgctagtgcaaaataagatttatattgagaaaatcaagttagctaatccttagagtaaaattgagagccaaattaaatcatttttcaataagattaatttactaatttgtaaaaattgaatgtttggttttgaaattgagtgagtatacaaattaacgataaaaataaattttatagtccagcttttaccagtaaaggcacatctggcatcgggaactcaaatctaaagaaaaagaattttaaaattgaagtattaatatttttaggaatcgttttacttctatttgcaggagtttatttctttaggtatttgcgttttggtcagtcaggtgggaattctttctcaaatccactttctttttattccattgataagccaatagttattcttttggcgggaacagatcaggtatatgaaacagataaatatggttatgctgtaaaaagcaaaaaactctctttcaatgggagaactgacactattattttggcaaaatttgatccaactattaaaagaataactgctctaaatattccaagagatacccgtatatacttgaatggaaaaagagcagagaaaataaatgccataaatacaattggtggtaatgaattactgaaagatattttgcaggatttgcttgatgtacatattgatcattatgtgattgtaaacacagagggcgttcagaaaattattgatgctcttggagggattgaagttgatatacccaaacgtatggtttatcgcgacagaactgatgggctaaatatagattttcaacctggtaacaaagttcttacaggtaaagaagctgttgcttttcttcgctttaggcatgattcacttggtgatattggacgcattcaaagacagcaggaattttttagagcggtaaaagaaaaattagctaatccgctcacaataaccaagcttccacaattagcgcaagattccatgaaggctattagtactgatttaacagtctcggaaatagttaaattagcaaattttacaaaaagtctttcctccgagtcgcaagtatttgctactctaccgggtgatttttcatcttctgcaaacgaagtaaaagtagtttatgaatctgttccagtcgaatcaagctcttcagatgcttcattagatgtagatacttcaggttcaaataaaagtccagccacagttgatggtagtaatactggaacagaaagtacaaatacagttattcaaaaaagaattattcatatggccccctcagtcagttattggattccaaatgaagacgaaattgtcaaagtagttgatcgcctctttggatatgattctgagtttatagatgaatttgatactcaaaacaaaaaagctcagtctaggagcaaaatatccgtagcgattgaatcagcaagtccagacagtaaagaaaagggtaaatcttcttctcaaaaaaatacaataaaaatagtttctaaattacttcaatctaaagggtatagaattgtagacatttctagtggagcttttgatggtaatcataattcagctatttatactcaaaaagcgcaaattaaagatgctcaaaaagtacgaaaagatctaggactttcttctaatgtgaaagtattaggaggtagtattggctcaccacttgcagatattacaattgtagttggccctgaaattgagaaagagttgagtcaaaaagtcgaagagaaatctaagtaagtagtttgtgtttgtcagaagagtcattctcgattaatatattaaaaaaccatttgaggatgttttatgtctttaatcttttcatttgacgtaggaaaagcaagcttaggttattgcgttaggaaaggttatgaaattgaagagctgaaaagcattatcattccatctgaacatgctgattatgtagagctatttggggggagaaaaaggcagtttagaactcgtgaagcacatgaaaaaagacagaattggcttcgtgctttatggaatgatttgggtttagaaggtttagattcaaaggattctcgtttagtaagtgaatttagaaaatctgaagatgaagaagtttgctcaggggttttgctcaggataaagcttttagaaggcaacaaactgcaggaatggcaaatatttaaagccttatggtcagctatccaaaagcgtggttatgatgacaaactgccttgggcttcttcaaattcatcacgaaaagagaaaaaagacgaattgatagatgaagttgattcaggtgaaaagtctaagccagagaacgatgatgatgctgaaaataaaaaaggaatcgaatcctatgaaaaagatttagttgaaaactgtggaaccgacgaaaaatttcatttaccttgttatctagaggctgcaaagttatgtctttggaaaaatggaagaatcattagtcataaaattacttatgaagccgagaaagtaagaaagagtgcttttgtggctccaaggcacttaattgagaaagaaatagagcaattacttataaaagcagctgagcaaataccttcaattaaagaaaaagaatttgattttgtttttttcccaaatgaagagtcaaagcgagaaaataaaggaattccagttaaaggaaaaggaatagattttgttctttatggtcaaggacaaaaacaatatgcctcttactacaaagattctgaatttaatcgtaaaagaggaaccgaatgggatacacagggattactctcacaaaaaataccccgttttgataatcgtattattgggaaatgctctctaattcctcgtcttaatacttgcaatgctgatgatattttggctcaagaatttaaattaattcaatcaattaggaatttaattaggcctaatagagaagctcttccacatgagaaattcattatggtttttcaaaaactgagaaataagcttgtaattaaagatgctcctcctagtatcaatttttctttgacggaaatcaataaagcacttaaggaagttgatttatctcagatatcagaaaagaatctccactcaaaacaaactaaaagtagtttctttaaaatcaacaattcaggtagatcaagactgtctcgtccagctctttcatgtgttagtgagcttatacttagtggaaaaccaattaatcgatttgttgaggaaatatgtgaaaaaggtaccctagaacatactgcttttggtcttttgaaaaacaaagaagacaaaagtaaaacagaagttcaagagaaaaaatacaaacatttaattacagaaaataatccactgaagggtataactcaatctgaattagtcaacttatcatcaaggcttggagatagttggagtaattattcaattcaagacgatcgagaagtacaagacttgtcgaaactttcattagatgaacgaaaaaaactagttgaaaaagaattaggaaaaatttcgaactatgttgttaaaaatagattgcaaattgtaattaacactttgaacgatcttctcaagattcatggagaaccagattcagtggtgattgaaatgccaagaggtgaggatagtctagatggaagccaaaacaacctagattatataaaagcacaaaaagatagagaaaaaatcaataaaatctatatagaagaattggctaaattagaaaaatctcctaagtatttagagcgatataaactttggaaagaacagaggggagtttgtgtttatactgggcaaactattcttgattctgaaattgactcatcaaaactagatgttgatcatataattcctcgtgctcaaaatggtaataactcaatcatcaataaagtattagttcttaaaactgcaaacaatgaaaaactcgatcgaacaccatatgaatggttaagcagtaatcctcaaaaatgggctgaattcaaagaacaatttgaaactggattactcaaacatttgccaaaattcaaaaagaaactactgcttgttgatccatcttctgaagatggtaaaaagttaattgataatttgaatgctcttcaagacaccagatttatagcaaaacttggcaaaaaattaattggaatattcttaggatggaatgaaggatctgaaggttcaaaacgcaagctagcagttgtaaaaggttctgaaacagctgaatttagacgagagtatgatttaaataaattacttggtgatgataaagagaaaaatcgaaacaataataaacatcatgccctagatgcttactgtatgagctttgccaatgacgaatgggtttggactaagtcggaaaatggtaaacaaattagaagaaaagaacatttggaaacaagtgaacatgtgaagaaagtaaaagctgagattaagagctggatggagaaggttgttccagtagatattattaaaggtaatcccaaaaaaggcgatccaaagaagaaaaaacccgatgaaacaatttatggcttgaggctaatcaacaaaaaactatgcatcgttagatatagacctttagctccaagtaaaaatgataaagataagaaaaatgacaatgctgaaaaggaagagaagttaaaaccagaaagaatagttgatccatttattcgagaagatttgaaaaatcgttttcaatcaaggaattttgacgggaaaacacaatctgaattttttcaaaagtacctacatccaaatccaaaaaggaagcagcagaattgtgaggttaaaagagttctttatattgaatgtgaaattaatcaagaagatttaaaaagacctttgatctcaaatggtaggttttgctatcaaaattttgtagatgtctcaaaaaatccatcttattcaatagatgatttgatgaatgagaaaagggagaaaagaaaaaacaatattcaacttaagaaaattaaacaatcaaggaattatttgatttacaaggacttaaattcaacaaaagataattatggaatccgtcatgtaaaaggatatgagtcaatcaaagtagcaaaggaagaacttgaggataaaaagtttgaagttgtaaatgagcacttattttctggctgtctcataaaaattcataaagactttgaagccagtgtggaaattaaaaaagaaaaaacaaaaaacaaaaaaactaaaaatgaagactctacagaagaaattcaaaatgacactaaagaagcaaaaacagaaagaaaaattatgccttctgggatatatattctgtcgagtattggagaagcgaccccaagagtttctttagaaagtaataacggagactcaatggaattattaggcagactcaataaattaatggagcttggttttgatctccatgaacctaatgaaagtaaaaaagagggtagaaaattaatatgaagactttagaggaaatacaagaaatactaaaaagagaaaaagtttctctgtctgaaaaatacaatatagcagagttaggtattttcggttcttatgttcgtggtgaacagcaagaaaatagtgatttagatgttttggttgagtacaaaggcaaagtaagtttttttgatattttacatttagaggaagagcttagtcagctttctggtatgaaggttgatttagttcttaaatctggactaaaaaaatttatggggcaacaaattatgaaggaggttgaatttttatgaatcttggaaagcgtgaattcagggattttattgttgatattgctcactgttcaaagaaagcccaagagtttatctatggagtatcgttaaaagattttcgtgatgatgagaaaaccctttttgcggttatgaaagcaattgagattattggtgaagcctcgaaaaagattccagaaaacattaagcaaaactactcagatataccatggaaagaaatggctggcatgagagataaaattgttcatcaatattttggtattaatccagagattttgtttgacgttgtggaaaaccacttgccccatttagacaggtccttactacctttaatgaaagagtttgatcttgagaaagaaatatattagtccagttagttaacaagaaaggtaattcgcttttgagttttcacatactaactattagttcaattaactcatggattcatgtggatcgaggttttttagtttgcaaaacagaaggtcaggaagaaaaaagaatcccactggctgacgtgagggctttagttttgacagttccgcaagtgagtttcagcaatcattgcttagcaagactcttagagcaagattcaattgttttgcattgcagtgaagactataaaccaattggatggacagtcccgatggatagagtaattagaaaagctgcttttgaaaatcaaataaagcaagatcagcaacttgaaaaagctctttgggaaagagttatcaagcagaaaatccagaatcaattcactgttttagaaattattggttgtgaacataaaattacagctgaaaaacttgatttgatagatgaagcaacaatggcaaggaaatattggaataatttttttggaagccttggaaaggttcaaaatagagaaagaaaaggtgctaacagtattgaaaataaagctctcaattacggttatgctgttcttacaactcttgttcatcgggcaatcttgattcacggcttattgcctagcttaggaattcatcatgaaaacagatatagaaatactcccttggtctgggacttggttgaaccactaagaccatttgtagatttgtttttatttaagtggtacgagaaaaataatttttttattgatgaagatgcctcactagaagatcaaatggaagatgatgaaatatttgatttcaaagaatggattgtttttatgacgcaaaatttacgcttttgtcgtttaaaagatactaattcaaagcacactgcaaagcttatggatgcagtcgatgattacataatgagtatatccaaggcttttgaagaatttgaaacactcaaatgtaaattaccagatttaaaacaagcgtattttcatgcagaaaaagtggaataaaaattatgtgaaaagtaaatttagaatgggtcaacttttagtgatgtttgacttgccgacttatacgctagaagaacgtaggcaagcaagtaaatttcgcaattctttactcgacttgggctttctaatggttcaggaaagcatttatttgagaaattgcgttagctatgagaaaatggaaagtcacattgagagcgtaaagaaaagagccccaaatgttggttcaataatttccttgtttattacaaatagacaatggcaagatgcaaataatataacaatggcatcaaagcgttcacttagagaagttaattccaaagatgaaatttatgaacaagttactttttggtaaaaatagaggggtgaaactcaacgtgctaagcagtggttggagctacccctatttcagttatgagcaataccgcattgaagataattttaatgctatcacgaagaaggcaagcaagaataggtaatgctattatagcttgccttctaatgcggtaggctcaaaaccaataccctcgtgttgccttgcttaaatatattatagcttgccttctaatgcggtaggctcaaaacagaataatgagcaatttacaacaacttggaattatagcttgccttctaatgcggtaggctcaaaacaagtaagcaaataatatttgatccgtgattattatagcttgccttctaatgcggtaggctcaaaacaacacggttgaagatattgaagccattagcattatagcttgccttctaatgcggtaggctcaaaacctatcaagtttgttccctactatttactgcattatagcttgccttctaatgcggtaggctcaaaacagaacactcgttgaagggctgggaacaattattatagcttgccttctaatgcggtaggctcaaaacaataatgtttttgcattcgggcaa

SEQ ID NO: 1945 - DNA, 24362 bp, synthetic construct
  source 1..24362: mol_type = other DNA
  misc_feature 1..24362: note = Synthetic
  variation 19985..20336: note = n is a, c, g, or t
gcgattgcaaatccgactccgttagcaaatccctgaccgagcggaccggttgtagtttcgaccccgggcgtaagatggtattccggatgtccgggagttttgctgtcaagctgacggaattcttttaaatcatccaaagaaatattaaaacctgtcagatgcagtaagctgtaaagaagcatactgccgtgtccggcagataaaacgaatctgtcccttgcagtccagtccggagcttccggatcaaatttcataaactttgtccatagagtataagccatagcagcagcgcccatcggcataccggggtgaccggaattcgctttttggacagcgtcagcggagagcagacggatggtgttaatacagagttcgtcagatttagtcatgaaataaaatagttaatatatgcataaattttaagattaaatttggggtgagggggtagcgcggaattgtattccgcgcggcggcagtaaaccactttagtggtttattgacgccaaaaaattatttagattatacttcttctgacttttaatataaccgcaaaacagataattcatctgaacattttttaaactcatctgctgcaaacttctggtttcggcatcaatagcaataaaccgctaaagcggtttatccccccactcccccttccttatctcatatacaaaattcctcttcatctcctctccgtaatatctcatatctctctcatcagtttttaccgcacctatcttctctatcgctttctgtgaacgtatgttctcagcacctatatgaaaatatactatatcaacatatctaaaagcatgatccagcatcagctgcttaagcgttctgttataattttttccccagtattcctttgctaaaaatgtataccctacagatacagccctctcttcagaattataatcataatatctagaactcccgatcacctttcctgtctctctctcctttaccttaaatgctcctccggattctatcgcgcctctgaaaaaatttttaaatacttcccttttatatctgtctttattagggtgctgctcccagactaacggatctgaagccgcttcaaacaattcctcaaaatcatcttcctttaatggtattacttcaataaatttattcttcagttccggctgtagattaaaactgctctttgtttcttcagcataaatctgctttgtcatttttttatctgatttttttgaacaagttcgtttgtgaaaataaatttaattttttttttagtgaatttgaatatctgaatttatgacttcgtaaagtattagtatattaaaaaaatatttatatttatattattttatgacacccaaaccaacttataaagaagcgtttaagttctggctgaaactcggttttataagtttcggaggtccggcaggccagatcgcgataatgcatgaatatctggttgataaaaaaaaatggatcagtgacggcaaatttctcagcgctctgaatttttgcatgctcttgcccggtcccgaagctcagcagcttgccgcctacaacggttggcttttacatggtatcaaaggaggtcttacagctggtatcctttttatacttccctctgtttttattctgcttggtcttagtatagtttatgttactttcggaaatatcccctggataaccgcccttttcaacggtcttaaacctgctgttgtagctgttgtaattattgcccttatcagaattgcaaaaaaatctctgttaactcccctgcattacatcaccgctgcagcggcgttcgtttgtatatattttcttaatataccttttccgtttataatgctgggagcgctgatcattgcttttacagcaggaaaattttacccggctgttaactctgctaataatgataattttatcgttaactcccaaattgaaaaaaattattacattaattccctgtcggaaatttcagttttgaaattcaatccgcttcagtttataaaattaaccttgatctttgcttttatctggttggttcctttatttattttttatttttttccaaataattttgaattctggaaaactctgtcactcttttttacaaaagctgcttttgttactttcggcggtgcttatgctgtactgccttatgttgcacagttcagtgttgaaaatttaaagtggcttaccgaacttcagatgattgacggactggcacttggtgaaactactccgggtccgcttgttatgatacttgctttcgtcggtttcatggctggttttaatttttacggaggttcgcttctgatgggaactgccggtctcctgactactgtattctacacttttctgccgagtttcttttttatttttgccggagctccgctgattgaaagatcgcataagaacagctctattaaaaattcactgagtattgtaaccgcagctgtcgtaggcattattctgaatctcagtatctatttcggtaaagcgataattttccccggccagttttcttttaacagtattgatttctttgctgttttatggatattaatttcaatgatcttcctgtataaatttaatattaatgtgcctctgtggattctcatcagcgcactcgcaggtctgatccatttctttatattctgaatcatttaatcccatattcaaaatttttatcagggtgtaatctttgttataaataaaaaagaattattatctgctaatgtctggtcagctatatcaactgtctcatctccgtttacgtctgttactacataaccgaccgcaaacgcaagcgcgtcattatcaatcagcgtattgtctgtcagatctattactccgtcctgatttacatctgcgctgtaaacagcaaacctcgccggaatattctccacctgtgtctgattagatccatatgccaagtctgcatccttcgtaaaatcatagatcatatttccgctgagcacttcaaatgaaattacagtatcgctccatgtttctattgaatttctatgattgacctgcagccagtaatttgaaacaaaatccgcttcaggaaaattatatcttataatattatcctcatcaggagtttctcctttaatacccacttcgttgtatggagatgcttcctctctcagtttcgtcctgacagtatctatgactgtcgaatcaaccggtctgtaaaatccttccatataaactttcaggcaaagtgctgaagttttgatcgctgaattattgaactgaattccccatgcataaagatttcctgtgccggctcctgtctgatcatttataactatcctccatttaccagaagttttctttcccgcaaacactgcatttaatggattcttcggttttatctcaggtgaaaaggatgtaaatgacgctgacgaatttaaattactgtccgcctgatcattaaatattgtgattatgttatccgaattatctgtaagcttattatttccgaatacgtttacagatgcaccgtcaggtgaaattaacgttatactcaattcctcttcagaagtatgattcagcgccatgaataaattcacatcgctgatcaatgtatcctgacatacttcaaatgaatctgtaacaattccggaaaatcctgaagcgggaatttttctaatgctttgactgatcctgaatccgtccgaataatttaatctgtcggatctgtttatcggtgataccggcttatcatcttctgttccgttgtgagagaagctcgcgctgtttctgtattgcagaacaggtccgtcatctgaattgtcagttgcatatccgtcaaaattataaacaacgtttgacatcattggatatggtttgtttgatctgtcaattgacatatacaggaatctgtcaatttcctgctgagtcttttcataattcgaaattctgacttcatctaaatatccgttaaaaaaacttccggcaattcctgagctgccgatcacaagactgtctgatccgtccgtaatagcaccggctgtattaattccgcttcctgctttacgtccgttaatatagaaattgaatttacccgttgatgaattatatgtaaagctaatatgtgtccagatgtttggaacaagagttactgttgaattaaaattactgactccgtttatcacggcattaagtacggaaccgtttaatctgagagaataatttgttgctgctcccgtaccttttgaaattataccacggatgccggccagtgatcttggatttatccaggcttccagtgttatttcattgacaggacttatgtccggattatccgcgccgcttagataatcattagttccgttcaattctatacagtcattctgaacaattgtatgcagtggtctctcactataatttatcggacttactccgatattttttccggtaccgttgtttcctgtccagtcaaataaactaaaatcagttccctgtgaatccctgtcctgaaatgtcagcgaaaaaattaagttcgaataaattccggaagatacgccaagagttgtccttctcagtctgatgacttcatttaatgtcaaaggtctgttccatattcttatctcatccatctgaccggtaaacggactgtttacgtttccctttcctatcctgagtgaatctgtatttgcaacaggctcggcattttgaattattacatttgtatcaagagctccgttgacataaattgaaaattgatccgaaaaagagttaaaggtgcagcagatatgagtccattggttattttgaatgatagtattgccgataagtcttgttactgaatttgttcttattgctgctcttccctgattcagataaattgtatacccgtttccgcccgttccgaatcttttttctgctaatatttgaaaagccggaacggtagagtttacaggatttatccacatttcaattgtaaaacttcctgaaatgtttattgaagatgaattcccgaagacgacgtaaccgtttgcagtgccggggaaaccgcttgcctgattccagaacataaacgcagaagattttccggatagaagcataaataaaattccgaataaaactttataaatactttttttcatttttctcagatttaattatctcaacaaaataacaatttaattttaaattatataaagcaaaaaggcagagaattcatctctgcctttccgctttgtttacgttttattttacaaggatcattttctttacgtctgtaaattctgtcccgccgcctctcacggttattctgtaataatatatcccggatgataaagttgatccgttaaatacagcttcatatcttcctgcgtttactgtaccgtttactaatgtcattacttcttttcctgcagaattgaaaacctttatatttacttctgatgatacaggaatatcataagatatttttgtaacgggattaaacggattcggataattctgatttaatttatattcagtaacctccgaaacttccggatttaagttgctgtcacctgtattttcaggttcggatgaatctgactcgaaacatcttaatatatttactaccgccggatttgcaaataccggagtgaatgacttgtcagtaatttttctcagcttcatcactatgtcttttactatatgctgattctgaatattctgcacataaaaagaatcattgcataatccgccgggaataaatccgtttgaatttgatctccagagaaaagcatcctgtacattaaatgctgcatcgcctgttaccgaataacccggcgctgtggtattgtttgatctgataatatcataaccgctttcgtttgtattgttatttctgttccataatcttgtccagacggctgctcctcctgttaccggtattttcattgtgaatgcatcagtcggctgacctgttctgttcattgatccagtcagtactaaattattaccgtcaagcactatagactgtccgatgtcgttatacgccgtattaccgtaacagtaagaccataacagatttcctgatgcatcgactctgaatacaattatatcattttcacctgctacatatctgtttgtaaatcctgccacaacaaatcctccgtcagacattggaataatttttcttggctccgtgctcggatatggctgtgatgacgtaatattaaaagcatatgttttattccatataactcctccggtgtttgccagttttgtgaccattatatcccagacatttaatttctttgactgaatgttagtccttgaagcaacgccgtatgtatcgtctgctttctggtaacacattgtctgcgcttcatcaaagctgtttgcgtttaaaatacctgacattgtattgtaaaggtatccccagttccatacacctgaaggcgaataatttgtaacaataattttttccagttttttactggttgcagtcggataaaaatctttccaccctgcgtttgccgttctgtatgagctgtcgatgcagttctgattgtaaatgcttgttactgtgtcattgatcattctgccgttgattattccgcccagtctgttcacattaagaaaagtcgcttttctcaaaaagttttgtccttcctgcataaaacctgcaagataagaagtagaatcttttcttgtctgaattacggaattgcatctgtcatcaccgtgcgttccgtacagtcttgcaaataaatgatttccgcttggctgaacctgcataaacatccagtcataaattcctattccgcagcctgccgcatatgaaaatccggcgatcgtatttccgccttcaagattgtggatgattgatcttgcattatcatgacctgaattattattgcatctcagatcgtatgttctgatatgatactgagcgcttaaatctgaaaacattaagctgatcattgcgattaaaactgctgtaacttttgagattgtgattgagtgtttcatttttaattttcctttcggttaatttatttaaaataattttataattaatttctgtacaaaattacttacaatgttatgcagcaaacaatcgaacaattctcattttgtttcatgattttattattagtttgttttaatattccttttaaatgtttaattttagcccgtaattaaagaattttgagattctaattgtatcatattcagcattaattaatttttgaaaatttctttcaaatgcttaaaattaaaatcctcgatatactggaaaagctgtcacctgacgaatttaaagaattttcagattatcttaactcgcctctctttaataaaagaaagataattccggagctgctggatatttataaaaaatattatccgcattttgatgacactggttttgcaaaagaaaaaatattttcaaagctatttccgaagaaaatttacaacgatactgtcttcagaaatctgaattccattctgctttctcatgccgaaaactttctttcacttaaaaactatttgaaaaatccggttctgaaaaatattcacctactgtccgagcttaattcaaagaatattttcagtctctttgaaaaaaattttaaggaaagtttaacttttttagataagtctgaaatcagggattctgaattttttctgaacgaatacaatctttacattcagaaagacctgtataacagtttcataaataaattctctaagaaagacataactatgtccggactgagttttatgaaattttatatcatgaaattaatggagattcagaattatatactctatgaatgcagaattctgggaatcgacaattctctttttatagacgctgattatgttgataaaacccttaagattatgcctgaaagcataaggaatatgccgcaggtaaaaatttactataatgccctgatgctcgaaagaaaacaaaatgaaaagtattataaagagttgaagtctttggtttttaaatacggtaatcttctggacagggaaaaattatataataaatatatagatctgattgatttcattaaaagaacacgggaaaaaaatgacctcggatccgttaaggaaatttttcttctcagaaaaagaatagtagagaacggactgatgccggaaaattttataacaaatatgttttttcttaatcttgtaacttcagctctgagactgggtgagttcaaatggacttcagattttatagatcaatataacagacatcttcttcctgatcacagagagtcagtaagagatctttcatatgcaatgtattacttcagcataaaggattttcagacagcgctttcattctcagcaaaagtcaggtatgaagataattattacaatctgcaaataaaaaatcttactgcaaggatttattatgagctgaatgaaactgatcttctgattaatcacatcgcgtcttacagaatgtacctttcaaaaaacagaaccctcagtaaaaaagaaatttcttctcattcagcattcgtaagttttattgataaattatacaaagtaaaggaacagaaaaaatttcataaacttgatgatattatatcaaaagcagaaaactcggattttataagccgtaactggattttggaaaaagtcagcgagatgaatgtttgagaaattcagatgatttcattcgagtgagatttaaatcgaaaaatattattgatttcatatatgtccacaaaatgctaactatactgtcatcactctttgccccccatttttttcattaggacttgcacgacattttgtcattccggcgtgctttcagccggaatccaatcctcactaaatgattaaaaaattctcattccggcatgctccacaattttgtcattcccgcatgctctcagcgggaatccatgaacgttattactgcagttgatttaaaagtttagaattgaatttgcagattgccggacaataaatcaatttcttacttcgtgattttcttaacataaaattgtaaaatttacagcagtacttccgaaatcccgctctcgactgcttttaaaattaaaaatttattcacgattaaaatctgcaggcgagtcgggaatgacaagtataaaaacattgactcaattgtctgaaccataattaaaggattgaaggatttcttgatttatgactgctaaaaaatagcagatgtttatgaaatcaggtaatcctgactcaattgtctgaactatgattaaaggattgaaggatttcttgatttttgactgctaaaagatagtggctgtttatgaaatcaggtaatcctgactcaattgtctgaaccataattaaaggattgaaggatttcttgatttttgactgctaaaaaaaatagcagctgtttatgaaatcaggtaatcctgactcaattgtctgaaccatgattaaaggattgaaggatttcttgatttatgactgctaaaaaaaatagcagctgtttatgaaatcaggtaatcctgaaatcatgtgaatcaaggttcagacagcgctttcattctcagtaaaaaagaaatttcttctcattcagcattcgtaagttttattgataaattatacaaagtaaaggaacagaaaaaatttcataaacttgatgatattatatcaaaagcagataactcggattttataagccgtaactggattttggaaaaagtcagcgagatgaatgtttgagaaaaataagtgattcctttcaagcgggatttcaaggaataggcatttagtatttatattctcaaatttagttactaaatttcagccaatgaaaaggtttaatatttaagtcagaataaggtaaaaaattatatcttctcttttttcagttattccttactaagatttaagattcttaatttatataaaataaaaaagacgagttgccccgtcttaaatgttttcacaacggaataatccttattgtgatttgctttcttaagttcggaaacaacttaactattttaattcataattcaaatataatatgaaaaaaattcttggtttagatttgggtacaaactctattggatgggcactttacgataaagaaaataaaaaaattcttggtatgggcagccgtattattccaatgggttcggaaaaattagactatgagaaaggcaaaggaattacaaagaatgctgaaagaagagcagcccgttctgtccgaagaatgggaaaaagatataaaatgagaagaaacaaacttttatttgtgttaaatgaattagaaatatgtcctgaccagtttaaatttaggtataaagtaagagacaataacggaaagctaacagatatatacaatgatggatttccgaaagctaaaaatatacaggacttagaattgttaccgattaaaaaaggaacactacagttaaattcaattgaacatttccaattaagagtcaatgcgataacaaaaaaagttaatttaaaagattttggtaaaatattatacaagtttaatcaactcagaggatattcagggggaagttatgatgaagacaacaaaaataaaatcgaaaatttaattgatgatccggaagaaattacacaaaaaaaatatgaggttataactcagaaagttgaaatattgcaagtaaaaaaatcggataaaacatttaaagcaaaaagcggtgagaataaaggtaaagaatttaattgttatgatataacagtaaatctgaacaatgaggaaataaacgggactaccacgcttcaaactttagaagccggaaaagaagaagaattagaaatcagaattaaaaggacgaaaaagggtgaggatataagttttacattacctcaaaaaacgaactggagaaaacaactggaaagcactgaggaaattctaaaatctgaaaatttatttgtcggagagttacttttaaaagatctgaaagaaagcaaatggaaaaaaatcaggaatcgggtttttttaagaaaccgatacaaactagaatttgataaaatttgggaaatacaagcaaatgaatatccaatattaaataatgtgccattggaaaagttagaaataattgctgcttacttatttccaggaaaaagtgaatctcaagttaagttaagaaggtcagcaattgatggtggtttaaaatatattatcaaagaacagataatttattaccagagaccgttaaagtctcagacagatctaattaggaagtgtaagtttgaaactaatgaaacagttatagcaaatacacatccgctgtttcaggagtttcgatgttgggagcaaatcaacaaaatgtatataacttctaagattcaaacttataatgaaaaaaagaaaaagactgtatataaatatactgatagatatttaactaatgatcaaaagaatgaaatatatagaaagcttcagattcaaaaaaatattggattctctgaagtcgcaaaaatcattggtttaaagatggataaatcagaatatttgaacggattaaatgtgaaagctaaattaaaaggttgtgatacaatcattaatataaaaaacattttaggagatttttttgaagagttaattcaaaaagatgaaataatatttgtaaagttatgggacgcattatataataaaacaggaaacgaatatgatataaatagtgataaagttaaagcattaaaagatattttaaatatatatttaaataatagtacagctgaagaaattgctttgaaacttgcaataaatataaaatatccaaggaaatattcagatttatcgtcaaaagcaattaataggattttaccattgttaaattgtactccattaaatgaaattgattttgtaaaggaaaaattggaaaagattaagcaaactattgagacaggtgaaattaatgatgaagatactatagaaagtaatattataaattacattaataacaatcctgatctcattaatagcggcggcatgatgtattcatttgcaacgtcaatgatttatggtaaacattctaatattaatgtgataccttcaattacaaattatcacgaaattatatataataaagaaagaaatttgagaaatcctgtggttgagcaaataacaaatgaaacaatgcaggttataaaagctatttggaaaaaatataaatttaaccctgatgaattagaaatacgagttgaattagccagagatttaaaaaatagcgcagaagaaagagctagcatatacaaagcttatatcaccaatcaaagaataaatgaatcaataaaaaagaaacttattgaaattaaacaagcacctacacaaaaaaatataacccagtacaagctttggagtttacaaagaattgaagattatccaaaacagtcaaaagagccaactatagaagaaattaataaattaagaatctgggaagagcaaaaatgcatttcaccatacacattaaaaccaattcctttatctaaactattttcagataaaaggctttatgatattgatcatattattccaaaatccaggttctttgatgattcattaacaaatcaggttgtatgtgaaacgaatataaatgaagagaaaggtaatcgtactgcatgggaatatatatcacagcaaaattctaagtttgaaatttgctcagttgaaagttttatcatgcataccaatagaaatttccatggcaggaagaaaagaaatctcttaattgaaaacattcccgctaatattgtggaacggcagataaaagatactcaatatttatctactgctgtaaaaaatgagcttgcaaagattgttggcagtgaaaatgtaaaaacaactactggggaagttactgcttttttaaggagccgatgggggttaagaaagttatttatggagttaactgaaagtagatttaaacaaatggaattatgggattggaataaagataccaatactccaaattctattttggttttaaattattatgatgaggtgaaaaaaatgaaaatatatgaaataaagaactggagtaaacgatacgaccatagacaccactctatagacgcactggttgtagctttaactgaacaaaaagatattcaaagattaaataatcttaataaggaattacagaattggttaacaaataacaagaaagatattgatttaaatgtaggtgatggtgaaacaatacttgaagcgtatttcaatttggatgaagagaaaagaaataaaattcaaaaaaagatagaaggttttaaggtttttgagaaacctatacctgatttattagaacaagttaatgaattcttatcatctatggtaatctcacacaaaccaaaggacaatttatcaattcagaaaaatgaaataaccggcaagaaagaattaaaaataagaagtgcgcttcatgaagcaactttttatggaaaacataatggtaaagacacaaaaacagtaagtatttccaatttaactgtaaaagaaatttctaaaattactgacggaattcttaaaaatgaaattgactcacatagaaaaaaatacgaatcaatgaaagaagcgtttacaggagaaggattaaagttttttaatgagaatagattccagaggaaaaaacctactgagctgaaaccgccggtatataaaataaaaatttattatagtacaatggaaaaaacagaaagttctctgcagcgattatacgaaaataatgataaacttagtgtaaaaaccggtggtaattatttatttattgttatggaaaaagaagttaataacaaaatcaaaagagttttcgaaattgtttcattatatgatgcagctcgtattgccaaagatgaattgatgattaataacgaaaactttaaaaagagaatatgtgaagattatagacttaatcataaggagaaaccggataaagtattgtttactttgcagcagaatgaacttgtttatttcccggaaaatgaagaagatcctgttttaaattttacaaaaagtgaatttgaagaatggatttcgaatagtttaaataaatgtaaatttgctaaaagaatttataaagttgtaaagttcagcggaaaggactgcaatttcattcctcatatttatgcaaacacaataagtatttcaaaggatttaactgatgagcaaatgaatagtttaaaaactcagtataaagataaaaaaattccaaaaaaggaattgaactttgaagaatttggatcttatggcaacagcgcaagaactgaagttaacgaaagtttcgttagagagctggtctttggaaaaagtaaaaacaatattaatgctccattaaaaaagatacaagattattgtattaaaataaaaattgattggttaggtaatataaatttgcccaatgattaagcgaactctctatttcggaaaccctgcatatcttaatttcaaaaataatcagctgataattgagaaaagaagttttgatatatttactgaatttaatatttcagattcagacgataataattccaatgacaaatatttaaagcgaaaaactcaaaatgaatcaataccggtagaagatatcgggatcgttattttagatcattacggagtaagtacatcgcaatacttaatatcaaagttactggaaaataacgttgctgtaatattctgtaatgataaacatcatcctgtaggattacttttaaatcttgatggcaattctgttcagtcagaaaaattcaaggcacagataaattcttcagttcctctcagaaaaaatctctggcagcagactgtttcatccaaaatatccaatcagtcaaaattgttgaagagtattggtgtagatgttactaatatggaatactgggcagcaaaggtaaactccggagatacaaaaaatctggaggcaagggcatctgtatactactggaaaaatttgtttcctgaagaaatgaaattttacagagacagatatggtgaccctccgaataatttactgaattacggatatgcaattttaagagcagtggttgcaagaggattagtagcttccggacttcttcccacacttggaattcatcaccgcaataaatataatgcttactgtctggcagatgatataatggaaccatacaggccatatgtcgataaaattatctgcagtttggttaataaagagttagatttatatgaactttcagtcgaaattaaaagagaattattacagttaccggcatcagaaattattatagataatgaaagaagtcctcttatggtaggattgcagaaaactactgcttctttggcaaaatgttttgaaggaaagagtaaaaaaataacataccctgaatttaaagttggtttaataaataattaatctcatgatcttagacgaatacagaattatgtggatattagtattatttgatcttccgacagatacgaaaaaagacagaaaaaattatgctaaattcagaaaagcaataatgaaagacggatttaatatgtttcagttttctatatatacaagacattgcatgagcagggaaaatagtaatgtacatgtaaagagagtaaaatcagttttacctccgaaaggtcatataggaattttgagaatcacagataaacaattcggcgagattgaaatattttacggaagaaagaaagaaacaaaaaatatatctccttcacagcaattagaactcttctaaattcgtaataaaaaaaggaatagtttcgcactactcctttttaatcttcacaatattttttaattacaataattgccttaacttcattatataactatatgttataatcttcgtgctgtgacaaatattgtaaaaagaacttttgaaagcaaatcacaacaaattcctgcctgtcaacacctattatatgctgtgacaaatattgtaaaaagaacttttgaaagcaaatcacaactccgttgcgtttccaaatttcaaaaatcgtgctgtgacaaatattgtaaaaagaacttttgaaagcaaatcacaaccagtttccaaattcaaaactgtatcagaatgctgtgacaaatattgtaaaaagaacttttgaaagcaaatcacaactgcatcaatgtctgaaacaagtttcgatctgctgtgacaaatattgtaaaaagaacttttgaaagcaaatcacaacctcatcatcatcatataatctgctgtcagcgctgtgacaaatattgtaaaaagaacttttgaaagcaaatcacaacggatgttcaaacgaagatattgcaagtttggctgtgacaaatattgtaaaaagaacttttgaaagcaaatcacaacttactccgttctcagcttttttttctgtttgctgtgacaaatattgtaaaaagaacttttgaaagcaaatcacaacgattattgaaatgtaacttttagtgtccaagctgtgacaaatattgtaaaaagaacttttgaaagcaaatcacaacaactggttaaatctctgcagtctgcccagagctgtgacaaatattgtaaaaagaacttttgaaagcaaatcacaacccgttccgataggcgttgtaaagtcattgcgctgtgacaaatattgtaaaaagaacttttgaaagcaaatcacaacttttttccttgatttggttgatttggctgcgctgtgacaaatattgtaaaaagaacttttgaaagcaaatcacaactctctgccagagctgtatgctcaaggcagagctgtgacaaatattgtaaaaagaacttttgaaagcaaatcacaactcatatttaagcattccgcttgctggattggctgtgacaaatattgtaaaaagaacttttgaaagcaaatcacaactattcgccatttcgtcaactgccttttggagctgtgacaaatattgtaaaaagaacttttgaaagcaaatcacaaccagttatcgattacatcaccgcaggagagtgctgtgacaaatattgtaaaaagaacttttgaaagcaaatcacaactaaccgacaaaacaaacggataacctatagctgtgacaaatattgtaaaaagaacttttgaaagcaaatcacaactgaatggagttgccggatatacaagcgggagctgtgacaaatattgtaaaaagaacttttgaaagcaaatcacaactgtaaatttatttcaaatacgttgtgctgagctgtgacaaatattgtaaaaagaacttttgaaagcaaatcacaactacattactctcggagaattaccaactgtagctgtgacaaatattgtaaaaagaacttttgaaagcaaatcacaacaaccaattgtaagctcatttattctggccgctgtgacaaatattgtaaaaagaacttttgaaagcaaatcacaactaagtggttatagtgtctgcataaaaatccgctgtgacaaatattgtaaaaagaacttttgaaagcaaatcacaacacccctttctgaactgcatctttataggaagctgtgacaaatattgtaaaaagaacttttgaaagcaaatcacaaccttagaacaattacttaactaaaaaataagctgtgacaaatattgtaaaaagaacttttgaaagcaaatcacaacacggagtaataagctcggtaccggttatgtgctgtgacaaatattgtaaaaagaacttttgaaagcaaatcacaacactgaatatgtactgaataggttggtgaatgctgtgacaaatattgtaaaaagaacttttgaaagcaaatcacaaccctccctgccgactcctgtaacattagaggctgtgacaaatattgtaaaaagaacttttgaaagcaaatcacaacaaagcaatgcaacgattgagataagaatttgctgtgacaaatattgtaaaaagaacttttgaaagcaaatcacaacattactttaggttcaacttgtttttttgagctgtgacaaatattgtaaaaagaacttttgaaagcaaatcacaacgtgtggtaattactgatcattacaactgcgctgtgacaaatattgtaaaaagaacttttgaaagcaaatcacaacgcctcaacataaccaacttgcctaattcaagctgtgacaaatattgtaaaaagaacttttgaaagcaaatcacaaccgttccttgcctttatcttccacttaactagctgtgacaaatattgtaaaaagaacttttgaaagcaaatcacaacaccttaaggatatttcagcaggaagggccagctgtgacaaatattgtaaaaagaacttttgaaagcaaatcacaacacctgagaccatacatagttatccggattagctgtgacaaatattgtaaaaagaacttttgaaagcaaatcacaacgggtcgatcttctgaacttcatcagagctggctgtgacaaatattgtaaaaagaacttttgaaagcaaatcacaacaagccaatatgacttcaaggccggcagcggctgtgacaaatattgtaaaaagaacttttgaaagcaaatcacaacgaaagtaaagaccggatattcatttctggcgctgtgacaaatattgtaaaaagaacttttgaaagcaaatcacaactagtggtttaaagtattgtttgagttgattgctgtgacaaatattgtaaaaagaacttttgaaagcaaatcacaaccaagttcaatctttgaatcaatcagagcagctgtgacaaatattgtaaaaagaacttttgaaagcaaatcacaacgcatcaggcggcatataatccattctggcagctgtgacaaatattgtaaaaagaacttttgaaagcaaatcacaactgagaaagcgacatatacttgcccatcatgctgtgacaaatattgtaaaaagaacttttgaaagcaaatcacaaccatcagacggaaatgctcattaactgctttgctgtgacaaatattgtaaaaagaacttttgaaagcaaatcacaactataagaataaatgcgagttcggttttttcgctgtgacaaatattgtaaaaagaacttttgaaagcaaatcacaacgggcgtatatgcagagaataaagtattcgcgctgtgacaaatattgtaaaaagaacttttgaaagcaaatcacaaccaaaccttgtctttatatttgatcatatttgctgtgacaaatattgtaaaaagaacttttgaaagcaaatcacaactatactcctgatagacattaagaatgatcagctgtgacaaatattgtaaaaagaacttttgaaagcaaatcacaaccctactgttactactctgatcggattccaggctgtgacaaatattgtaaaaagaacttttgaaagcaaatcacaacttaaatcctatagctctgaggtggttgaaggctgtgacaaatattgtaaaaagaacttttgaaagcaaatcacaacatcccctgcagacggtcatccagctgatctgctgtgacaaatattgtaaaaagaacttttgaaagcaaatcacaactgattgagaacgatgcccctcagtcggatagctgtgacaaatattgtaaaaagaacttttgaaagcaaatcacaaccgtagcctgtttgtggtatgctctgctaatgctgtgacaaatattgtaaaaagaacttttgaaagcaaatcacaacgcttctgatattcttcgccgtattttgcctgctgtgacaaatattgtaaaaagaacttttgaaagcaaatcacaaccagtatggcggtataacattatggctcaacgctgtgacaaatattgtaaaaagaacttttgaaagcaaatcacaacagccagctcagacaaagcttttcctttcaggctgtgacaaatattgtaaaaagaacttttgaaagcaaatcacaacactcctttctgaactgcatctttataggaagctgtgacaaatattgtaaaaagaacttttgaaagcaaatcacaacgatataaatattgtaacagcatcatctatcgctgtgacaaatattgtaaaaannnnnnnnnnnnnnnnnnnnnnnnnnnnnnnnnnnnnnnnnnnnnnnnnnnnnnnnnnnnnnnnnnnnnnnnnnnnnnnnnnnnnnnnnnnnnnnnnnnnnnnnnnnnnnnnnnnnnnnnnnnnnnnnnnnnnnnnnnnnnnnnnnnnnnnnnnnnnnnnnnnnnnnnnnnnnnnnnnnnnnnnnnnnnnnnnnnnnnnnnnnnnnnnnnnnnnnnnnnnnnnnnnnnnnnnnnnnnnnnnnnnnnnnnnnnnnnnnnnnnnnnnnnnnnnnnnnnnnnnnnnnnnnnnnnnnnnnnnnnnnnnnnnnnnnnnnnnnnnnnnnnnnnnnnnnnnnnnnnnnnnnnnnnnnnntttgaaagcaaatcacaacaaattgcaaggtgtacattccagcataggtgctgtgacaaatattgtaaaaagaacttttgaaagcaaatcacaacttatcgaaaatgacgttagcaatatagttagctgtgacaaatattgtaaaaagaacttttgaaagcaaatcacaactaagcttgatttgtgtagctctcttatccggctgtgacaaatattgtaaaaagaacttttgaaagcaaatcacaacacagctttccggatacatttgcgtttgtcagctgtgacaaatattgtaaaaagaacttttgaaagcaaatcacaaccggatacagtaatcaataactcaactatgagctgtgacaaatattgtaaaaagaacttttgaaagcaaatcacaacaagatttacttaacaagtcaactcccggagctgtgacaaatattgtaaaaagaacttttgaaagcaaatcacaactatagtgaaagaataatcttacttgaagaggctgtgacaaatattgtaaaaagaacttttgaaagcaaatcacaacaagatttacttaacaagtcaactcccggagctgtgacaaatattgtaaaaagaacttttgaaagcaaatcacaacaaggttatgttttgagcatctttaaaaaagctgtgacaaatattgtaaaaagaacttttgaaagcaaatcacaacgcatctctacccttcttataccctgactggctgtgacaaatattgtaaaaagaacttttgaaagcaaatcacaactacagattatggttcattaaataaagttttgctgtgacaaatattgtaaaaagaacttttgaaagcaaatcacaactataaaatgtttatgtggcacagaaggaagctgtgacaaatattgtaaaaagaacttttgaaagcaaatcacaactacaatccgctaaggttaatttttcgttcagctgtgacaaatattgtaaaaagaacttttgaaagcaaatcacaacgaatgtttgaattgctgaaaatgtttttgcgctgtgacaaatattgtaaaaagaacttttgaaagcaaatcacaacttattttgcaatcgactatctccgttctatgctgtgacaaatattgtaaaaagaacttttgaaagcaaatcacaactgttaagctgaagagataatgagatctcacctaaaatcattgttagtaaattacaggtttattaatttaaaagaaaaaatggatccaatttttttattattactactcattgctgctgcatacttctttgctaagcttaagaagcttgaggggtggcttgattggtaccaggacagaaagaagaataagaagaaataattattcatctattgcctattcctgctttctccctttcaacccagttcctgaaactttctttttccctgattatcatttttattgccatttgtgacattttcatttttctgatctttgcttcgtgttcccgaaaatgattgtctccgcacaaagctgtgacaaatattgtaaaaagaacttttgaaagcaaatcacaacggtagtttaaaaagaaaagaaaaaagtatcaaaaagaaaagaaaaattttaaaaggtaattgccatattaacggctcattctatacctatttatatttttcgaaccttaattggttttctgaaagtttgtttaagccaatgaaaagtcttcactttcattattaacaagctttcagttatactgcaagtaaaatttgtctaaactaataatcacttttctcaccatacaccgttatactaaaaattcctgattccgaattattaaaaaatgtcacttcatcatccgtaagatatttttttaaaatgtcatcaggtattcttattattttttctttctgaatctgtacattcacaaatccggtcttctcaaggagactgatatattcatttttctgaattgctccggttacgcatcctgcgtaaaacgccgctgcagattgaattttctccggaagtacaccggtcagtacaatgtctgaaacgctgaaatgtcctccgggcttcagtactctgtacatttcagaaaatgcattaagtttttccgggacaagattaagcacacagttactcactaccacatcgacagaagaatcattaaccggcagatcttctatttctccgtgtctgaattctatattattgaatttcattttctccgcatttactcttgcttttgcaatcattgcttctgaaaaatctacgccgatcactttacccgtctctccggtttcagctcttgctacaaagcagtcatttcctgctcctgatccaagatccaatacagtatcgcctttttttatttttgcaaactgtgtaggcagaccgcatcctaatccaagatccgcgtcagggttatatcctctcagattctcataatcatctgtcataatgttatatacttcatcagagcatcctcccgatccgcagcatgaagaagcgttatcatctctgctttgaagcgcaatttcactgtattttctttttaccatttcctttatttcatcggaagattttgtaccggctgaattttgagatttttcatacgtcaatgtttcagttgcttcagagctgtctgtgcagcattccggtccgcagcagccggtttctttttttgttacttcattagtttgtttttcttcggttttttttattgtcttttccattattatttatttaattttaatatagttagttttgccttacttagttaaaaattgtttcatattaatatcaatttttgatacatgaattttgatctgcctgatcaatatattttattattcctgatcctgcgtgataacaaaaagcttgtttatactttttgaaaatttttcaaacattctgctgttaatacagtagcatgactttgttccatcaattgagccctgtatcagaccggcattcagcagttcttttaaatgctgggatactgtggactgagcaagaggcattacttccacaatctctccgcatatacagctgtttctttttgcaatagcttttattattgccactcttgccggatgactcagcgcttttgcaaattcagcaagctctatttcgcttcttacaaattcgttttttttattctgcgccattttaatatgatcttaattgtttatcgcaaatatacgatgaattaatttaaagtcaaactctttttttaatgcactaaaaaacaagggaagatgatcccttgttttataagttaaagaccggattattaattattgaaagtctgtattctaatgccttaacataatttcatttcagaatcatcatcctactggtctgactaaactgtcctgatcttaaaatatagaaatatgcaccggaagataaattctcagcgttaaatttatattcatattcacccggaggaagaacttcatttaaaagatttgcaacctccttaccggctatgtcaaaaattttcaaactgacatttcccgtctttgggattgcaaaattaatttttgtagaagggttaaacgggtttggataattctgctttagattataattagaaggcactgtctgtgatatttgatttactgaaaccgtcgctgtatcaataaaatggtttgcaggagttgtaacttctgtattcagcatattcacatatgcataaattcttgtataaaatccgggacccggagcattcttccattgaagatcaagatttactcccggagcaaatgaagatgcggtagtctttaagctcattttaacaatcaaagtgcccggagtcactgatgaaagtataaatccgtttccctgtcctactgttgcattacctgccagtcttagctcattattaaaaactgttggatttctcggtatttgattttgtggtaatcctgatcctattattctgtatgtaagtgttcctccgtttgcaatagccgggttgaacagaaaaaagtactgaccggatgcatactgaaactgacttacagatccggaatttgtatgg

SEQ ID NO: 1946 - DNA, 24302 bp, synthetic construct
  source 1..24302: mol_type = other DNA
  misc_feature 1..24302: note = Synthetic
ttaacaccacacttttctatgcggaaacgaaagaagccaattacgaagcaacgactcaaagaaaaacagaaaacaaataccagtctctcggagtagaactagacggttattacagaattaccaaaagctttgatgtaaaagcaggactaacctatactcatgctgaaatcaaaaatgcactggatcctaccattattggaaatatgccaagaagaactcctaaattcatgtattctgtaaatcctaatttcaatatggataaattgaatatagggttttatttaatcggtgcgacaaaagcatatacacaggattcaaacaaactgataatgccgggttatgctattgtaaatccttacatctcttatcagataatgaaaaatatttcggtaagtgtaaatgcaaataatattttcaataccatagcagttacagaagccgaagaaggatctatcgccggaggaaacggaatcataagagcaagaacgcttcccggaagcagctacagtgcgagcgtgaaatttgatttttaatactttacactaaatgtgagatgaaatctgttcatctcacattttttccaaaaacaatgatatgtttaaacaacaagccatagaaatcatcagaaaagccattacagaagaaggaattctggcatcagcgcagcagagagacaattatgcaagagtctgggcaagagattccatgatgacaggatatgccggtattttagtaaatgatgaagaaattcttgccggattggaaaaatcgatcctgaccctggcgaagcatcaggcagaaaacgggcagattccctccaatgtggtgaatggtaaagcaagcttcggaacccacgtcggaagaacagatgccacaacatggtgggtggttgttacctgtgaatatctgaaaaaaactgaaaaaaaagaacttaaaaatactcttaaatccaaaatctatcaggctctttcatgccttaaaacctgggaatataaccagagaggattggtgtacagcccgctcggtggaaactgggcagatgaatatgtaacttcaggctatactttatacgacaatgttttaagatattgggcaataaaaaatgcttctgaaatctacgatgataacgaactgaaagatatcaccgtaaaaacaaaaaaactgatccaggacaatttttataaaaacacttccgattcggtgaaatatcacgaaacagcgtatgccagaacttcagcaaaaccttatttctgggcttccctgaatgccaatggatacgatgaacgctttgatcttgccggaaatgcccttgctcttttactggattttgatttgaacttaaaagatttttcagaattcttaacttttgtaagcgacgaattcaaacactggatgcttcctgcattttatcctgttattttcccgggagacgacgactggcgactgctggaaaacaactacagctacagcttcaaaaatgaaccgtatcattttcacaacggaggatcatggccgatatttttaggatggctgtgtcttgctcttaatagaaaaggaattaaagatattcctgagaaaattcttgcgcaatacgaaggattaatgaatgaaaagggtgaacatttcagggaatattattccaccgacaaattactgccgctgggaactgagcagctttgcttttcagcttcaggatatcttttaatgacctattaaaattggaattaagatgatgcccgaaattcttatagaacgccggaattaaataacaaaggtttttatacataagtcacagagaaaaggttttagattgaaaacgaaagaacacataagctttaggaaaataataaagcataatcatctgtgaaaatccgtgaaataaaacttaactcttcttgatcttaactgtgtaaaacggctttgtgaacctaaaaacaacaacaagataaaaaatgacaacatgattggtgatattatcgaactgcatgaaaaacatttggcaacagcccaaaaaataatagaaatagtaaagcaaaagtttccacttggcaattcacaaaaaatagccatcggtattgcaggagaaagcggaagcggtaaatcggtgactgcttatgccatccagaaagtactcgaacgggaaaaagtgaaaagtctggttttacagatggatgattattttagacttcctcctaaatccaatcacgaaaaccgcctgaaatcactggaaaatgtagggattcatgaagtaaatctggggaagctttcacaaaatataaatgattttaaaaaaggaaccttagaaatagaaaagcctttggtaaactacaacgaaaactctgtcagcactgaaaaaattgaaatttcggaatacagcgtcattattgtggaaggtacttatattcttgatttggaaggatttgattttaaaatttttatagaccggaattataaagacacgtacgaaaaccgtatgaagcgcaatcgtgacgagcaaagtgattttgtagagaaagttttggaaatagaacatcagattatcagaaatttcaaaaataatacagatcttatcctcggaaaaaactatgaacttgtaaacccgaatctatgaatgcaaaaagaatcattccgcgcctgagcttttggcagatctggaacatgaatgtcggattttttggcattcagtacagttttggacttcagcagacagctgttaatcccatttattcctttttaggtgctcacgcagagcagcttccgattctgaatcttgcgggtcctattacaggattgcttatacagccgctaatcggagcgatcagcgataaaacctggagtccgaaatggggacgcagaaaacctttctttttgttgggcgctttattttgcagcattgctttatttttgtttccgttcagctctacaatctggatggccgccggattattatggattctggacgctgccaacaataccgcaatggagccttaccgggccttcatcggagacaaattaccggaagatcagcaaacattcggttttcagatgcagagcctgtttgtaggagcggggattacattagctaacctttccctttttgtttttcagaaatatttcggcggaaatgcttcgaacggcggtattccggtgtgggtttattattcattttttctgggatctttctgttctattgcctcggtagcttggtcggtttacaaaacccctgaaattccgccaacagaagaagaacttgaggagctaaaaaaatcaaaagaagggaacacattttttacgccttttgtagagatcataatagctattaaagaaatgccgaaaatcctgtggcagctggcattggtttatctttttcaatggtatgcgctttttgtgtactggcaatttgtgaccccgatgctgaaatggtctttatacggaatttctgaagctgaagagacaaaggcaaataagcttcttgaaagtgctaaaaacggtatttctgttacgatatctgatcttgcatgggcaaaaagcattttgcatcaggtggaagttgctgtcgggcaaaccggacttatgaatggttcctacaatattgttacaatgatttctgcattacttctggttccgtttgccaggaaattcagctcaaaaaatacgtatattttctgcttatttcttacagggttagggattatgacattaccatttattaaagatgaatatcttatgcttattcccatgatagcgctgggaatcggctgggcatcgatgatgggattgccgtattcaatggtttcaccgtccattcatcacaataaaagaggaatttatatgggggttattaatatgatgatcgttatcccgatgctcattcagacattgtctttcggatttatttttaacagttttctggacagcaatccatccagggcgattgttcttgcaggaatcttatttgttgtagcaggaggctgcgtttttatcatgaaacccgcaagccacaaaattaatagtttgtcctgatgttaaatttgaataccataaaagccgaaaaacattcaaagatgacgtgaaaggttaaaataaatctgatcgtatattcttctatttttaatatatattaaaaatttattattaatttaactttattgtattcttagtgttgcttttttgtaattttattttgaatttagttattaatcaagaaaaatttaaacaaaatgagtacactcaaattaaaagacggaactgagattttttacaaagaccagggagaaggacctgtattgatgtttcaccacggctggcccttatcatcagacgactgggatgcgcaggttattttttttctgcagagaggttatagagtagtggcacacgacagaagaggccatgggcgttccagtcagaatatttataatcacaccattgagcaatatgcttccgatgccgctgagctggtagaatttcttgatctgaaagatgtggttcatatcgggcattctacaggtggtggagaagtaatcaggtatgttaacaaatatgcgaacggaagagctaaaaaagcagtgttaatcagtgcaattcctcctgtgatggtacaaagcgaaaataaccctgatggagtaccaatgtccgtttttgatggtatcagagatcagactttaaacaacagaaaccagttttactatgaccttacttttcctttttatgggtacaacagggaaggggcggatgtaaaagacggcgtgcagagaaactggtggagacagggtatgatgggcggaattgtggcacattacgacggcattaaagctttttctgaaacagatcttaccgaagacctgaaagccgtagatattcctgttctggttcttcatggcgaggatgaccagattgtcccgatagaaaattctgctataaaatctgccaaattattaaagaacggacaactgattacttatccggggttcccacacggaatgccaaccacggaacatcagaccatcaacaaagatattctggaatttattgaaaaggaagagtagaaatgcggcgatcgatgtattgcaggcaaaatgcttcattgagtccgtataaaaatcattaaaaaccgttatttcatttaaaaattaaacggagaagggcaggtaattattaattttacttaattattacaaatttttccgtctgtattaggctggaattgccataaaacatatatttgcagcctaaattttaaaaataatgaaagaattaattgaaaaaatcaacgcagaatttgaagcttttgcaactgaagcaaaccaacaagcagaaaaaggaaataaagcagcgggaacaagagctcgtaaatcagctttagaattaagcaaacttttcaaagaattcagaaaagtttctgttgaagaatctaaaaaataagaagaatccctgtcggtaacggcagggatctttattaaatcatactttattaaagaatcatactcagctggattctttttcgtacctcatccacctcggttacttttacctgaacgtgctgatgtaattttaccacttcgtttacgtctgaaacaaatccgtctttaagctgggaaatatgcaccagtccgctttctttgattcctaagtctacaaaacatccgaaagcggtaatattattgacgattccgggcaatatcatcccaattttaagatctccgatctttttcacatttggatcaaactcgaaaattttagctgcctttctagggtctaaacctggtttttccagttcttttaaaatatctttaattcccaaaataccaatatcttcggtggtatatttttcaggatcaatcttactgattttctctttattagcaataagctcaagagttgtaatgcttaaatctttagccattttttcaacaattccgtaagcttccggatgtacggcagaattatccagcggattcttagcattgttaattcttacaaatgcagctgcctgctgaaaagccttttctccaagcctcggaacttttttcagctgtttacggtcttcaaaagcgccattttcggcacgataattcacgatattttctgccattttctcaccgatcccggacacgtagcttaataaagatttgctggccgtattcaaattaattcctacggaatttacacatttcatcaccgtggaatccagttcattctttaatcggggctggtctacatcatgttgatactgacctacgccgatagatttcgggtcgatctttacaagctctgccagaggatctgataatcttcttccgatagaaacggctccacgaaccgttacatcgtacgtagggaattcttctctggcaattttacttgcagaatataccgaagctccggcctctgaaaccacaaaaacctgtaaaggcttgtcgaatgcaatttttttaatgaaaaattcagtttcgcgactggcagttccgtttccgatggagatggcttcgatattgtaggcattcaccatagaccggatttttttcattgccattccggattcgttttggggagcatgaggatagatggtttcattatgtagaagatctcctttttcatcgagacatacaactttacatccacttctgtagccgggatcgatcgcgagaattcgcttttctcccaaaggcggagccagcagaagctgtgtaaggttctcagaaaagatttcgatggcttttttatccgccttctctttagcttcctgcaaagtttcattagaaatcgtgggttccagcaatcgtttatagctgtcctttatcgcaagtgaaatctgctctgctgtttcgttgcctgatttaataatggcgttttctataaattccagggcttcatctttatcgatcccgatatttgttttcacaaaaccttccgcttctgctctcagcatcgctaaaaggcggtgcgaaggcgttctgctgaggctttcttcccattcaaaatactgcgagaatttctgagccgcttcttcatcttttttcgtttttaccacttttgaagtgattatcgctttcctttggaatagccttctgagatttttgcggacatacatgttttcattgatccattctgccatgatatcccttgcaccctgaagtgcttcttcttctgaatctacctgatcgttgaggtattttgaagctaaaaaatgcagatcctgaactttttggctcattatcattttagctaaaggttccaagcctttctccttggcggcatctgcttttgttttttttctttttttaaagggaaggtataaatcttcaatttcctgaatatcgaagctttcttcaattctttgccttaattcgggagtcagggcgttttgctcctcgatagattttaggatagattcttttcttttaacgatctcttcaaactgtttgctgatctttgagatctgttcgatttgagtttcgtcgaggtttcccgttttatctttccggtagcgtgcgataaatggaatggtgcagtcttctgcaagcagctgaagggtagagctgatgcttttttcctgaatgtttgtaaggttctgtatgtatcgggtaacgttcattttaaaatttaaatggctaaaataatcatttttaatatggggaaaagtatttgaggttagccatctttttgttattttagctttttcacaggtaaattaagtgagatttaaatttattgatgtatgataaggacttccctgatgaagttttctatttttgtacttcaacagcgaaatattttagatttatattcaaatattttctggctgataaataataaacttttaaaacaattagataatatgaaaaaattgagtgttatagctcttgtagctgtcggattattggcaacatcatgtaataaagaaaaatctgctgaaaatgcagcaacagctcaggagcaggcggtagcagaaagtaaaggagaagtgctgcctgtcgatacggcaacatctgtagtaaactggaaagctttccacaaaggaggaatggcaccacgttggggaacattgatggtaaaatctggtgatttaagcattgaaaacggaaatgttgcagcaggaaattttgttattgatatgaactctcttaaagtagatcctgcttcggtaactgaaaaagataagaaaccggcagatcttgaagcacatcttaaaaaccctgatttcttcgatacgacaaaaaatcctacttcagagtttaagatcaccaatgtagccgatcttacaaatgcacctgctgatgctgttgcgggggctaacaaaacagtaagcggaaatcttaccctttcaggaaaaaccatgaacgtaaccttccctgcaaaagttgacgtaacagaaagttctgcttctattcaggctaaattcactgtaaacagagcagattggggtatcaagttcggaacttccgaggctgatccggcagaatggatgattagcaaagacatcgaaatcgctgttgacgtaaaagctaagaagtaagttcgttagatataaaattgttgaagccgtcttttttaaggcggtttttttatataaatatgtaaagatcagatttcgatattacactaatttcagaattaactacaaaagataataactgcataaagttctcaaaagaatgctgaacatcagtgacagcacgttgctgcgaatcaggcgatcagaggaaattccgcatatcaggatcgggcggaagatattttatcccaaatgggttattgatgctcaattcagaaatgctttcagaaaatgaaagcatttttttatgcctgttagcgaaattctaaaaaaatatccgtcaaaatccgtcattttttccgacaatcgttcgggcgttcttcgggtcttcttcggaaaaagtaccgtttttccgaagccgacccgaaggtgatccgaagaagacccgaagaaagtaccccggaaacccgtcaaatcccgtcaaaatgcgtcaaatcccgtcacagttttcacaggtgctcgaaaatgcaaaattccgttctatcttcgttttgttaattttaaaaatgcaaagaaatggcaagaataaccaaaggaatcctgggaggattttcaggaaaagtaggaacaatcgtaggcgcgaactggcgcggacaggacatcatcaggagcatcccgaaaccaagcaacaggccgccgagtgagaagcagcagcttcagcaggagaaatttaaaacagtcatcgcctttctccagccgctcaaaagtattcagacgaaatatttcggatcggggagcggttcaaaatccagagtgaatatggcggtatcctacaccatcagtgaggcaatacagatgacgggcgatgttcccgaattgatgtacaataaggtgttgattaccaaaggcgatctcaccggttttcagaatgtggcagcagttccgcaaacgggaaatatcatccggctgagctgggagaataattccacccaaggcaatgcttccgaaaccgaccaggtcaacgtgatctgctactgcgaagagctggatcgctttgaaatctttgaatccgtagggatccgcacggacttaacaaaagatgttacgtttccggcagtgtatatgggaaaagagatccaggtctggagctaccttcataatgagaagggaactgtggcttgtaatagcgtgcatgtgggtgctgttatcctgatctagaaatgatgagctgcctcaaaagtgaggcggcttttttgtttatataggttaatcaaagaataggagttgcgctggctggaatgcttatttataaattattcaacaatcctataataagaaaggcgagttgccccgccttgaatgttttcacaacggaataatccttattgtgaattgctttcggatacaaatctaaaaattatttttttaattattttatggttttccacaaaatacttactttttttctctttatttttatacaatttcaaaaaactaatagatatgacaaagcatatacttggattagacttgggtacaaactcgattggttgggcgttagtaaaacaggattttgacaataaacaaggagagattcttggtatgggaagcaggattattccgatgggaacggataaacaagactatgaaaagggaatcggaataaccaaaaatgctgatcggagaaccaagcgaactattcgcaaaatgaataaacgctataagcttcgccgtaataaactactctatattcttcacgaattggaaatgttaccagagcaatttcaatttaaaaatggtattcccgaacccaacaaaatccaggagttagaattattgcctatcaagaaaggaatgctgcagttggattcacttactcattacaaattaagagcgaatgcaattgattatgttattgatattaaagatttcgggaaaatattatatcagtttaatcagcttaggggatactcaggaggcaataatgaggaaaacactaagaataagcaggaagacaatttcgatgatgaaaacgaaagtgtaaaaaaatatgaagtaataacccaaaaagtactcattcaaaacgtagagctatcagacacaaaatttaaaggcaggggaaaaaataaagatttagagtttaataaattcaatgtaaccgttttactggatgacgaagaattggaaggggaaacggaactacaaaatttgagcgaaaaaatcaatcaggaagaagaattagaaatccgcatcagaagaaacaaaaaagcagaaactacttcggttgtatttgccttaccccaaaaaacaaactggcgcaaacaaatggaaaaaacagaggaggatttaaaacaatcaaatcttttggtgagccagttatttgtaaaagatttggaacaaaacaaatggacaaaaatcagaaaccgggttatccttcgcaatcgctatcaggaggaatttgatgccatttggaaaacacaaagtaattactactcctttttaaatgattgtgcgaaagataaattggaaaaaattgccaattacctgtttccaggaaaaagtgaatcacaaggaagattaagaaaagaagctattaacggaggattaaaatacatcatcaaaaatcaggtaatttattatcagcgccccttaaaaccacaaacggaattaatcagcaagtgtcagtttgagaaagaagaaacagttttacctaattcgcacccattgtttcaagagttcagatgttgggaccagattaacagaatgtatatcacttccaagcaagaagtatggaatgaaagaaaaggcaaaaccgtttttcaatatagtgaccgattcttaacaacagagcaaaaacagcagatttatcaaagactacaaatacaaaaacaagtcagtttttctgatgtagcaaaaatcatcaacctgaaaagtgataaaacagaatatttgaacggattgaatgccaaaaccaagctaaaaggctgcgatactgtaatcactattaaaaaagctctgggagaacattttgatgaactttatttacaagataattttatcgtaaataacctatggaaagctattttcgataatgccaataatggcaatgaatacgatgtcaaaagtccaaaggtttcttctattatagaagttttgaagcctttaaacaataatgaacttgtaacggaaatggctttgagaatagctcagacaattaaatttccaagaaagtattccagcctttctgaaaaagcaattatcaatatattgcctttgatgcaattaaatccttctgctgttacagaaagagtaaaagcaaattttgaaaacatagaacatcttatagagacaggagaaattttagatgacaatctcttggaggattatgttatcagttttgtgaaaaacaatccaaacgccttccaaacaggtggttttatgtatgcttttgcgagttcactggtatacggcagacatactcaagaaaacataaagcctcagattaaagactatcacgatataaaatacgcagagcgaaacctaagaaacccaatcgtatcgcagttagcaaatgaaacaatgcagattgtaaaatccctttggaaacaacaccagttcaatccagaagaattggaaatcaggattgaacttgcccgggatttaaaaaacagtgcggcggagagagacaaaattttcaaaggtcaaatcaaaagtcaaaggataaatgatagcataaaaaaaagattacaacaagaaaacatcccaataactgacaggaatattttgaaatataaattatatgagcaacaaaaatttatgtctccatatactaaaaacaaaataatccctttcagttctttatttgatgacaggctttatgatatagaccacattattccaaaatccagatattttgacgactctctttccaacaaagtggtatgtgaaacccatatcaatgaagaaaaaagcaatcgaacagcctgggaatatatttctcagcaaaattcacgttttgacgtctgttccgaatcggaatatgttcagtttgtgaacgatactttctacggtaagaaaaagaaaaatcttttattagaaaaaatccccaaagaccttgttgaacggtctattaaggacacgcaatacatttcagtcgcagtaaaaaatgaactggcaaaaattgtaggaagtgaaaatgtaaaaacgactaccggtgaagttacggactttttaagaagcagatggggacttcgtgatctgtttatgagactcacaaaagagcgtttcaaacaaatggaattatgggacatcaatcctgaaacaagcgtaacgaatgaagaatgggtaaaaatggaatttgatgaacgaaaaaataagaaagttcttcgtattaaaaactggagcaaacgatacgaccacagacatcacgctattgatgcgttggtagtagcgcttacacaacaaagtcacatccagcgtctgaataatctcaataagtatttgcaggatgaacttattaaaagaaaagaagaatttcatttggaaatcaaggaaggtgaaaccgttttggaaaccttcttcaatcttgaagagtcaagaagagaggaaatccagaaacaaatagaaagttcccgattttttgacaagccatttgatggacttatagagcaagccaaaaaccatctggaagcaatgaccgtttccatcaagccgaaagataaattgggtgtaaagaaaaacgatgagggaaaactccagttaaaaatcagaggagctttacatcaggaaaccaattacggaaaaactaaagaccctaagacaaagcttctacgagatacgaaaacgattgatttatcaaatttgaaagctaaagatatccctcaaatcatagacgaagttcttcagaaagaagtagatgcacataaaaacaaatacgaatccgtaaaagaggcctttacaggagaaggattaaaagcatttaatgaaaccaggttccaaacaaaacagcctggtaaacaaaaaccacccgtttacaaagtcaaagtttggtatagcaataaagaaacggaagaaagtacactgcaaagactttacaagaacaatgaaaaattaagcgttgttaccggagataattacctgtttttggtaatggaaaaagatacgaaaaagggaaaagagcgtgtatttgatattgcttcactatatgattcggctgatatagctaaaagttctttgaaagataatgatgaaaactttaagcaaaaaatatctgaagcctataggcttacttatggagaacgaaataaattaagaggtaaaatccaagaaaatccagatagagttttgtttacacttcaacaaaatgatttggtatatctgccggaaaatagagaagacagagtcttaagtttttcaaacgaagaacttaaaaattggctttcagacattgaaaacaagaaggtgttcagcaaacgtatttataaagttgccaaatttggagggaaagactgtcatttcatcccacacaattatgccaacgttataagtatacccaaggatttgagtgatgaacaaaaagaaattttgaaagaacaatacaaaggcaaagcaatacctaaaaaagaattgaattttatggaatttggttcctatagagattgttctccctatgaagctggcgaagtttttacaaaaagcttgacaacggataaaaataataaaaagtcaatggtcaagcctcttaaaattcaagatacttgtatcaaattaaatatagattggttaggaaatgtttcaaaagtatgaattatgtcaaaagcagcattgaaaaaagagctacaaaatctcacaaaagaacaattgatagttgtatcaaaaaattaaactatgatcacccgctccatctacatcggcaatccggcttatctcaaacttaaagatgagcagatgaaaatcctctgtccggaaaccaaaacggaaaaggggagtgttcctgtagaagatttgggcttgctgatgctggatcattatcagattacgatttcgcacaatcttattcagaaaatgatgggaaataatgtggtggtcgtgagttgtgatactcatcatctgccacacggaattatgctgccattgtacggacataccgaacattcggatagggtaaaagaccagttggaagcgagcgaaccgctcaaaaaacaactctggaagcagacggtagaatgtaagatcgaaaaccagaaaaatgtcctgatgaaattaggaaattactatgaaccgatgctggaatatcaaagaagtgtaaaatcaggtgatgtcaccaatatggaaggcatcgccgcccagcactactggaaatatctcatcagtctggattttttaagacagcgtttcggagactcacccaaccagttttttaatttcggatatgcagttctcagaagcattgttgccagagctattgttgagactggactgcttcctgttctgggaatttttcataaaaataagtacaatccgtattgccttgcagatgatctcatggaaccttaccgtccgtttatagatgtactggtcatgcagtggctgcaaatgaattctgaaacagaggagcttacgaaagagtttaaagcttatattctacagattgccacaaaggacgtacggattgatgataaaaccagacccttattagttgcagttaaaattacagcatcttcactatataagtgttacacaggtgaaaaacggttgatctcttatcctgagctgctatgaatgccgaaaggtttaatgcataccgaattatgtgggtgttagtattatatgatctcccgaccgagaccaaagccaatatgagagatgccaaccgctttcgcaaagctcttatcgatgacggattcatgctgttccagttttcgatgtatgtgcgtcattgcccaagccgtgaaaatgcggaagttcatattaaaagagtgaagtttatgctgccaaaagctggtaaagtggccattatgtgtatcacagataagcagtttggagatattgaaatcttttttgccaggaataaagaagaaccgccaccgacctttcagcaacttgaattattctgattttttaaattctaaataataaataaacccactgtgagtcagtgggttaaattttgaggttgttgtgtatcccaaagatacggataaatgaaagcaattcacaacttattcagcgaccggaaataattcattattgttgttgtgtatcccaaagatacggataaatgaaagcaattcacaacttggtatcgtcgtaataaattcagtcaaaagttgttgtgtatcccaaagatacggataaatgaaagcaattcacaactaaatcatcacgccgcttgtttcgccttccgttgttgtgtatcccaaagatacggataaatgaaagcaattcacaactatttctcctgattccttttttgttgacgagttgttgtgtatcccaaagatacggataaatgaaagcaattcacaacaagtaaatccggaattcgaagcgaaaataagttgttgtgtatcccaaagatacggataaatgaaagcaattcacaacagtaaccgtaactaagggttataatgtagtgttgttgtgtatcccaaagatacggataaatgaaagcaattcacaacatccccatttaatattactatattactagtgttgttgtgtatcccaaagatacggataaatgaaagcaattcacaacgaactctagtagcacctttctagcatttccgttgttgtgtatcccaaagatacggataaatgaaagcaattcacaacaacaccggtataattaaaaagaaaggatatgttgttgtgtatcccaaagatacggataaatgaaagcaattcacaactagttctgttgcggatttgattagttttttgttgttgtgtatcccaaagatacggataaatgaaagcaattcacaacagtaaccgtaactaagggttataatgtagtgttgttgtgtatcccaaagatacggataaatgaaagcaattcacaacatcaatacttgatcagcggctgcagtagagttgttgtgtatcccaaagatacggataaatgaaagcaattcacaacaaagggaaagagttcctatacctaagttttgttgttgtgtatcccaaagatacggataaatgaaagcaattcacaacagaatatcattcttatgcagacattaatgtgttgttgtgtatcccaaagatacggataaatgaaagcaattcacaacaacttagtggaaggccataatatacgtaaggttgttgtgtatcccaaagatacggataaatgaaagcaattcacaaccctccgattctaattactaaaccatctagtgttgttgtgtatcccaaagatacggataaatgaaagcaattcacaacctgcatcatttactgcaaagtgagttttatgttgttgtgtatcccaaagatactgataaatgaaaatgacaataataaaaaatccaagcgtaaagttcaaattacgcttggattttaattcttctagcaagatgtcaatatactttttgaaaagatttaggacttaaccaaattcaattccgcctcaaagacgtcctcaaaatgttttctgatcttcgccttgatatcttccatttcttcaggagtcagttctctttccagttctcttttcagggaagttacctgcttatccttgatgccgcaggggatgatatattcaaaataccgcatatcggtgttcacattgagagcaaaaccatgcaatgttacccaacgggaagcttttacgcccatcgcacagatttttcgggcatacggttttcccacatccagccatactccggtttcacctggcgaacgttctccttgaaggccgtattcggcgatggttctgatgatgacttcctccaggtttctcatgtatttatgaatgtctgtgaagaaattctcaagatccagaacggggtagccgacaatttgtccgtagccgtgataagtgatgtctccgccacggtttacctttacaaaagtggcctctatttcttttaatttatcgattccggcaagcatattttcttcatgaccgctttttcccagcgtgtaaacatgaggatgctctaccagtaaaaaatggttgggcgttgtaacgtgctgttcggcaggaagatcgcggtttttgattttgagatcaataatgtttttcatcagagattcctggtaatcccaagccgactgatactcccgggttcctaaatcttcaaattctacgactttattctgaattgtattcatatcattttttgactcctcaaatttagtgatttttaagctttaatggaatggatgaaatctatagctttcttcttccaatctctattttgcaataaaatattcacaaacgctgttccgataattccaccagcggctttttcggtaacattttcaaagtcttctttagatttaattccgaaacctatcatcactgggtttttcagaggaagagcggccagtcttgaaagatagttttcattttttaaaacggcattatcatttcctgtggtggaagacgaacttacggcatatagaaatcccgaacttagagaatccaggtataaaattctttcatccgaagtttcaggagttaccagaaaggtgaaatttaagtgatacttttttaaagtttcacagtagttcttttcaaattcgattgggggcaaatcaggaataatcagtcccgaaacaccactctccgaacattctctgcagaaattttcaaatccgaaacgtaaaacaggattgatgtatcccatcagaatgaccgggatttttatttcatttttaatggattttaactgagagaaaagcctttcgatcgtcattccgttgttgagtgcgagttcatgagcctgttgaatgacaggaccgtctgccacaggatcggaatagggcattccgatctccatcatatctgcaccggaatcttgtattaatttgatgatctcaggagtgtcttccaattgcggtattcctgccgtaaagtatatatttagttttttttgagactgaacgcctgaagcttgagaatcaagattacttttattcataaatttatttttctgaattagaattttgtcttttagcgaagatttataaatgtttgagatacgtttccatatccttatcaccgcgaccgctcaggcagatgacaatgatgtcattttcattaaattcttttttatctaaaacggccaaagcgtgcgcactttccaaagccggaataatgccttctaattttgttagctcaaaagccgattgtaaggcttcatcatcattaatgctaaagaactcagctcttttttccttaaaaagattagcgtgaaaaggtccgattcccggataatctaacccggcggaaatcgaatgtggctcgattacctgtccatcctcggtctgcatcaccaggcttttgcttccatgcagaacccctaaagttcccagaaaagttgtggctgcagattttcctgattcaacgccaaaacctccggcttcagcagcgataattttaacttccttttcgttgacgaaatgataaaaagcccctgcagcattgcttccaccgccaacacatgcgatgatataatccggattttcattgccggtctgtgacaaaagctgctctttaatttctttagaaatgatactctgaaatcttgctaccagatcaggaaagggatgaggtcctacaacgcttccgattacataatgtgttgttacaggattgttgatccagtctcttaaagcttcattcaccgcgtcttttaaggtttttgagcctgaagtggcgggaactactttagcgcccagcattttcattcttgccacattcggagcctgccgctggatgtcgatttctcccatatacacaatgcattccaatccaagcagggcacaggctgtagccgttgcaacgccgtgctgtcctgcaccggtttctgctataattcttgtctttccaaggcgttttgccaataaaacctgccccaaagcattgttgattttatgcgctcccgtatggttcagatcttctcttttgaggtatatttttgttttatatttttcgcttaaatttttcgcaaaataaagcggggttgagcgtccaacgtaatttttcagcaaatcctgatattctcgctgaaagtcttcagaatcaatgatttcaagatagtttttctgcagctcttctacattcggataaagcatttcggggatgaaagcacctccaaattctccgtaatatccgtattcatccggatttttatagttcatatttttgtttttttatttattaaaagttttaaataatcttcatggattaagtcccgaagggacgttttatatcaggattggatagaatccaatcacggttaatcccacaagtatttctcatcatatttcattttatgtttttttagaatcccaatcagttcatctttataatgaatctgttggtgatgctgtctttggtttttgatatagtttttaatataaaatacattttcttcagttactgaaaaggctccgtagccatcctgccagaagaaattctcatatgctttaccttttgttttcatccattttgatgaatgggctttaatttcctgaactaatttcattaatgcaattttcttcgaaagcgaacagaggatatggatataattatctgttcctccgatttgtaaaacattaatttccagatttttacataaggctgtaatgtaggaaaagagttcattctctattttttcgtctatgaaatcttctctgtgctttgtgctgaaaacaatgtgaatataattttttaccaatgactgtgacatctttttgtgtttttattaattgttgatataaatcggattagcacccgatcctattgtaaatcgtcccttcgagactcaattcatttaatcgtattctttaacatttttattctttccaaatctttaatgccgggttccgtttcaaattttgaattaacatccaatgcaaaaggtttttgatgcaaaaggtttgtattttgagtgttttcttctgaaattccgccgctcagaaaatagggaagagggatttcaatttcattcaataaattccagttaaaagtttttcctgttcctccgaaggcttttgagtcggtatcaaaaagtagataattaactgcagatggctgagcgttgattgttttttgcaattcatccggattctgattttcgattcttatgactttaataatttcaatttcgggatttaatttttctcttaattcaagaatgaaattttcgtcttcgtcaccgtgaagctgtataaaattcagctttgccctttctgctgttgcagtaattttttcaatattttcattcacaaaaacgccagttttaccattgtgtttaatcgttgaaatttgttctaaacttaaatgattcagcacgtatctcggtgattttttatagaagataaagcccaaaaaatcaatgttcatagaaattaattcctgaatctgctgcaattgtgttaatccgcaaaccttgagtttaggtagattaatatttactaatttttgattcacttataagcttttatgatgtcacattggaaatgaaatttctgaatgtatttcccgggttttcatctttcatgaaatattcgcccattaaaaatccgtcaaagcctttttctttcaggaacctaaaatcttcctcactgtaaattccgctttctgcaacggaaagaatatctgagggaagctggtttttcaaatcaacggaatgttgtaaatcaaccttgaagtctttgaggtttcggttgttgatccctacaaaatcaatatgtttattaatgtgatttaattcttcttcggaatgaatttccagcagaacttccagtccaagttcatgtgaaagttctgtaaattcctgaaccttttgaggggaaaggcaggctgcaattaacaatatcacatcggctccgatggctttggcctcgtaaaactgatattcatcgatcataaagtcttttctcagaatcggaatatgaacttggtttcggatattcagaatatcatcaaagcttcctccgaaaaaatccaaatccgttaaaacagaaattccgcttgctccgaaattctcataggcagaaactacttccacaggcgaaactttatcattgatgatgccttttgaaggtgattttcttttaaattctgcgataattccgcttttgctttttaacgtttcttttaaagaaaaaccttttctatcaaaaaattcagaatctttcagctgctgtacggaaatcttcgattttgaaaaagtgacctcatctttttttctctgaatgattttatccaaaatattcataactgtttctctattaattcaacaatgattccagactttttaatgcttttccggcaaacaagctttctttggaaattaaaagacaatcatcatagctgccgaatttgtcggtatggtacaaagcgattgccgcattggcgagaacgacagcattttgttgttccgttccttttccgtgaagaatattcctgaatatttttgccgtttctaccggcgtatccgctgcttttatactttcccctgttacagaattgaagcctaaatcttccggtgaatacacttcttctccttttttagtcataattttgctgtcagcggtaagactgatttcatcataaccatccattccgtgaaccagcgtgaagtgacggctgtctttctgtaatagatattgatagatccgggcaatctcaaggttgtacacgccaatcattgaaaattgtggttttgccggatttaccagagggccgagaagattgaaaaaagtccttagacccaaagatttccgcaatgctccgacagactgcagcgcaggatgaaaatagggtgcatgtaaaaagcagatattggctttttcaagatcttcctgcagcctttcagaattgtttttaaattcatagcccaattcttccagcacattggaggagccggtaatggttgaggctccataatttccgtgtttggtaactttctgcccggctcccgccactacaaaactcgccagcgttgaaatattgatcgtgttttttccgtcgccgccggttcctacgatgtcaatcgcatcctttgaatcaatatttacgggaactgccatgtctagaagggcttcacggaagccttccagttctttgagggtaatattccgcatcagaaaaacgcttataaaagcggttacttctgtcgcattaaatttattctgagcaatttcaatcatgaccgccttcgcctcggattttgacaaagtataatggttgaaaagatattcaaggatttctttcatgtgtggagacttttaatttgtgttgttatcaatttaacaggaaatttttaatcataatttctccctgtggggtaagaatactttccggatgaaactgcaccccatgtacatcgtatgttctgtgttgtaatgccatgatcattccgtctttatctatagctgtaatttcaagctcttctggaaagttttcacggcttactacccagctgtggtatcttccgacttccagtccgcttgaaagatctttaaaaattttggtatcattttttaccagatctgcagaagtggccaccccatgataaatttctgtaagattgattaagcttcctccaaacgcctccgcaatggcctgctgaccaagacagacgcccagaatgcttttcttaggggcatattctttaattaaatccagtaaaattcccgcttcttcaggaattcccggccccggtgaaaggacaattttgtcatattggtttatttcttctaaggtgatctggtcgtttttcaccacgtctactttagtacctagaattctttcgataatctgaacgagattataggtgaaactgtcgtagttatcgaataccaggactttggttgatggttgttggttattggttgttggttgttggttattagttgatagttgatggttggcggttgatggtattgtatgtttcatttattttttcttataataattaataaatccattcagtaattttttacaaagaattatttgatttaagattactgtatattctgtttcattgacatatttttgatcggaagacaaataaagctgcgtctctaattcatataaggaacctcttgcaataaacagaaaatgtattgtttctttgttggtgtttcttccacaaccttccgcaatgtttgagggaatagaaacggcacatcttctgatttgattttgtagaccaaaaatttcttctttaggatatttttttgttgaattataaacaagattagtaagttttcttgactcaatccaaacatccagattggtatattccataatttgtattttatatattttactaattaaatctaacaactaattacaatcaacaatcaacgatctttcagcttctctgctttctccactgcttttttcaatgcattcagcttgttgtttacttcctgcagttcgctttctgggtttgatttggcaactaatcctgctcctgcctgatagtataaagtattgtttttgctcaaaaatgtccggatcatgatggcctgattgcagtctccgtttaatccgatcattccgatacagccaccgtaatatccgcgagaatctttttcataagtatcgattaat

SEQ ID NO: 1947 - DNA, 24191 bp, synthetic construct
  misc_feature 1..24191: note = Synthetic
  source 1..24191: mol_type = other DNA
tgccagtattgccgttaggaccagaggaacgatttctaaaatcggcatcttaagaaaaccggcatagccgaccatgatgatggtcattgctccattgaaaattgcgagattccgcaccacccgcagaaccgccttctgttcagaactcacaacatgcgcactaagtacaagctctgcagtgcggccgaatttggtgcgagtcccggtagccgaaacctcagcagtcgcttcgccgcgcctgacgagtgcccctgcataagttacggaacccaaacctgcttctacgggaaccgattcgcccgtcaacatggattgatcaaccaggatttctccatcaataatctttacatcagcagaaatcacgccacccagcgaaagttttatcatatctcccggtaccagatcagcggctgagatggttttccataacccttccctcagcacattagctgacaatgcgaggcgggatttcaaggcagtaattgtggcctgggctcggctctcctggatcagccccagtatagcgttgaaaaggagcagaacagcgataattgaagcttcgatatatttcccaagaaggatttccattaggattgctccttccagcatccagggaacaggcgcccagaatttctcaagcgcgatacgcaaagggtgtgcctttgtatccgttattgaattaggtccgtatttttcaagcctgctgcctgcctctgcattcgtaagtccttgcaccgattcatttggctttttaataacctttggcagggctggagatttcgaaacctctacagatccgtgttgcaatccctgttcgggttctgtggtccctttcgtatcagaatctgcttccatatcttaaattaacgtgagttcgtgctataagcttaaggtacgataatttaaagctccgttttgaaattacatcattgtttccattctgatttccccaacccggcacaatgtataagtgtaactacatcacgtgaaatgggaaaatcagtaccagcatttattctatttgagaaccttcctgagatctgcaatcaaattattagtcctcaaatcaagtccttttttggtgagatggtaaacggcattgaatattaaagtgtccgggaattcatatctctccggcgagcctagtatcatgagatctgttttccgaacttcctcttcaactttttttatctgaggtttgcatttttcaaatgtgctacactgcaatgacgggaaggtgaaataaacaagagcccctttaaggcgggatttattttcaaattcaatcatttcatttattgcttcgggattaaaatgttcaccaaaactgctgatcggagggacatttttatttttttgcctccaatgcgcaatgacatcaccaaatctgttgaaagaatgtcttgagtaaacgtcctcactgtctggtttataatttatataatcagataaattcaacttcagagcgccatatgcaggcaaatactttaaagacgttaaaagctgtttaatccttaattcgctcaagccccccaatccatttacggtagaagttatcaataaagcatcactggaacctccatcctcaaaatcatcaaaaaactggtcatattcgggggctattacgattatatcccctttttgaatgtacttaaatgtatggtctaacatgtagatcagtcccaggcccctgtggattgctgtatttattggatttagttttaaggaatccctgatggcctggcaattcaaggaaaaggacaaattggatcctccgataaaaattatcctggcagatggtgtattttttaacgctgagtctttatcaattttagcataataaagtgaattcaactggcgtggcgttgaaggcaaaaaaatcaaaactattcccgttattaataggaaaaacgcaaactttgacaatcttaaaagaaaatacttcattttaatttagaattgaaagtaaatgaattgctgtggcacaccgcttatggggctactggctataataatttctatcaatgaaatatataggccccacctggcaataaggggcatcttcctgttcagattcgaaatggcaaactgttctgttctcccaagccattcaactaaaaaaaaaccgaatatgtataataaaaaatatttctgaaccactactgcaggttctgcaaaaagagatcttgaaaatattctggatataaaattaaatgcacccgacatgctcgccgaccgaaagaaaatccatgcgaatactgtcatggcaaaagtgatcaggatagaagcaaattctctgaccgaaggaaagatttttccttgtccggcaatttcaatgttttttctgttcctttcaaaaaaaatggaggggagaataaataaagcattcaacatgccccaaaatataaatgtccagttcgcgccatgccaaaaaccgctgactatgaaaattaagaatacattcctgatcttttttgcagttccaactttgcttcctcccaggggaatgtataaatagtctttgaaccacgatgagagcgaaatatgccagcgcctccagaattcagcaatatctcttgaaaaataggggaatgcaaaattccttaataaatctatcccaaacagcttggcaacacctaaagcgatatcggaatagccggagaaatcgcaatagatttgcacagcgaaaaaaacagctccgagtaaattggtgcttccaagattatgagaagtatccccaaaaatactggctacataaacagcacacccatctgcgatcacgatctttttaaagaacccccataagatctgccttagcccgtcaatagcctgcgatctcttaaacacccttttagatttgatctgaggcaggagatgcgttgctctttcaatcgggcctgctactaaaagcggaaaaaagcaaacaaatagagcataatcaataaaattcttttcaggaccgatcttctttttataaatatcgataacatatgacagtccatggaatgtataaaatgagatgccaaccggcaaaatgacctggagtgcccacatatcagtatgcaaaccgacagaagtcaaaaaatcggaaaatgaattagcaaagaagttgtaatatttaaaaaaacccaaaaatccgagattgactgaaatgctcaaccaaaaccaaaaaagcctgaatttccttttttcagacctggctatttgtatagctgtaaaatagtccaggatcgttgagaagataagcaacagcatgaatctccaattccagcaagcataaaaaaaatagcttgatcccaacaataagatattctgaagacgcaggcgctgattcgttacaaaccaatataaaatgaatacaaccgggaggaaaaaaaggaaatggatagaattaaataacatgagtatgaaaaccaaatagttttaaatgggcgacgtataaatccacttacttccaggtaaaaataagcagcgtttacttgaaatctttgcacaatcctgcaaaatagttgcacaattcacacatttagggtaaaatagtgatctcatactaatatacatagataggtagcggaaaatccttgatcaccactttcagttcgagaagcatgaaaccattaagcaccatttttaactggtgcaggtatgcgtcagcattaacaggggtctaagcaaaataatcaatcgttgggatgttcttgcatgtgaaatcatcaattcctttttccctttcccgaaactttattttttttaccttcaaatctaaattcacattaatcgcaaatgagcaaagtcaaagtgttgggtttttcagtatcacttgacgggtttggggcgggaaccaaccaagacctggaaaaccccttaggaataagaggccatgaacttcactcctggatggtccggacaaagaaatttcagaaaataattggtaaggatggaggaatggagggaatagacaatgaattcaccgaaaactcatttgtaaatgtcggtgcccatattattggacgcaatatgttcggtcccattcgcggacaatggaaggatgaagaatggaaaggctggtggggagaagatcctccatttcatacccccgtattcgtactgacccattatccgagaaatcccatcgaaatgaagggtggcacgacattctactttgtatctgatggagttaaggaagctttggatgcagctaaaaaactggccggtggaaaggatatacgtgtcggaggcggggtctcaacaatacgtcaattcctgcaatccggatatattgatgaaatacacttagcattctcacccatctttcttggtcaagggggaaatttatttaccggaatcgatttccagaaattaggcttcactaaaataaacaaaataaacggagaaggggcaacgcatataactttgacaagggtataatcagaaagtttgctctcaaaaattcggtaccatcgtcaaactaaatttgctaatgaaaaattgtcagaaatgaatggctgtaggtaatttgagcgcctatatcaaattatttactctttaactgccaccgcaacccttgaatcagcagctccataatacaaaaaccatttgttattgaaattcgccaacccttcaacaaaacatacattactggtctgcccacttatttcgtaagattgatcgggtttcataaaataggtatccatgcgttgcaaaatttgagtcgggttatttttatcaagcagcacctggcctgctgcataggctccattcggcaaggaaggatcgccaattggcaggatatttcggccgttataaatcaacaaaattccactatctgttatcatagcaggcggcccggattcgcaaagatcgctgtcgaattttaataggcgcgttggaacaacaattttaaggtcaggcatatttgacgctatgcccgctaatccaagcgtcggaacttcattaggccccatttcaacaggcgtccagttaataagatcaacagaagtggcaacccaaatatattggtccccccaatacatccaataagtgccatttattttagttgcgattatgttcccattattatatgttgaaacaatggaacccgatttcgtccactgattaagatattttccattgtatgctagtgcaaaggccggcccgtattttgtccaatgcaataagtcagtagaacttgcaatcattattctggcatcattgccattatacccggtataagtcatgtaataagtgccttgaccatcttctacaacccgtggatcctcgcaaccaccctgccattcatagattttctctgagtcattagccgggtagagcacaggtgcagcattcctcgtaaagttaaaaccatcactgctttcagctaacccgattcttgatgtcccattcggaagcccaatttcatcctgggcacggaataacatgtatattttcccatctctcaccacgatagccggattgaatacagctttttgttcccacaagacagtttcatttaagattgggcatatgaatgaagcattgccaggaataagcacagggttaacagaatccgattttacaaaagggagcaggtcccaactgctgcctgtaatatttgtagtcgtctttttgcatgaaaaactgatgaaacaaataaaaaaaacaaaacaaagatattccttcataggccaaaagtatgctatttatcagctaagcctttatattcccccaagccggttcgggcgagtcgaacctgctcttatttacatttagccattgccggtgaggtttatatccttctttgattctctttttgtttttttaattgttttgatgttagaattcgggtgtatcattcagaatgaaactggttttttcatacctatgtacagtttgcaatatctcctgaaccgtttcatctaattcaggtcctgaagacaggtattcggtagaatctttgccgtcctttagtaaaatgcaggtataataaactggttttaataaattgccaagatctatcttttttatttctttaaaaatattatacacgacattataatattttttggataacataagacaaatgaattcagtgagcattgcactctcgaatgtattttcttttaaatccgattcatccgtcagatcaataatccgttcaaaataatggaaaatcttttctggcgaaccagcaatactaaatcccagaaaattataggcaactgacttcaaaatcaatgaatccattcttaaagctgccgccctaccctccaattcttcaattttcttacttgttaatttcgaaaatatcctgtccaaaacttttctgtctttattttggacaaaggctgaggttacggctatatagatcatcaatttaattggggtatctggcaaatcagtaatgtatgctaactctaatattctttcccaatcctcattaatattcaatttcctcatctctcctaccaactcctcattagacacaactacggccttcgaaatatacctcggtgtcgattcctttaaaagcaacctcggctggagatccgttcccatgatagccgcataggtttccccgaaaagttgaatggctctttcatccagccttccgtttttaagcatttcaacataatgaaagatcctctccttgatgtcattcttagaacaccagctttccagaaatttaacgagccagattactctttgtttttcatccctccttccaaagcgcataagataccagatattaaagaatctttccctcagcaggtacaaatgattcttcgtctcggtattccttttttcgatcacgccgttcttttccaattgcctaagttgcgcagagatattcttcccatctattctgaccttctctttcagatccctgatgctgattgcatcccaattccttgctactgcatccacaattttttgctgctgggcaggcagatcatccatacgatgtttaaaaagaggggtcactgcatccagaatcctttccaggtccttgaccgcattttcatcattgtaatctgtgaaaatccggaacatcaggacaatggtccgtggaacaccgtctgtaagggcactaagggtatcaattctttcaggagtatcctgaataatatgccggattttttcttcttcattatagatctgtccgagtttcagtaaaagttgccgggtttcatccctatttaatccttcaagcctgatcaccttaaaaaattcaaacataggatcagcataatcaaggatagtatccggatagaaggccgaccctcctatgaggcgaatttgctttttggtgatcagtatctcccttagcctgcgcgtttccaattcgccgatctttttaaaaagatccccgatcttgtccaggagcagtacgattcctctgcctgaattatccagccatctttcaagtatatcataacagagttcttcaaaattggaccgcttcatcatctctttcatttcctgtccaattccggcaaaaccataataatcttccagatattctccaatgttttgccatagatcggataattcggaaatattgtattgctcttcctgaaaaataacaggtatcagccgtttgtttaatttggcagaatcctcaatgccatatttaatccggttcagaagagtagtcttacctgccccccttggtccaaccaggatataattctggcctggataaatcggatcagccgattcaatatcctccatgatctccctaaaaggcatctgcctgacaacaaattcattgatcagttgctcctttcccttcctgtctggattatataatagcatatctcaaattttttattcacaaatatgtttttgccaccacattctgacaattggcgaattgaactggtaaaactggtgattgccattattattgatatagccttcataacaaagcgtatcgataattgagcgataattctctttgataccaaatcctgtccccatatcatataaaacagtccgatctaatttcccctgttttgcgatctgcttaagagccttgtcagcaaactcaaaggaaattcctttgaattcttttttcaggtgactgtaataatgctcgaaatggcttctgttcctgtattctactatattattaaaagcttcatcaattaaatcctggtcgatagctcttgtattcgaggataagctgatgatctcctgcatggcaagttgaatatgaaatggaattatccaggcgatcttcttcagcaggtatagggcagcctctttgggtattttgagtccttttggctcagacaatcggtcgagaaattcaaccccctcttcaaaattgaaaggagcaatctcaactacattaatatcattgataaaagcggaggcctggatgttcgatacggtttgggtaaggccaatcgatcctgtatagatgaagcgaacatttctgttgacctccggatcctgtctaagttcacggttggattgaaggaattttatggcatttaccgtttccccatgatcggcctccagaatattcaccacggtttgcgggaactcatcaataagcagtaccaactgcatattctcctcgagctcaatacccgaaaggaaattctttatctcttcataataatttaaatccaggttttcctcattaaaggcgatctcatttcccagaattttgatgctctttagtctatttaagaatctggcttcttctctgaatctttgaaacaatcgcttagatatggaaatttcttcaaccttacataattccttaatgatctttttatagaaatcctcctcattatcaattctttccgtatctaaatagacataagcatagccttcaactttttgatcgagtaaatgaaatagaatagaggttttgccgattcgccggggtgcaattaactgtaaattgtgcccattttcgatcctgtcgattattttcctgatttcagcatccctgcgaaagaagttattccctcttgccgggctgccaacaatatttctcatgacaataatatttttgtcaaaattattgacaaattttttatagtcaaaatttttaacaataatgatatcgctaaacaacctccgggatgctttgatagtgatttcccgttcttcaagggttagttctttataacagcagccactttatgggtaatcgtatccaaaaaatcattgatagattttgcatccctttcctaccgatcgcccggccatgttcccgggaccatttctccagcttgatgtaacggtttaatctgtgttcaaatcgctctcgattgatggtaacgcgtaaataaattggataaagtccttctttcgtttttttgtcgtttctgatttgaaagaaactgtagatgtccaaatttgatattgctaattagtagcttttgttggccatagagcttaagatgatcaataatatcccaaataaaagttcccatcccagtcgcagggtccaatatctcgacatttttatctgcgagcgtttttccaaaatggcaatgcaacagaccgtgcagaatacgactgggtgccaacgtgttattgtagcagacgggggcaaacaatctacattgccggagttggaggaatttaaaaacctactcaaaataaaaaagcgacttgcgccgctttaataaaatatcactacggaataatccttattgtgatttgctttcaggacaaatctacacaaaaatagatacagtcaatctgaaatgtgcaaaacttgtgctaatagaaaaaattccattctccataaattaactaacttcaattatcacccccacaggtgtagcaagatagctcaagggatagagtgttaccaccgaaggtaagggatatgggttcaacccccattcttgctcaaatttaattaaaagggcaaataaaagattattaacatcataattttaatagttaatttatggttgtgatttgctttcaattctaaataatctgccctttaattttaagacgtccaaatatgaaaaaaatcctcgggcttgatttaggaactaattctattggctgggctttgattgacaaagaaaatcaaaagatactcggaatgggcagccgcattatcccgatgggaactgataaattggattatgaaaaaggggcaggtataacaaaaaatgctgatagaagaatggcaagaaccattcgcaaaatgaataaacgctataagctccgcagaaataaattactttttatattgaatgagcttggaatattgtcagaccaatttcaatttaaaaacgggattccagagccgaccaaacttcaggatttagaattacttccaatcaaaaaaggaacattacaattaacttctttaagccattaccaacttagagtaaaagccttgagtgaaaaaatagaggcaaaagacttaggcaaaatattgtatcaattcaaccaactcagaggatatgcaggcggaagcaacaatgaagatgatgggaaaaagaaaaaagaggaaataactgaagaaccagaaaaaaagaaatcctatgaagtcattacacaaaaagtaaaaatcctaagtgtagaaaaagcagacaggaattataaagccaaaggaggcaaaaataaaggtcaggagctacctctttttaatatcacctttttattcgatgatcgagaaaaggaaggcacaacgatactacaaaatttggaagttgataaagaagaagagttggaaataaggattaaacagacaaaaaatggagagaacataattgttgctttaccacaaaagaccaattggaaaaagcaaatggaagcgacagaagaaaaaataaaaacagaaaaattatttgtaggccaactgttattgaatgacttgctcaatagtagatggataaaagtcaggaatagagttataatgagaaaccgctatcaacaagaattcgatgcgatttgggaagaacaagcgaagcatcatgctatcttgaacgattgtccatcggataagttgtcatcccttgcaagttatttgtaccccggctcaagcgaatctcaaaataagttaagaaccgaagcaatcgaaggcggcttaaagtatatcatcaaggaacaagttatttattaccaacgaccattaaaacctcaaacagaccttatcagtaaatgtcagtttgagaaagacgaaaaagtaatagcgacttctcaccccttgtttcaagagttcaggtgctggaaacagatcaatcaattatacataaggtccaaaggagaattttacaacgagaaaaaaggcaagaccatttataaatatacagaccgatatctaacgaatgaacaaaaaaatgatctatacctgaaacttcaaaaccaaaagcaggtagggttttcagaagttgcaaaaattgtcggtttaaaaaatgacaaaactgaatacttgaatggtttaaatgtaaaagcaaaattgaaaggttgtgataccactatcaccattcaaaaaatcttaggcgacgaatttgacacaatcattaagcaagacaaagaaatcattttaaaaatctgggattcaatttttgatttgaataattcaggaaacgagtatgatgtggacagcaaaatagtttcttccttaattaatatactaaaagcctcgttagaagaaaacaaatcaattacgattgctttgaaattagcccagaatattaattacccaagaaaatatgcaaacctgtcggctaaagcgatcaataatatcctgccattaatgcaatgcaggcctgtcaatataaatgataccataagagaaaattttgagaacattaaacatgcaatcgcaacaggcgaattgaaggatggagttgaaccatacatggtagattatgtcaacagcaatccaaatattatagaaattggcgggatgatggattcatttgcagcttcattggtctatggcaaacacacatctgctaatataaacgctaccattaaaaactatcacgatataaaatttaatcccaaaaggaatttaagaaatcccgtcgttgaccaaatcactaatgaagcactacaagtaattaaagctatttggaaagaacacaaattcaatcctgacgaattagaaatcaggatagagttagcgagggatttaaaaaacagtgctgctgagagagaaaaaatttataaggcacaattaaacaatcaaaaacaaaataacaagatcaaagagcgtttggcagaagcaagaatgcctattactgatgaaaacgttgtaaaatataaattgtacaagcagcaaaaatatttgtcaccttattccggtagtacattagagcttagtttattcaatgaatatgaaattgaccacataattcctaaatcacgattattcgatgattcaatttccaataaggttttggttgagggcttcttaaataaagaaaaagacaacaggaccgcatgggaatatatctctcaacaaaataccaagcataaaatctactcgattgaagcatttatagacgcggtcaatgaaaattacttcgggagaaagaaaaaaaatttgttattggaaaaaataccaactgatttcatcgaaagacaaattaaggaaacacaatatatagccttggcagtaaaaacagaactggctcaaattgttggcagcaataatgtaaagtcatcaacgggaatgataactgatttcttaagaagccgatggggactaaaaaaaatgtttatggaattaaccgaaagccggtttaaacaaatggaactatgggactcttccagcaaatgggtagatagatatttcgatgaagaaaaaaaacggaatgtatatgaaataaaaaactggagcaaacgctatgaccaccgccatcactcgcttgatgcattggttgtcgcattgactgaacaaagccatattcagagattaaataatctaaacaaagaattacaggattggttgcttgctcatcaggatgaaataaaattagaagtaaaagaagatgaaacaattttagaagctttttttaatctagaagaaaaccgcagggaggaaatccaaaagagcattgaaggatttagaaaatttgataggccattcgatgatctagtgaatcaggcaagagctcatttggaagccatgatagtatcacataagccaaaagataacttgactattcagctcaacgacaaaactaaaaagaaagaaataaaaataaggagcgctttgcacgaagcaacattatacgggaagctgaacggtcaggataccaaaacaatgaacatttccaacttaacagcaaaagatattgagaaaattattgaccctgttttaaaagcagaggtaaataaacacaaaaacaaaggtgaatatagctcaatgaaagaagctttttcaggtgaaggcttgaaagcttttaacgaaagcaggttccaaagaaaaaaaccactatcgctcaagcctccagtatttaaattgaagatttactacaataccaaagaagtaaaagaaagctccctgcaaaggctttatgaaaacaatgacaaactgagcgtaaaaacgggaagcaattatctatttctcgtcatggagaaaaaagggggaaaagctggggaaaaggaaagggttttcgatattgtttcactttatgatgctgcagaaattgccaggatagaatggaaaaaccaaaataaagagttcaagaaaaaaatttacgaaaattatctaaccataaacaaggcagataaagttttatttacgttgcaacaaaatgaattggtttatttgcctgagaatgttgatgacccaatattaaattttgcaacagatgaatttgtacaatggatttccaaaaaagaaaataaagcaaagtttaataaaagagtatataaggtcgttaaatttactggcaaagattgtttttttataccccataattatgcaaacgcaatcagcattgccaaggatttgactgatgaacaaaagacacgattaagagcgcaatatggtgaaaagaaaattccaaagaaagaattaaattttgaagaatttggttcttttggaacaagcgctaaaacggaagtaaatgaaaattttgtaaaaattttgattgataaaaattatagcattgagcctataaaaattcaggactattgtatcaagatcaagactgattggctaggcaatatttttctaacgtaacacaagcatacttcatataacagttctcatcttctccgaaaacttaagacttggacaaggctggttagcctacgtgtaataataaacacttgcaagcgtttattttctgcaccattaccaatatccatgatcaaacgcactctttgcattgaaactgcatgccatctgaaatgccgcaacgaccagctagtggcaaactatgagcacatcaaaggctatgaaagcctcccggaaaagatagtcccaatcgaagatatcggcatgcttgtgctggagcaccagcagataactatctcgcattatctgctcaataaacttgctgagaacaacgcagcagtgatcacatgtaatgaaacccatcacccaagtggtttgttgatgcctctggaaagcaacagcatccaaagcgagcgcttccgtgcgcagatcgaagctactgaaccgttgaaaaaacagctctggcaacaaacagtgaaagcaaagatcgcgaaccaatgctcagtgttgcagaaatgggatatcccgaataattatttgagcaggtcagcgcagactgttaaaagtggcgacgccgaaaataatgaggcgaaagccgcagcttattactggagtcatctttttcctgaagcgtggatgttctttcgcaagcgcgaagggccaccgccaaataatttattgaactacggttatgctatactgagagcaactgtcgcaagagcaattgttggagctggcttgttgcccacccttggcattttccaccgcaacaggtataatgcttattgcctggccgatgatatgatggagccatacaggccatttgttgatttgatcgtgcgcgggatcatagatgagacctcagcggttgattccctgactcaggagctcaaagtgaaattattgaaattgccgacaatggatgtactaatggacgatggcagcagcccgctgatgatcgcagtccagcgcacggcggcgtcgcttgcaaaatgctatactggtgagcaaaggaaaattctttatcctcaaatgccatgaaggccgaacgcttaaatgcataccgtattatgtgggtacttgtattttttgacctgccgactgggaccaaaaaggagaagaaaatctatgccgatttcagaaagaaattgctggcagatggttttgccatgttccagttcagcatttatttgcgccactgcgccagcatggaaaatgcagaagtacatataaaaagagcgaaaaggatattgcctgaaaaaggccatgtgggcatcatgaccataacggacaaacagtttgggatgatggagattttccatggcaaaagccttgcagagccaagggaaattccacaacaattggagatgttctgacataaaataagcacccctggcatttcaggaacgcaaaaagcctccgcattttgataatacgaaggctcttaaaagcacttttttgttcctattttctttgaagaccctttacaggtaaagatttgcgcttaagctgttggtatcaaagatcgtcagaacttaatttgaaagcaaatcacaacggacgatcactcgcgccggctcgcagttccgttggtatcaaagatcgtcagaacttaatttgaaagcaaaacacaactgcaacacctgtatattgcccgatcgattaaacgatcatttttattgaaagaaatcgtattaagtcataaaagattaattttgaaacaggtttaaactgttaataagcaggcaatgattttaatccttaaattatgaccaaacatatagacaatgtaccggcgtgggtacgcatagtagtcggtattctggcagtattgaatatagcttatggggttatgggttattttagaatggatttgctttttcacgccgggaccgggattgatttgacaaatcccttaattaaagatgcaagtcttgaatttgcagcgagaaatttggcaattggtttggcattgggttttgtaacgattattaagggagctcccgaagctcttgtaattttaaccataacaagggctttgatagaaattcaaacgatcatcatttcaatgactcataataacatcaatgggattttgcttgttcctattgtattcttaatagttgaaataataataataaaaactttgataggagtcatcaaaaaagaagaagcacagcaattggctaagtagcgataagaaaaaaatcaaagagctcatgcttgattatttatgtctctctttgaattgttcctccatttcgtcgttcagtcatcttagggtttgcccgtttgcccaatgccatatcggatggcctcttccaggatcttcatgtttatttctttcagcgttttgaacttaatgcaataacccgtgacattagccttgccaattgtttttccaaatttttcagccaggtattttttgtcctcaagccccatgatataaaccgaaatgcccgctgaattgccactgatgccaatttgataaaattccttggttgagccgtctttgtagtggatggtaaattgtccatagccgatattcggatttgaaaccaccttgcctgtcgcgtctctgccatctaagaaccataatttccccttgggcaatattcggagaatgtactcgtgcaaggcttgcatatccgcacgcttaagttcatcctggctgtcaatataggctttgatttggtctttaatgctcattcaaacctaaatttaataaatcctctttgtagcaacaaatgctctatggtagaactaagctataattaaggtaagaaattacaaatccgatgaaaagccgaaagacttcggatatttcatcaatacagacgatatagcatcggcaaccaaaaatgcctttccatcatccaggaaatatgaagcgttcaggaaaactcccccgaaagtcgccagtgcaggaaagggtcccggacagcattgactagtgataatattctccacggagcctggctgctcaattggacaagggctaaatattatcaaacctgattaaggatgaagtccaggtcatccaggaagagaactattgcgtgagaaataaaaagggctctaaaaattcttgattactaaaaaggctagatttatagcatttttaaggtaacaaaccatttaaaaattgcacatcgagatttcctgactataattgcacccccttctccaccctgttctaaataataaaccagtgtattattgcattacaattatttacgaattaactcagcggagagagagggattcgaacccccgttacactgattaggcgtaaaactgatttcgagtcagtcccgttcaaccgctctggcatctctccattcagtattgataaagggtttcaaagattaagcaaaaaccaatagaactattcgacacaattttcgacacaaaacaaacctatctcgtaaccttaacctgcaatattctgaaataatttattcaaatatttataaaaagagatataaatattagtcaactgaatgcaaacttcataaatgtctaatttggagccttttagtggataaaatagttgaaaaacaaaagatgattaacttagaaaactctaattgccagtggccctaaaaagaggggagcttacacacttataatactccccaaattcggccaatgcagttgtagttaacaaaggttttcatgatgcaggggcattagtgacggcctcaaacagaaaaaaaatcgatattgcttttgtatttagatttgtaactggggcttgcctaattaaccgatctctgccattgcagaatatggccagtcattgaacgaccatttcgtagctttctattgttttgcctcagtaaattggcaccagaactatacttcagatttccatacaagaaatacagatttttgtaataatttactaaataagaaatatatttctgatttaattcaattttcaaatttctatccctatctttatcttaatcagaaatatatttcagatgacaatctccgaaatgggaaaattattgaaattcaggcgggaattcctgaatctccgccaggaagatctcgccgaaatgagcggaatcaccagccggaccatccatctcattgaaaccggaaccggtaatccatcctttgaaactctggaaaagctggcaactgttctcggaatagaactcatgttacaagtgaaaaaatcgaactgatgtcaagagcaggcgtctataataatggaatgctggcaggttatctggaaaagcttggccctgatgattatcgctttacttataatgaaagctatttcgccgatccgtcgttcccttcaataagcctcaccctgacaaaaacaaagatcgaacatcaaagccccgtgcttttttcttttttcaccggtctgctcgcagaaggaataaataaggacattcaatgccgtcttttgaaaattgatgaacaggacgattttaccaggctattgaaaactgcaggagaagacaccattggagcaattaccgtaaaagaaatcaatgaataagatctgccccggatgttataaaccaaatgtcgaaggctattgcctgaactgtcgcaaactattatttaaaggcgcgaaagtcccccctatactccccttcgaaacccctaaagcagataacctccaaatctaccaggaaaaaaccaaaagactatcgatctccggagtgcaactaaaatactccttgcggttagaaggaaaagaattgcagctaactgagaaaggcggtcaatatatactaaaacccattccgccagcagcactagtcatgcagcccgatcaggctcctgagaatgaacacctgacgatgcagatcgctgctcagttattcgacatccaaaccgcagccaatgccttgatctattttaaagacggtgcccctgcctatcttacccgacgatttgacgtgaagcccgatggctcaaaatttcttcaggaagatatggcccaaatcagcggcgcaagccgccatacccgcggcgaaaattttaagtatgaaggtacctatgaggacatcggcagattaatcagagggaacgtggcagcctatcctccagctcttgaaagctatttccggctgctgctttttaattaccttttttcaaacggtgatgcgcatctaaaaaacttttcattgattcaaacaatcatgggagactatactttgacgcctgcttatgacctcatgtgtacagtgatacatacgccccaggaatcggatacagcccttgatctatataagggtgatacggatggtgaattttacagccgctatgggtttttcggacaaccagaattcaggacccttgcagaaaaaataggtattcaacctatacgaaccgagcgcatttttgctcacttactttcttcccaaaacgaagtcctgcaaatgattcagcattctttgctgagtgaagaaacgaagatccaatacgaaaataattacctggacaaattaagccgcatgagaatgactatctaaatttttcgcataaatatttatgaacctgattcgaaacctctatatcctgtagcggcaatctcaaaaactcagaatagccatctttatttttgcgcttccggtattccttcacaaacaggtcaaaagtagcaaggaaaattctgtggtaaaactcataagggttacactcctcgaaagacccttcggcaatcaggtaggtaaattcaatgatataactattttcaaatttctcagcaacatagattctgtatacccaacgaatcacaaatcccttgaaaagctccccgtctgcaagtacatttgcagggaacgcgatgcaataaaagtctttgatagatatccatacgccattggtttctaccagatcccaatgaattactttctgtccggcaaaattgatcttaagcaatgcgttttttttcaatcaggaatagaatcctatttctgtctataactgcatctataaagacggtagggcaaaccatttggggtaaacttcaaattccttgcagcagccacaaaagcaaaatatcttccactaataaataggctttttttaataataagttgatcaataaatgctctgaagatctaaaatattaatggggggctccatttttcccatctaattcaaaagctatctgaacgtcctttaaacccaaattatgataactgtcgtatcacctggccaaaacctatactgtctcccacctccctctcccccccaactcatccggcagataaccataaaactttttaaacgtcaaacaaatagctcaaatcaaatcgaacaagaaggtttcattttcacatcatagattattgcagtgaaaatttgcaaaaaacgaatggcttatgaacaagttattcagattgggtctaaaaaatacggggaaaacccccttttctgatatctacctaatacaggaaattcgatcaatagaaagtaaataataaaagttagggagttttattcacaaccattaagcaaaccttcaatcccccttacaatccgttcctggtttgttcccaagttattcgtgtctcttttttacattctgaattgatatgcctttagggcgtggaggctaattcatgcctaaccaaaaactatctcgcttatgcgaacagctattgtattgaccgcatttgcctgtctaagcatgcaccccttatttgcgcaggacgatcagggagtcgccgataaggtgttgaactttcccagtaaacttttcaagaagctagacaagaaatctaaggacctggaccaaggtattgataagcagacagagatctatctgaaaaaactttccaaacaggagtccaagcttcgtcaacagttatataaaactgattccgtaaaagcagcacgtttatttgctaacgatccggaaaagcaatacgagacttttattgccaaaatgaatagtcaggaggcaacggatgtgcattcgatgggacctcaatacctgccctttgtcgattccatgacaagttccctttcttttctaagcaagaatacccagcttctaaataatagtaaaatacttcctgctgatgtagaaaactcgctcaaccaggtgaagcggggtatagttctacttcttgggataataaccagggcaatatggttggatttgaagcaagttccaaccctttccttattttttcaccacaaccaagcactagtccaacaacgataccagcagttccagcaacagcaccataatcaaccaacttgaattgaaaccagaatttgaacatgcatactatctaacatattcttcattttttaatatttttgccagcaaacatttaatcaattccaaatgattaaaatattaaaattgtgcttgattacaataattgtcgtagggattattagagctgttttcctggttataaaaggttttagtaatcctggttatgtacctgttgcttctttgatcttaccgaagggatatgataatttatttgtcgattccgtgaagagaaatatagtgttacaggaaagttattttataagaggacacaatccaattgcggtattctcttataataatatctactcaatactagtttgcacatacaatgtgccgaaagttttagacctaaatgatctggttcaacttcgcagtacaagaatgactgaagacttgaaaaccccaaattcaggaataaatttttcaaaaatgatctttgcatatacatgggattcgcttccgacacttaacgagttattgataaccttatttggcgattctctatgggccttcaataataatactattaaatattattccatgaatattcgcgagggctttcttcaattccggattggcaaagcgcctgacattgaattctataccaatattgctccaactgaagaaattcctgcggaaatagtttttgttaaaaaaggtggaaatttattttttgtcttaattgataatatttttgaactaaggaaaattgataaagaccttccattgaaaatatttgattatgaacaaagaggttaaaacgaagacgaaattttatccgatatgccttttatgccttataccaggagttggccttttgattggaatcggtctgatattttttgcagtatttcaatatagaaataaatcattcacatacagtttgacaatttcgatacttttaggcctggttttcacatttgttcctatgtactttcttgaccaagaaacaaagtatggtactatggcagggcggacttttcaacgttttgcattgaatgatctcgattcgttaaaaaagcaattggaaggatataaacaggattatggtgaatatcctgatagccttgaagaactaaaaaagaaatttaaggaagtagccattaatgaccctcttttacttagaaacaagaaagcacataaatttttgaagttttattatttcaggaaagacagcagttatacccttttttcatctggtattgattgcataccttataccgaggatgatctatacccacgaaaacctctaaagtaaaaattacctttttcttgataatattccaatttacaaactggtttgctttttgactgattttgtgacttcggtaaatcttccctttttcatgtttgattaaaatttaatgttaacaatacctttgttaactctaaatgcattggccgaatttgggggagcttacaattcgattttattcccttaacttaattgcgaacaaacatgcgtatcgcagggtgtttagcgatctaatatatatgcctataaaaattttggcttcggccgacctacacctcggaaagcgaacatctgggattgatgtcttcagcgacgattgctcaacgaaactcacttggaagaggatgttagactatgcgtgtcgaaattcagtcgacgtggtcttgctcgccggcgacgtgatcgaccggaataatcgatactatgaagccagcatcgccctacaagaaggattcgccaggctgaaggacgccggtattgaagtctttctagtgtctggcaaccatgacttcgatgttctcccccaagtaataaggaaccattctttcgacaatgttcatctactcggagctaatggacattgggagatctcacgatttgaacgtagcggagaggtcattcagtttattggctggtcgttcccaaaacagtatgtaacgacgaatcctgtattgcagttgggggcgctgcaaactgactcgaatttccttcggctaggtgtattacataccgatgtagacaaagtggagagtagatatgggcctgtgcccttgcttgatctccaaaacgccgatatcgatatttggatgctcgggcatattcataagccgtcgaattttgccggagaaaagattattcggtatcctgggtctccacagtcgcttagcgctaaggagtcagggcggcatggtgctttgcttctgacagtggatcagtcgcgggtggaggtcgaggaaataagtttctcgaattgccggtttgagtggctcaacatcgacgtctcggcagtggattctcaggaaacactgcgtcttttggtggagaacgatttatccctagccgcaaatttgaaattgaccgaactgggggaaactgtcttcttggtgtatgatctccacttgaatggacaaaacaggagatgtcgtgagatcaaggcctgggctgaaccgctaaaaaatgattatgatatgccgctagcaaccggtactcgagttttggtgcgggaagtatccgccaatattcggccagtgatcgaggaccatgaagtgcttgcctccgagacttccccagcaggtttgctcgcacaaactatcctggcgctgcgcaatggcaactccacgcccttcctggaggaactgattagggattgggagaggaacttcaggacgataacgaatagcacgacctaccagccattgcaggagcaatggcagcgcgaaggaaatcctaggatcgccaaggttctgatcgagcaggaa

SEQ ID NO: 1948 - DNA, 22969 bp, synthetic construct
  misc_feature 1..22969: note = Synthetic
  source 1..22969: mol_type = other DNA
aatccggaatatcgtccgatattaaaagccgaaggcttgatgcgtagagacccgcgtatggttgaacgtaaaaaaccgggtaggcccaaagcaagaaaaagatttcaatttagtaaacgttagtagtatacgaagcataaaaaaatgtttagtatctaaactgcagagactttccatgaaactactttgcagttgtgtaaaaaaaggaatgtaaacataaaaaaattaaagaatgacaagagtaaatttcgaccaattattggaagccggtgcacattttgggcacttaaaaagaaaatggaacccgaatatggctccgtatatttttatggaaaaaaatgggattcatatcattgaccttcataaaaccgtacaaaaaattgatgaagccgccaatgccatcaaaaatatcgccaaatccggaaagaaaatcttatttgtatctacaaaaaaacaagccaaagaagtcctttccgagcatgttaaaaatgtaaatatgccctatgttaccgagcgttggccgggagggatgcttaccaattttaatactattcgtaaagcggttaaaaaaatgacttccatcgatagtctgatgaaaagcccacaatgggatagcatatccaaaagagaaagactacaaattcaacgtgaacgcgcaaaattagataagaacttaggatccattgccgatttaaatagactaccggcagccgtttttgttgtcgatgtgatgaaagaacatattgccgtggctgaagcccgtaaattaaatatccctttgtttgctattatcgataccaattccgatcccaatttgatagattttcctatccccgctaacgacgatgcttctaaatcaatagatattattgtaaagacaatctgtgaagcaatacaagaaggattgaatgaaagagctttaatgaacgataaggtcgaagaagaagaacccatcgaagaagaagtattgctcaatgacgtagacgaagaagaagaaaaggttgaaagagtaggacgtagaaaaagaatgggcgaaatcagtaccgatgaaaccaaagaagaaaagaaaagacgtcccatcagcaaacgtcccgtttcgaaaaaataagagtgtttaatattttaaagtgaaataaagaatggcaataacagcagcagaagtaaataaattaagacaaatcaccggctccggtatgatggattgtaaaaatgcccttgtcgaagcagaaggtgattttgataaagcaatagatatattaagaaaaaaaggacaaaaaattgcagcaaaaagagctgaccgctcggcaaatgaaggttttgtagttgcaaaggcttctaatgacgccacctatgctgccgtcttaatgttgaattgcgaaactgattttgtaggtaaaaccgacgattttacccaattggcaagcgatattttaaaccatgccgttgaacaaaaaatcaaaaaccttgaacaattaaaagaaagtatgcttaagggtcaaactattgaggcattacttacagatatgtcaggaaaaacaggcgagaaaattgaattaaatcaattcaatgttctcgaagatgcttacgtttcttattataatcataacgggaatcgcttggcaagtatagtagcctttaataaaacaacgcaaaatcttcctaccatcggacatgaaattgcgatgcaagtggctgccatgaatccaattagtgtaaacgaagattcggttccggatgatgttaaaaatcacgaactggaaatagccaaagaacaagtgcgtaacgaaggtaaacctgagaatatggttgaaaaaattgctatgggaaaattgaataaatttttcaaggaaaacaccttgataaatcaagattttatccgtgacaataaaaaaaccgtcaaacaatatatggtcgaagaagataaagaccttgtttgtaaaggattttatcgtttacaattaggagcttaagaggattaatttttgcaataaattataggagggtgttattgtatataatgccctcctatttttatcgttataataaggatttatcactcccaattcatttggtttgtatgctttaggctaattcgaaccggatagttggtttgtaagtatcgggctaatttttcgacaaaataaaccgagcgatgttgtccgcccgtacaaccgaaagcaatagatagatgcgtgaaatctcgtgccagatagttttgtacggccatgtcgatgatggacgtaatatgttcaaaaaataatatgacatctttttctttttccaaaaattcaatcacggacctatctttaccacttaggtgtttataggcttcgtagcgtccgggattgggcaaacaacggcaatcgaacacaaagccgcctccatttccgctctcgtcaggcggataggcgtttttatacgaaaaactgctgatttctacgtgtaagcggtgttgtttgatcgcctgaagcttttccgaatggactaatttttcaaatacattccatagagtagggatttcaatgggtagattgacgttatttaatatccagttgaggttctttaaggcgtaaggaatgctttgcaaaaaatgttctttacgttcgtaaaaacctcggtaaccgtaagaccccatggcttgcatgatgcgaacgagtacaaaagcagggtagtatttgcgaaataaatccacatcccagatatgtaagttgtccagttcgcctacataataatccaacaattcatggcgtatggagggaggaatggctgccttgccatcgtagagtaaggatgccaaatcatagggcaaggctccttttcttccgccttgataatcgataaaaaatagtttatcattctgcaacataatgttgcgcgactgaaaatcgcgaaacataaaataatccgcatcggcttccaataaaaaacggctaaatagctcgaaatcgttttctaatagctgttcgtcgaagggaatctgggctaattttagaaagtagtatttaaaataattcaaatcccaatagatagactgacggtcaaaagctgctcgtggataacacagggaataatcaagtccttcgccgccacgggtttgaaagagcaacaattgtttgatggcttttttatatgtttgtattaagtcgggagtgaattcattgtatttgcaacgatagctgtaaagggtttcatcgcccaaatcgcttagtatatatatatgattttcggtgtcttccgcaagtatttcgggcacatccagtcctaccgaaagaaaatgtttggtgaaagccaaaaacgcacgattttctttccaatctttattgtatacacccataacacggttaagctcgctttgcatgcgaaaatagcatcgccccgagccggaaggagataattgttccatacggctcacctctttggcgaaagtgttaacatataaagcttttaaacgttcaattggcatatactaatttttaatagatcatccgctatcactacctataaacaacacaaaatgcaaaaaatcctattatttaactttcaataattccacttcaaaaatcaaggtagaacctccttttatttgagcacctgccccttggtcgccataagcaagatggcaaggaatataaaattcgaatttcgaaccttcgttcatcagttgaaccccttctgtccaaccggctatgacttgatttaacggaaattcaatgctttgtttacgcatgatggaggaatcgaataccgttccgtctatcaaagtgccgtgataatgcacttctaccgtatcctttgcctgaggttttttaccctcgccttgatgaatgattttatattgtaatccactggccgtttctattacaccttccttttttttgtttgctgctaaaaaggtttcaccttttttcttttcttcctgcaatgaagtattgttttgtcgatcgatgctttcttgcatcttctccaataaaccttgaatttcatcgggtgaaatggctaaatttccattgtttattacatcattaaagccttttgccagggcattgccatcaaatgtaatattcgttttggcataattactccctatggctgctcccaatgcataggacattttttcttgttctgtcatctaaatatatgttttaattaatgaatgcaaaagtacataaaattatttaattacacaggatagctagcgaaactgcgacattcatttcttgctaaaaaaaagagagtattcaacacaaatactctctaaaaataatagaaacacaatggattatcccataaagatggcctctaaagcctttactcccattatctctatggctttttcggctatttctttcgatttgaaataggtgaaagaaagaggctgttcgatttcagagacatgaatacgcttctcctgaagacagatgataaatttagcttgcgctttatctttccaatcggggcaccatccttcatttaaaaaggcactcacattgagtaaatcgttgatataaagccaacgttcaatgtgtttttccgaaacacagttgtttctgtcgccgtataaagtcgtttggttatgctttattttaccaaacatatccacaaaaaaggcttcttttttgaaatataaggctttcatgatatcgttcagtgtcataaagcaagctgatgtttagtatccgaaaatatcttccaatgttaagactttcaccttcccgatttttttcaggtatttcatatctaattctttggtattgccaagaacaagataggttttgggtttaccgctcactttttctttttggaaggctttgatatctgctaaattcaatgtaggcagagtttcaaaattagctttgcgcgggtcttctttcaatccgagtttttcccaggctaagtaattccacacataacgttcttttttgatgcgagccgtacgatatgcattaatagacgattctttggctatgttgaacgcattttcattttcgggcatattggtcattaactcatggaaggcttcaatggcttgaaccattttatcgtttccgcaagcaatgtaagatatgttttggtgcaaatgttttagatcggaaggagaagaataaaccgacatggcggtataggccaaggctcttgcttcgcgcatttcttgaaatacaatggaattcatactaccgccaaaatattcgttgtaaagagttatcttaggggtcaattctttatcgtatttatctccgtgagaaatagaatataatattacttgaggcgattcgtaatctaccacaaaaacgcggtctttagaggtaacatcttcgtagaaagtaacctcagcaggaatgtcttttaaattggctaagctatgagtttgtttaatgccgttaaccaccgtatttaattgatccggaccgtaatatatcataaaatgtttatatgacatccattcttgtattttggaaataagaaactcggggctaatggcttttaattctttttcgtttaattgggtagcgaaaacaggggaatttttaccataaatgccataggttaccaaataagataatatggtattttgtctttgtttagcattttcgcgtgctttcaatacatcgttgaccatattttccaacgcggtggcattgggagttgcattggcaacaatatgttcgaacaatgccatggctttatccatgtttttcgataaaccggaaagagtcacataactgcgttcgcttccggccgataaattgaaggtacaacctaatttataaaactcttctttgatttgttccggagtgtatttatctgtacctaaatattctatgtaagagaatgctaaatttaagtatttgtcttggtagctgcctaaatcatacacgtagttcaattggaaaagctcgttgtcgtaatttttggtatagaagatttttatgtcatcattgatcatagtataaccgattttcgaaacatcaataaaaacaggttcaatgtcattcacttttctgttttcaatcattttcacaaaatcgcttttgtcgctacggttaattttgatgggagttactttcggcttttttaccttttcaatgtcggtcggcttgcctttgcgtttgtagatgactacgtaattatctctgcgtaaatattttttagcaaaatcaacaatttgttctttggtgattttttccaattgatccaaggaacttacttgatccttccagggaatatctaaataaaaagccgtttccatcgcacttgctcttccggcattgctttcgttggttttaatttcgcgtaaacgcaggtcgttaatacaggcttggagcaaccattcgggaaatttaccttgttgtaaggaatcgatttggtctaataaaatgtctctgacctcttccagtgtttgaccggacttcggactgccgtacattaacatatagctataatcatataacatggccggactggaaccggcatttaatacgcgttgcttttgattgacgtttaagtcgatcaacccggcatttccgtttgttataatcatttcggttaatatcaacaggggtatttgttcggagcgagggttgtcgaaacgccaggctaaacgtacggattccgcttcttttcctaccacttcttttacgatgggggtgctaatgggttcttcgggtttgaaggtaaatgcagggatgggagaggctttcatggaaccgaaatatttatctatcaaagcaatagcttcatcggggtcgaaatcaccggccatgattaatgccatgttgttaggcacataataggtttcaaagaatttttttacattggtaatcgatggattacgtaggtctttttgggttcctatggtagtttgtgtaccgtaaggatggttagggaataaggcttccatcaaagcagcgtttacacgacgactatcttgtgtgagtgtcatgtttttctcttcgtaaatggtttccaattccgtatgaaataaacgtatggcaggatgttgaaaacggtcggcttgaatgagtaagaaattttccaattgattggaagggatgttttcataataattcgtaaaatcaacccaagtgccggcattggtgcccgatgatcctatgatcgacatcaatttatcgtactcattgggaatagcataagtagaagcaatttgcgaaatgctgtcgatttgttggtatatggcattgcgttcggcttcgtttgattcgtcgattgtacgataaacttcaaacaaacgttcaatctcattcaaaaggggttcttccgcttcccaattggtagtcccgaaatgtcgggtgcctttaaacataaggtgctcgaaataatgagctaaacccgtggtttcagccggatctaatttactgcctgccttggttgcaatcgtaaatttgatttttggctcttctttgtttaccgacatatatacttttaagccattctctaaggtatagatacgtgctttcaagggatcgttgggaaccgtttcgtacgtgtatttcccttgactcatgccttgaaatataataccggtaaataacaaactaatgattattaattttttcatattcaaatatttaattttatttatagatgtatattatatactaattgtttaatttaaacgaaagtttgtgcaaaaaattacatgctatctataagataaggagaaaaatgtacttttttgccggcaacatcagcaacatagaaaataggagaacagtatacaggaaatgtatccttatacagaatagctgtatacctatacatttaaaccgtatacccatgcatttaaacggtatacctatagatttgaatgattaattttgtgtacagcgcgaaaatcaactaggggtattactggcgttgctacagacacagtaagcgggataaccccaatcacccacttaatacgtgaattttcgaaatagaaaatgtgccttgtcctgatataagtgaactaattaataactattattttagttaggattttctttttttatctctgtgtatctctgtgaactcagtgacggtgttcgcttattcgatttacagcttcggacctttgccgatttccatcgttcctttataataagtagcctttattttaacggactctttggtgaattcttcggctcctattgcatgtattcggcataggttaaacattttcatattatggggtaatgtttccgctttatcaaccgacggcattaattttgaacagggaaagcttgtacaatctacacaaaatgtcgctttctctttttcggcacacgaataagtttcacatttttccggtattacaggacaatatccttcgatatttctacatcctttacatggtattttggttgcgggaaatcctttggctagtaaatgattatataaatctttatgatctttacataggtataattcacaaataccgcagtcaattccgcaaggtgcaactaaatttactctttcattctgtatcatttcaattttttttgcaaaattagcaaatattctcctgataaatctaaaaaaagagaaaaatcattattgtccactatacattacatgattaggtatagatgcttcgttttactctgacaacgcattctctctccgttttcattccttttcttttactacgaaaatcatttttgaatgaaaaaaaataatttaaaaaacgaaatcgtatataattaatacctatatttgcagcagaaaaaaaccggggaaataaaaagaggatagtaagaaataatacgtttttttcaataaatctactgtttaataggaataaaaacatgtaatcatgcgatttaaattaaccttaacagttcgaaaacaaacttttggcaatgtgttgcccattaattatcaatatgaacaatcggcggtgatatataggactttatcgcaagctagtaaagaatatgccgactggttacatgaaaacggattccgtatagaaaacggaaaaaactttaaacttttcacctattctcccctaaaaatattcaaacgccatattccaaaagaaaaagatcgcatttacattttatccgatacggtcgaatggcaaatttccttcctgccggaacaatcaaccgaaaaatttattcaaggattgtttgccaatcaggtgtttgaaataggagataaacaatcgacggttcaatttcaagtagaacaggtagaagtattgccggttcccgtatttaccgaaacgatgaactttgaaaccatgtcgcctatgtgtctgagtgtaaagagagaagacggaagtgcggaatatatctctccggaagacacacgagctaaagatgccatccttagcggtttgttgagtcgttacgaatctttttacgggaaaccctttccttccgctttcgactttaaatttaaagccgctgataatatacatagtaaaaaaataaccatcaaagccaatacgccggtatatcaattcttttaatcgcaccatactggaattgaaatagacttctgctggagtattggtgttgattgctacacttttaatcgcaccatactggaattgaaatagacttcggcgggggttttggggtttcttgctaacttttaatcgcaccatactggaattgaaatgttatctaaaaaataaatagcgtcacatgtctttaatcttttaatcgtaccatcaaggaattgaaatgattaagaccgtctacaggggtttcggtataaccgcttttaatcgtaccatcaaggaattgaaattactatataaccttttaactttataacttgtattaaaaaaaaaggccttttgttgtgtgtaaataaaagaaagcgagggaatagcccccgctttaaatgttttcacaacggaataatccttattgtgattagcttccaaattttgcagcaaagatatattattttttaatataaatgggtatataaataaaaaaagtatttttgcaaataattattaaaacatttagtaaaggatataatgaaaaagattttaggtttagatttgggtactaacagcattgggtgggctttggttgataaagaagctaacaaaattttaggaatgggtagtagaattattccaatgggaacagataagcaagattatgaaaagggcgtaggtataacaaaaaatgctactcgtagagaaaaacgaactactcgaaaagggaataaacgctataaacttcgcagaaataaacttctatttattttggatgaattagatatgttgcctgagcaatttcaatttaaaaatggaatacctgaaccagcaaaattacaagatttagagcttttacctgttttaaagaaaacaaagcaattagatgccttgggtcttatagaattaagagttaaagcactggaagccccaattgaattgaaagaatttggaaaaatactttatcaatttaatcagcttcgtggttattccggaggaaataatgacgactcaacaaagaagaaacaagatgaggatgaagatgctgtaaaaaagaaatatgaagttgttgtacagaaagttgatattcttgaagtcaaacaatcaactgatacatttactgtaagaggtggaaaaaacaaaggggaaaagcaatattattttgatgtgaaaattattatcgatggagaagaaattgaaggactaactgaattacagaacttaaaagaaaaagaaggacaagaagaagaactcgaaatacgtataacaagaaaaaaagatgatgaggtgacatacaaatttgctttacctcaaaaatcgaattggcgcaaagcaatggagttatctgaaaaaactttaaaagaagagaacctttttatcagtcagttgcgcttacgcgatttacaacaaaataaatgggctaaaattagaaatagggtatttcttcgtaatcgctacaaggaggaatttgacaaggtttggaaaacacaagcggaatattacccaatattaaaaaattgcccaaaagaaaagttggaaataattgcatattatatttttccagggaacagtgaatcgcaacaacaactgcgtaaggttgcaattgaaaaaggattagaacacattattaaggagcaagtaatttattatcagcgaccattaaagcctcaagatgaattaattggttgctgccgttttgaaaaaaatgaaaaagtcatcccgacttcgcatccattgtttcaagaatttagatgttggaaacagataaacaatctatttgtaacttctaaaactttggtggggaataaatacacctatcaaaacagatatttgacttccgaagagaaaagggctatttatgaaaaacttcaaacacaaaaggaagttggctttgcgacggtagttgaaatccttaatatggataaaagcaaagaaaaattagataaagagcaaaaagactattttctcaacggtttaaatgtaaaggcaaaattgaaaggttgcgatacatttttatctttcaaaaaagaacttggcgagtactttaatgatttcttttctcaggataaacagtttgttgagcaactttggactgtgatttttgatgtaaaaaaccacgatggaagcgagtatgatgtggaaagtaagcgagtatcttcaattgttgaggtgttaagaaattacactaatgaggaaacagcaaaagagttgtccttgaaattagctcaaaaaataaagtttcctagaaagtacgcaagcttgtctgaaaaagcgatacgaaatattcttcctttaatgttgcccaatccacagagcataccaaattcggttcaacagcgattcaggaatatgctgtcgattatcgagacaggtgaaattattgatgatccggatagcaatttagaggattatgtgattgattttgtgaaaaataatccgaatgttttacgagacggtgggataatggagccgtttgctatttcgttggtttatggccagcatacagccgaaaccataaaaccccaaattaagaattatcacgacattaagttcgaagaaaggaacttgcggaatcctgttgttgaacaactagccaacgaaacaatacaagtccttaaagcaatttggaaacaatacaaattcaatcccgaggaacttgaaattagagtggagttggcaagagatttaaaaaatagcgcagcagaaagagaaaaaatatggaatggtcagcgaaagagcaaggtaatcaacgataaggcaaaagaaatattgagtgaaaatggcattgccattacagatgagaatattttgaaatatcgtttgtacgtgcaacagaaatttatgtctccttatacccaaaagaagattatacctttcagtaagttgttcgatgacaaagaatacgatgttgaccatataatcccaaagtcaagatattatgacgattctttttctaataaggttatttgtgaaaagtatattaatgaagaaaaaagtaacagaactgcttgggaatatatctcacagcaaaattctaaatataaaaatgaaaatggagaaaaagaaatagtatctgcaaatgagtttctcagtcacgtaaacgataattactttggcaaaaagaaaaagaatctattagctgaaaaaattccttcaaatccagttgaaagacaactaaaagacacgcaatatatttcagtagctattaagagtgaattggcaaagattgttgggagtgataatgttaaaacaagcacaggagaagtaactgatttcttacgcagccgatgggggctaaggaaattgtttatgaatctcacagaaagtcgttttaaacaaatggagctttgggatttggatgaaaacggaaatccaaaaacacaatgggttaatcggtatgttgatgagaataacaaaaatcaatacgaaattaaaaattggagcaaacgttacgaccatcgccatcattcaattgatgctttggttgttgctcttaccactcaaagtcatattcatagattaaacaatttaaacaagtactatcaagatgagctaacagctcgtaaagaagagtttggaattaaagtcaaagaagacgaaagcattttagacgcatttttcaatttggaagcagaacgtagaaatgaaattatagggcagatagaaagctcaagatattttgaaaagccatttgataacttaatagaacaagttagaggtcagttggaaacaatggttgtttcacataaacccaaagataaattagggataaaaatagacgagaatacaaacaaaaaacaattaaaaatcagaggtgctttacaccaagaaacttattatggtaaaatcaatggacgtgacacaaagcgagtagatatttcatctctttccttgtctgatgtctccaaaattgtaatcgacaatgtattggctaatgaaatcattgaacacaaaaagcggtatgattcaatgaaagaggcatttactggggaaggattgaaagcttttaatgataaaagaattgctgatggtaaacgacctgcttataaagttaaagtatggtacaacaaagaagaaaagaaagagagcggattacaacgtttgtatgagaataatgataaacaaagcgtaattacaggcgataactatttgtttttagtgatggaaaagaatgggaaaagaatctttgatatagcttctttatatgattccgtttctattgccactgattccctaaaagataacatcactgattacaagaaaaagattgcagaggatttcagaattaaacacaaagataaacctgaaaagattttgtttaccttacaacaaaatgagctagtttatcttccaatagataaggaggacgaagtattaagcaaatcacaaaatgaatttatagaatggatatcaaattctgataataagaaagctttttgtaaaaggatttataaagtcgttaaatttactggtaaagactgcttctttattccacataattttgcaaatgctataagcgtcgcaaaaaatctatcaaaagaagagcttgagaaattaaaagaaaagcacggcgagaaaaaaatcccaaaacaagaaaagaactatgaagagtttggatcattcggtaattgtgccaaaacagagttcaatgaagattttctaaaaaagctaattcttaaaaaagcatttgacggatacccaccaataaagattcaagacttttgtataaaaattcaaattgattggttaggaaacatctccctttttaaattattataaaaaacaaaagtgttttttctagttctttatgaataaatattacatcatgtaattccatcaagttcatatttatcatatgtataaacaagataataatcagcaacgaatatttttacgaaagagacttatgtaattatgttgaaaagtgagggcgttacttaaagtgacaccctcactaaaaataaataaaaaatgcaattcgaacaaggatatatatatcacatctataatcagggaagtaatcggcagcgaatattttttagagaagataattatgtgttttttttgctgaagatgaaaaagtatttgctcccttattgcgatatattggcatggtgtttaatgccgaatcattttcattggatggtgtatgtgcattcaacggaagtttatagaacggctactgacggggtgattccaaatcaccccgtcagtaataagattcgcaatttaaacgaaagtattggtatattacttcgttcctactctcgggccattgctaatcaagaaagacgtagcggtgctttatttcgtgaagcgacaaaagccgaatgtcttagtctgtgtgatgaaataacgccatcttttataggctcttatattaaagtttccaatcccgaaaaagaatatcctcaaagatgctttcattacatccattacaatccggtacgagcaaagttagttaaaaatccggaagattggaagttttcatcctatcaggatgttgccggaatcagaaacggacaattaatcaaccagcaacgtattggtgagtttggattaataatttaaaatataaatcagtatgataaaacgaacgctctatttcggaaatcctgcttatttgtctttgaaaaacgaacaactattgatccgcctacccgaagtggaaaataacgatactttacccgaagcgtttaagcgagaagctgaaaaaacggttccggttgaagatattggagtagtggtattagatcataaacaaatcacattaacacaaggattaatggaaaaattactgacaaataattgcgctttaattacatgtgatagtagtcatatgccaattggtttgtttttggccttatcaaaaaataccattcaaacgcaattatttacatcgcaaatcaatgcaagtgagcctttaaaaaaacaattatggcaacaaaccatagaagcaaaaataatgaaccaagcctatgtgcttcaaactcgaaatattgagcatgagaatatattgtattgggcaaaatcggtcaagtcgggtgatgccgataatcatgaagcacgtgctgccgcttattattggggtgtgttatttaataataaaatagatgattttaaaagagatagagaggggatgtatccgaataatattttaaactacgggtatgccgtcctgcgggctgtggttgctcgagccttagttggaagtggtttactgcctactttaggcatacatcatcataataaatataatgcttattgtttggctgatgatataatggaaccgtaccgtccttttgttgataatattatttgtgagatagtaaataaatcatccagtaacatagaattaaacaaagaaataaaacaaactttactaagcattccggtattggatgtaatcattgcaggagagcgtagtcctttaatggtggctgtacagcgtacaacagctactctggctcgttgttttgaagggtcattgcgtaaaataaaatatcctcagtttgagattaaatgaatatagaatattgtgggttttagttttttttgatttgccgaccgaaacgaaaaaagaacgtaaagcggcctctgactttcgaaaatatattttgaaagatggatttaccatgtttcagttttccatttatattcgtcattgttcaagcagagaaaacgcggaggttcatatcaaacgggtaaaagcgatcttacctgaatatggacacgtaggcattttgtgcataactgataaacagttcggtcaaatagaattattttatggtaaaaaaacaaccaaagcgccacctatttcacaacaattggaacttttttaaaacaaaaaagcgactgaaaggtcgctttttaggatggtactttctctcttttttttgtgatcgtaataggtgtttacttgcttttttttatttgaaatacatcttataaacatatgatagtcatattgtttatgcatggtctgatatttcaaagagcaaaagtataaaaatttgaaagctaatcacaacactattttactatatgttttagggtcatgtgatatttcaaagagcaaaagtataaaaatttgaaagctaatcacaacaagttctgaactgtcctattgatgatattagatatttcaaagagcaaaagtataaaaatttgaaagctaatcacaaccgacttcactcctattcattgacctatgcggatatttcaaagagcaaaagtataaaaatttgaaagctaatcacaaccagacgttgataaagatttaatggaataaagatatttcaaagagcaaaagtataaaaatttgaaagctaatcacaacatactattccttcaatccttttatcaatccgatatttcaaagagcaaaagtataaaaatttgaaagctaatcacaactaaagcaaatgatacccatttccactgtcgatatttcaaagagcaaaagtataaaaatttgaaagctaatcacaacaggcaaacgattaaagccaaaaatagtgaagatatttcaaagagcaaaagtataaaaatttgaaagctaatcacaacttccatttgaactgcgtcgcctgcttcgttgatatttcaaagagcaaaagtataaaaatttgaaagctaatcacaacttattctcgcaataaatctattatcaattcgatatttcaaagagcaaaagtataaaaatttgaaagctaatcacaactagacataacttattgattttcatttattggatatttcaaagagcaaaagtataaaaatttgaaagctaatcacaacggtataagaggcgtatgtataagtcatgaagatatttcaaagagcaaaagtataaaaatttgaaagctaatcacaacgtttgaatggatttaaaggtatttacgtaggatatttcaaagagcaaaagtataaaaatttgaaagctaatcacaactattgaaatgatgaattatttttttgataagatatttcaaagagcaaaagtataaaaatttgaaagctaatcacaacattcaattgttctttatcgtcaattattctgatatttcaaagagcaaaagtataaaaatttgaaagctaatcacaacgttcttttgatgtcgtaaatttcttttgcgagatatttcaaagagcaaaagtataaaaatttgaaagctaatcacaactaaggaatagcaattagaaaacatataagcgatatttcaaagagcaaaagtataaaaatttgaaagctaatcacaacagccaataacgatgcatcgacaacttttttgatatttcaaagagcaaaagtataaaaatttgaaagctaatcacaactaaagtgtcgttcctctgattatataaatagatatttcaaagagcaaaagtataaaaatttgaaagctaatcacaacttacgaagcattaatttaagttcctttaacgatatttcaaagagcaaaagtataaaaatttgaaagctaatcacaactagcattaagagcgttgatattgatagtatgatatttcaaagagcaaaagtataaaaatttgaaagctaatcacaacctaaaatcataatattgttgtccgttggcagatatttcaaagagcaaaagtataaaaatttgaaagctaatcacaaccatatgctgtctttcgtgttcaaaggtcgagatatttcaaagagcaaaagtataaaaatttgaaagctaatcacaacaatagagcgttgtatgttaattttaacatagatatttcaaagagcaaaagtataaaaatttgaaagctaatcacaactatgttttgtatccttcgagaaatacgaaggatatttcaaagagcaaaagtataaaaatttgaaagctaatcacaacgggtattcaggcgaagaccccacagaaatacgatatttcaaagagcaaaagtataaaaatttgaaagctaatcacaacattgtatcgcacacaatgatgcccggttgtgatatttcaaagagcaaaagtataaaaatttgaaagctaatcacaacaatattttaaatgttaattttattcccattgatatttcaaagagcaaaagtataaaaatttgaaagctaatcacaactcgtcaactataacaaagctgtcaggcagaagatatttcaaagagcaaaagtataaaaatttgaaagctaatcacaacctcatacgaggaggtatgtttataataaccgatatttcaaagagcaaaagtataaaaatttgaaagctaatcacaacgccaaagacgacatcttttatttcagctgcgatatttcaaagagcaaaagtataaaaatttgaaagctaatcacaacatattttcaagaagtttatttaatcgttcagatatttcaaagagcaaaagtataaaaatttgaaagctaatcacaacgtctcggtaataataattgagttttgttccgatatttcaaagagcaaaagtataaaaatttgaaagctaatcacaacgccttcataaacgccgcttgaaactgtcgagatatttcaaagagcaaaagtataaaaatttgaaagctaatcacaacacaaaaagggaatggataaaattaaaatcagatatttcaaagagcaaaagtataaaaatttgaaagctaatcacaacgattttgtttgcatagtaaaaatgataggagaaaagaatataaatcaaatcattaaatccctatgtggtgctaagatagtagttataaaagtacactatattgggggctggtattgttcaaataaaataaataaaaatatctaccgttgacaattttagtacaataaaagacataatatggacaattttttaaaattataccaatccctaggattgcaagagcatagtgattatcttttagaattattacaaaaacaaaagcatttaaagcagacatttattaaaaaataccaaactgagtttgagaatatcaggttacaaacgaaacgtttttatgatagagaaaaaactattaagaaaattgagctaaaagctgaggaattgagattggtgcttaatgatcttgattttgaagataccgattgggatagttggacaccaactcaggaatatgtacctgattacgaaattgcccaaatattggctgaagaggaagccagtcaggtattcaaacctttttactttgattttgaaatatcgttactacaagaggatttgaccgatattgtttcgaattttatttccattattcatggagttttatgtgccgaaataaacgatccatttggaaatttatgtgaaatgcccaatgaattttttatttgtgaaatggacgatcttatcaaaaaaaagctaaatacatttaaagaacgaacttttgtcagcagtgattataataattgtttcgatttgatttttgctttcaatcaaaaacactacaacggccgacatgagtttttagtaacaatttcaaattttatgattcaaataatcactgacattaaaatagccgaaatggcttggaatattattaagttgtataatacacctatcaatttggctcctaaacttttaagcaacatttcttccttgcttgctaataaaagtttatggctcgaatgtcatgaagcaatttttttggctgattatgaaacctctattaaattactcgattattactatcaagagaataaagaagaatttgaaataaaagcattgctgttggcagagcaattcaagaatttagcgaccgattatttgatagataaggtcaaaaaggggacgaatcttcatgtttcactactgaaaaataaagtttcgataggcgatagttaccgttattttaaggaattgaaaacgtatttaaataaacaggagttgaatcaattcatagattcaatccagtatgccaacattaaagtcgaaatatatggaaaagaaggtatgtatggtgaactcgaagagcttataagaaacgaattaaagttaaattattctttatcatgttttgattttattaattcggtgaagtatttctataccgaaaatcctgatttagctttggaacttactgttttagaaattaacaaacgcatgagtatagaaaaaaatcgcaaaacatataactatatcgcgaagctactaaaagaatccaaatcaattgtaagaaaattacccgaggtgaataatctgatcgaaaaactttacaaccaacatccaagtttacctgcattaaaagatgaattcaagaaagcaaatataatttagaagaatcataattttattgttttatctctgtgtatctctgtgacctcagaggtttaatttttttcactacagagaacacagagaaacacagagagcttcattatatcaattccgaagaggtcgtagatgactattttgttttggaaagtgaataggatatgatgaattgttttttttcgtttcacccaattttcttccaaacgagcgaaaatttgcaagggcatgtttttcaaaaaatgaaaatatttttaagatgcttttctatagcatatagattcaatgcgttataaagtaaaataaatcaaaaaaatattttatttttgacgtttatataataattaatgctatatttgtaccaaataaaatatgtttaactatttaaaaaaattacatcatgtctattctttataaacccgaattattttcacaacccggcgtagcaggtgggggagaacttcgttatcgtgcagggatagtctatagaggttccatctatatggatcaaattgtgaaagatatagaaaaaagaacttcggtttcttccgttgatatccttgctgtagatctagcaaaattagattgcatggaatattatttaagttgtggttatcgcatcatcctggaaaatcaaggtacgtatattccctttatacaaagccttacatgcaaaaacttatgtgatgtggatgcaagtttaattaaacgcatcaaggtgggatacaaaccttgttcgagcttagaaaaggttttatcggaagttaactttgaaagagcccgaaagaaatattggtaacctagctttttttgccaaatttcgtcctgcccaccacaaaaataagtgccacaaaataagaactatctgtcattgttagggtgggcactccaagtcagatgagaagtcttccattgtctcaaaaatgcctttgtttttgcgctgaggtgggcaccctaacaagaatttcttattagccatcgagcgatacttaaggtgtgatttttccatagataatattttatccctctctatactcttaatggcgacaaatcatccactgaatttatccatgaaaatctgtagacaattaacaattgcaaattgagagaaaattatttatttttcaattgccttttggattgttataagagtcatttaaaattttaaaacttagcaaaacttgttttgaattatccactaatcgatttagaaaggatccataattactgtccagcccttttgttctgctatgcttttgtcgcattcttcggaattaccatatttgcctatataaatggtttttccaccttgaataggattgtcgtgtaatgtttcaaatagagcattcaatttgtcagcaagaaaattacaatatataacgtccaattcaattaatgctgtgtttttgcttacatccaaaccagataagtcactataacaagtaaacttttttaattttgtgttcttacttaaatctatgttatccataaaactacctccacaatacaattctgttagtttcgtattcttactcacatccacaaactttatatcaaaagaaatgcattccatatatgtaacattattgcctgttattgttataacttgaccaaatgtactagcacagtcatgtttatagcttgttggagtagtagaaagtgtaaagttttcttcagtttcatctccccaattaattttcaccgctcctgtaccggcaagtacaatttccatatcatgatcagcgaatgcaatcatcactaccattgccctaggaccgctattttctacggtaacgatgcagtttgctgttttttcgccctctgctgaagtagcgctaatagttgctgtgccttcatccattgctatcaccatgccgttcaaaaccatagccacagtaggatcgctactcgtccacaccacggttttattttcagctttttcaggctcgatggttgcgtgtaacagaagcgtatcgcctactttaagcgtaacagcagtttgatctaacgttatactccttactgatttttcgcatgaaatgcatgaacaacatactatgaaacagacggctaataccttcaccgtgtttcttattttcctatattttctaatcattttattttttttaatttgttaataaattttataatttacaaagagaataattctaataaaatagttaatttctttcgttaatattttgccggaatgtttcttaaactattatccattttttttaaatctgctgcaaa

SEQ ID NO: 1949 - DNA, 21653 bp, synthetic construct
  source 1..21653: mol_type = other DNA
  misc_feature 1..21653: note = Synthetic
tctcctgaataagcttctcgatcagaggtgattcttttttttcatgatggtaaattttaaaatttgcactttaaaattaccaaaatcaacatttaccgcattagcggtttagttcaactaccgaatatatgcaacaactgtgaaggcttaaaagtttaacgtatttttatcccgttaaaaaataactcaattggggaagggattagtcataaggtcaacaggaagctggtattcggtaaaatcggatgccggggaacagattgactgtcgcatcaagggaaagcttcggatgaaagaggtccgcactaccaatccggttgcagtgggtgaccgtgttgagtttgaacttcaatatgatgaaaccaccaaagagggtgtaaccggaataatttcgtctgttgaaccccgtaaaaactacattatccgaaaggcctccaatctctcacgcgagagtcagatcattgcggccaatattgaccaggcctttatcatcgtgactgtgaattatcccgttaccctgccgggatttatcgaccgttacctgatctcggcaatggcttaccgcataccggcatcactggtcttcaataagatcgatttatatactgataaagattacgaaaagcttgaggagtacctccaaacctacgaatcgatcgggtacaaatgttttcaggtttcagccgaaaagaattttaacatggagctcctgcatgcggaactaaccgggaaaataagcctcttttcaggtctttcaggagttgggaagtcctcaattcttaaccggattgatcctgaacttaaacttaaaacagggatcatctccgatcatcaccagcagggaaaacataccactacttttgctgaaatgtttgaaacttctgatggagccatgatcattgataccccgggaatcaggggatttggggtgatcgatatgggcaaggaggagattgcccactattttcctgaaatgtttgggctacttgatcagtgccggtttttcaattgtacccacacccatgaacccggatgcgcggtaaaggctgctgccgaaagcggagatattcctgctacccgttatgaatcatacctttcattgatcggggaagataacggaaggtaccggcaaccctaaaacgccaataattctgagagttttaccatcaaattaaagattttaattattcctggtttctctcatttcaggattacctcccggtcatatctccggatttgttctttccattgttcaggtatcgggatacttttctgccccttgatgtcataacaaaccaaaacaaccaaacaggtagacagcaattcaccggtatgttcctccacaagctgatgctccatcgtaaggcttttggtccctacatgggtcacatgtgtttcaaccagaatactggtcctcataaagataggcttgagataatctattttaatcatggcacctaccacacctatgttaataaagtccatttcaggcagcacctcatcaaaataatgcaatttcccggcatcatagtaattctgataaaccgtattcgaaacatgccccaacatatcaacatcgctaaacctaacctggataggaataatgctcctgaactgtgattgattttccatgaatgttatttttaccggccgacgatatgacaagtgcgggaataaattgttgctcaactgtctgccggcacaaatgtatgtaaagaattcaaatttttcaacgaacaagcaaatccgcctttgctgtagcggttactatgtgtggtttttctgtccgccgagctttatatattgctcattggtttgtctgttttactttgaagtgtctttgggtataaatctgtcgtaaaaaacaccagtccctttagcgtcaagtcgtcctacaattactgtaacggaactgtttgcgagttctaatttaggtgttaaatgataatgttctctggcaccaattggaaggtccttgtcatcaacctcttcttgatttagatcagcgatatcatttaatagtttcgcaaatgatctcagtccttcaggatctccatgtattaaaatctcttcccactttgatatttctccttcaaaattgtcttcattgtgcgatacaaaaatatctaaatgtccatcaatttcgccccctctggtatgtttatatttcattgttattcctgttgttggttcagttctacaaaatcacacttaacttacaaatatacgataagccatggttgctaattaaagttaatccaaattgatcttaagaaatagagcacataacttaccgggcacctttcagctcaactcaccaaactgactaaaatcatctttttaaacaaaaaaaagggttattgttattattttcgaatattatttttatttttgccgccgaataacaacaattggaatgctacaaaacaatactttttatttttggtttggttatctcggccttcgtatggggactgaacggtaaggtattgtcaaacaatattgaatcaaaaaaaggtctccaaaataggagacctttttttgtatataataaaaaattcaaaatgaaagttgcagttataggtcttggattaattggaggatcgatggcaaaggatttgcgaagaaccaaatttgccactgagattatcggcgttgacaataatcccgggaatgcacggattgccttggaagctgggattgctgaccggattgaaccgctggaaacagctgttaaagaagccgatctggtcatcctggcgataccggttgacaagattgtcctgttacttccggtcattctggatcacatctccccctccacaacagttgtggacgtaggttcaacaaagcgccaaattacagaaggggttaaggatcaccccttacgcggaaattttatccctgcgcaccccatgtcgggaactgaaaacagtggtcccactgctgcggtcgagcatcttttcgaacataaaatttgcatcatttgtgatcatgaaaaatgccgcccacagcatctggcacttgccgagaaaatgttccagtcactgggaatgccgattgcctatatgtccagtgatgagcaggatcacactaccgcatttatttcccatctgccacatgccacctcttttgccctggccaatgcggttttagccattgaggatcgcaatatcattttcgatcttgcttcaggaggttttcaatcaactgttcgtcttgcgaaaagttctccacaaatgtggtcacctattttctggcaaaaccgtgactacatttacgaagcgcttgaagtatatatccatcatctcgaagaatttaagaattcactcaaaaataatgatcatgaacaattgtcatcattgatcgtaaacgccaacaagatcaggggtgtactcgagggagaaaattcatccttaaccaaaaacgaagaaacaattattaaattttatacaaaataaacaatcatgggatcacaattagacatccagccgattagccactggttaccaaatatagacaatccgttgttgatcagcgggccatgcagccttgaatcggaagagcaaacgatggcaacggcaagggaacttgcaaaagataagagggttatggtataccgcggaggtatctggaaaccacgcacccgcccgggttcatttgaaggaatggggcccgttgccctgaaatggctcatgcaggtgaaggaagagaccggattacttaccgggactgaagtggccaatgctcaacatgttgaagaatgccttaaggcaggagtcgatgtactctggattggtgcccgctcaacggcgtcacctttcgtggtgcaggaaattgcagacgttctcaagggaactgatcagatcgtgatggtaaaaaatccggttaatccggatgttcaattatggattggtgcattggaaagacttaatcatgccggattaaaaaatcttgtggcgattcatcgtggatttacccccttcggcgagtcaaaataccgaaactacccaagctggaagaccgtgatcgaactgaggcagctaatgcctaatctgcctattatctgcgatccgagtcacattgcaggaaaacgtgaatacctgttcgaaatttcgcagaaggcatttgatcttggccttgacggccttatgcttgaatcccatatcgatccttcgtgcgcattgagcgacaaagaccagcaggttaccccttcggaactgggcaaaatactcgataaactggtgatcagatatgccagttcaaacgatccgcttttcgaaaacatgctcgataccctccgttcaaggatcgatgggatcgatcacgaaatcatggagattttagcctcacggatggagattgtaaggcagatcgggacgtataaaaaagaaaataaagtgactgctctccagatcaaccgatggacacagatccagcaggatcgggttactttggcccgtaaactcaacattgatgaaacgctggtaaatcaaatattccagcttattcatgaggattcggtacggatgcagaccgagattatggacagcgatttataaataaactgtagagacgcgattaattgcgtctctacagtttattcttaaaccgcccggcaatttttatcatcgccttctcgatctccgcaaattcaagctcctcttttgcgatatagacaatcatcatagctgttcgcagttcgttttgctgcagtaatgaatatagttcatgcttgtgaaaacggtaagcttcacgcattcgtcgtttgagcaaattccggtcgtgcgcttttttgaaaagccgtttagggacactgaataccacctgtgcagggacctgtggcaaaagttgctcaaatttccagactaccttcagggggtaacacaaaaatgaggagcctgtcagaaagagctcaccaatgatcttctgactgcacagtttttcctcctttctaaatgtgtaagctaccataaactgaagagaacaaaaaagaggttgtcaaaagccattttttacttttgagacaacctccttcagatgaaaatgctaaaaatcttctatttattatttttattgaattcagcgacaaacctctcgatagctgcaggcatagatggagcttcctggcttggggcttctacatcgagccgcaaacctgcatcccggaccgcctgagcagtagcaggaccaaaagtggctattttaatctcattttgttcaaaattgggaaaattctgcgtcaatgatttaattccagcaggggtaaagaaacagagcatatcgtaattcacatctttcagatcagatagatcactgctcaccgtacgatacataatagcctgtgtgaaagggattttggccttttcaagcaagatcggaatctcatctttatgaacgtcggacaatgggatcagaaatttatcttccttgtgtttcatcaatacatccaataaatcgggaaacttaccattggcatagaaaatctttcgcttcctgtatacgatgtatttctggagatagaaggctgtagcctctgaaatacagaagtacttcatggtgtctgggatggtcagacgcaaatcctgtgaaattctgaaaaaatgatcaatggccgttctgctggtaaaaatgacagcagtatgatcgagaatcgaaatcctgtcttttcgaaaatctttcgcagaaacaccctctacctgaataaactgacgaaagtcaattttcagattgtgcttaaccgccagatcattgtaaggcgaatttccaggattcggctctggttgcgatactaatattcttctaattttcaacttattcactttttaaaattcgaatttcaaaactcctctatgttgcaatgatgagtttgaaaatcaaaagcagcggtagaatttcaagggtacaaaggtataaaatcaaatagaaaattgaaatgtctttttgatatcccaaataaatacttctgatcactgttgctacattcatcaggacaatcaggaaagccattatccaaatggtaataaagttggtttcagccagtatggcatgcaccgtaactacaggcagcaagataagccctaataccttataatacagtcgaatattaaatattaattcatctgtttgctcctttagcatagcgatggaccccactaatcggtggatgaatatcttgatgaaaaaataggtgtttatgaccaataataatccgataaaaagaacgattgggtgaaatccggatagatcaaccttgaaaaaccgggcaatctgaaacacggaaaggggcactatcaggtaaaaaatcaggtcgagacgaacagttccgtacatcattttgtagccgcgctggcgaaataagcgcgttgcagcattaagattcacaaggctggagaaaatctgccccatatattccgggaattcaacccgaatagaagcaaaggccgcccataaaataaggataatacccaaaatccaatcctgtccgggtgcaacacgctccttcccaaccaatccatacggctttaccgatattggaacgatcgtacgctgagccttcagaaaagccgagtctgacagcgatttcaccgttccaaaatataccgtatcacccgatgtggtgtaataacccggattgcccgtgtaaatattccacgaaccatccttgacattaacttcttcggtataagccttcttctgaagaatctcctttttaagcctgtttttggcataaatagttttattcgcgcctttctgtgtcttgtttcccagggaggaggtattggagcccctactgctttgtggagacaacccgtcactctgcgcctgtaaatcagcaacaaagttatttggattctctttttcgaccagcaaggaaacaatcatacttcatacttttttggcggtgcaaagataaaaaataaaggaatgatacttctcgttcaataaactaagaggccaattcacttaatataaaatggcgggagatcactacatttgcagttatgcagataaattcatctttcaaaatctactttgccccgctccaggagtcaacagaccatatctaccggatggcacatgcgaaatatttcggggggatcgataaatactttgccccatacatcctgcgtcaaaacgacgggactgtcaaaaattcgcaccagcgggatatcaacccagtgaataatggcggatatccgctaattccgcaaattcttgccggaaattcccatgattttatcgttcttgccggactattgcaggagaccggataccacgagatcaactggaatctaggttgcccttaccccatggtgaccaacaaagggctcggctcgggactccttccataccccgaacggattagagtaatccttgaagagtcgttgcccagatttaaatgcaggctttcggtaaaaatgagatccggactccatacttcggacgagatctttcaggtcatcgatgtgctgaatgatttcccgattcatgaggttatcctccatccaagagttgccaaacagctctacaagggtgttccggatgaagagctgttcgccgaggtgagccggaggattaaacacccgctggtctataacggagacatcacctttgctgtagatttcagccggctcaaaaatctttttggttccactgaaagctggatggttggtcggggaatcctgaaaaatccgtttctccccaatttgctaagaaccggcagtttgcccgagaaagagaaatgtgaagaaacgctgaggaattttcatgaagaacttttgatcggttattccgggatactgaatggaaacagtcatttgctgatgagaatggaaaaattctggagctacttttgttttgcgtttcccgatccccataaaacgttcaagcggattaagaaggctgccaatatgaccaaatatgaactggctgtgaatgagaatttttcgcaattgagatacaccggggaataaattttggtggcaggagtgatcgggtgacaatgttcaggaattgaaagtcacccgctcactacagaaaatatcacgggcagctggtaataggttaaagacagaacttaaagtgaacgggtgacagggacagaagctgaaagtcatccggtcactgctgaaaatatcacgggcagcagataaaaggttaaagacagaacttaaagtgaacgggtgacggggacagaagctgaaagttacccggtcactgcagaaaatatcacgggcagctggtaaaaggttaaagacagaacttaaagtgaacgggtgacggggacagaagctgaaagtcacccggtcactacagaaaatatcacgggcagcagataaatggttaaagacagaacttaaagtgaacgggtgacgggttcagaagctgaaagttacccggtcactgcagaattaaacttttaacaggtaaattttggtggcaggagtgaccgggtgagtatttaacggacaccgacactcacccgatcactaaaaatccatttagaataattattaatagtcgtttaattacttcttccgaaatattttatgtaaatttaaagaacctaattttaaagattgaatttgttcttaaaccttacctaaaatagcttcaccatcaaaaattctattcttaaaaaggattattcgcattgcataacatcctgttgtgcaacaggaaaccacatgcttttgctttggataggcatgccaattctcaccaaaaaaatacccccgtattgtaagacgagggtggcttaaatgttttcacaacggaataatccttattgtgatttgcttcaaattgtaccgctaaagtaatatttatttatgacaaacaaaaatatatgaaaaaaatattaggacttgacctgggaacaaacagtattgggtgggcattggtaaacatgaacactgaaaagattttaggaatgggatcaagaattattccaatgggtaccgacaaattggattatgagaaaggtgtaggtataactaaaaatgcagatcgaagaaccgcacgcacaattcgtaaaatgaataaaaggtacaaactaagaagaaataaacttctttatatactgaatgaattagacatgaaaccagagcaattccaatttaaatttggaatacctgaaccaactaaaatacaagatttggaattactgccaattaaaaagggaacactacaattaaactccttacaacattatgaattaagggtaaaatcactatctaatccaataggtttaaaagagttgggcaagattctttatcaatttaatcagcttagaggttatgcgggtggcaataatgaagatgacgtaaaagggaaaaaagaagacaataacgatgaagagtatgaaaagaaaaattatgaagtaattacaaagaaggtcgaaataaaaaaagtagagaaatctgaaaggacattcaaaattaagggtggattaaataaaggaacagacttgcctattttcaatataacaattgctatagacggaaaggaaatcgagggttcgacttcacttcagaatttagagcccgataaagaagaagaattagaaataagaataaaacgaacaataaaaggagaaaatatcatttttgctcttcctcagaagacaaattggcgtaaacagatggaagcgacagaagaaatattaaatagctctaaaatatttattggagaattgcttcttaaagatttaaatgaaaacagatgggctaaaataagaaatcgcgtcatacttagagatcgctacaaagaggagtttgatgcaatatggaatcaacaagccaaatatcatcaaatactaaatgaatgtccgaaggaaaaattggagaaaatcgtatcatatttatttcccggttcaagtgaatcacaagaaacacttagaagagcggcaattgatggaggattaaagtacattattaaagatcaggtgatatactttcaacgatctttaaaacctcaaactgaacttatcagcaaatgccaatttgaaactgaagaaagagtattaccaacctctcatcctctttttcaagaatttagatgttgggatcaaattaatagagtgtatgttacctcaaagattgaaacatttgatgagaagaaaaagaaaataatatttaaatatgatgatagatatctaacgaaagaacaaaaactattgatctacacaaaacttaagaatcaaaaacaagttggatatgcagaagtagcaagaatcatcggtttaaagaatgataaaacagaatttcttaatggattaaatgaaaaatcaaaactaaaaggatgtgatactttgctttcctttaaaaagattataggtgacaaatttgaatacataatcaaaaaagatattcaaattgttgaaaagttatggaatgcaattttcaacaatacaggaaatgaatatgacgaaaaaagcgaaaaagtatccgcattgagtgaagttattaatccattaattgaaaactcagtaacagatcttgcattaaaattggcccaaaatatttcatttccaagaaaatattccagcctatccgccaaagcgataaacaaaatattaccactaatggtttgtggatctatcattattaataataccataagagaaaagattgaaaagattaaacaaataattgagacaggtgaaatagacgatgataatagcatagaagtgtacatgatagattatatcaaaaataatcctaatttaatcgaaacaggaggaatgatgtatgcttttgccgcctctttaatctatggaaaacatacagctgaccgaattaaaccaacaataacaaattatcaccaaataaactacaataaggacagaaagcttaggaaccctatagtcgaacaaatttctaatgaaactatgcaggttataaaagccatatggaaacaatacaaatttaatccggcagaacttgaaataagagttgaattggcaagagatttaaaaaacagcgctattgaaagaaaaaagatttttgattctcaaaataagaataatacgattaacgaaagtatcaaaaggcgattaatggaaattaaacaagagataaataatgagaacattgaaaaatataagatttggagcaaacaacaaatcgaagaaaggccaatgcaatccgattctccaactgttgaagaaatagaaaaaatacggatatgggaaaatcaaaaatgcgtttcaccatataccttgaagcctattccattatcaaaattatttacacgagaatatgatatagatcatattattcctaaatccagattgtttgatgattctttgggtaataaggtagtttgtgaaagtaatgtaaatgaagaaaaaagtaacagaacagcatgggaatatattacacaacagtcatcaaagtttgaaatatgtaacattcaagattatatcaaaaatgtaaatgcaatattctgggggcaaagaaaaaagaatttattacttgaaaaaattcctaataacttcatagaaagacaaatcaaagacactcaatatatttcgattgctgtcaaaaacgaattggctcatatagtaggaagtgataatgttaaaactactactggtgaagttacaagtttcttaaggagtcgctggggattgaaaaactgtttatgaaacttaccgaagaccgttttgcacaaatggaagcctgggactcgtctaaacgatgggtgaaaaaatattttgatgtggaaagaaatcgaaatgtttatgagattgaacattggagcaaaagatatgaccatcgccaccatgccatcgatgctttagttgttgctttaacagaacaaagccacattcaacgtcttaataaccttaataaagaattgcagaattggttagaaaagaataaggatgaaattaaattagaggttaaagatggtgaaagtattattgaagcgttctttaacttggaagaaaaacgtagaattagtattcaagaaagtattgaaagttttagacaatttgataaaccttttactgatttgattgatcaagcggaacagaatctcaaaacaatggttgtttcacataaacctaaggataatttatcgatccagttcaatgaaaaaacaggaaagagggaattgaaaataaggagtgctttgcacgaagaaacattttatggcaaaaataatggtcaagacactaaaactatagcaatatcaaatctatctgctagtgatataaaaaaggttattgatcctgttttaagaaatgaaattgacttgcatagaaagaaatacaattccatgagggaatcatttactggtgaagggttgaaagcatttaatgaaagtagatttcaaagaaaaaatgacgttaaattaaagcctcccgtttacaagttaaagatatattacaacacaaaagaagtaaaagaaagctcattacaaaggttatatgacaacaacaataaattaagtgtaaaaacaggcgggaactatctttttctaattatggagaaagataaaaaaaataaaattggagaaattgagaagtttcgaatatttgatattgtttctttatttgatgcagcacaaattgcaaatgatgaatggaaaattaaaaatgaaaatttcaaaatgaaaatttattgtgattatcttattaaacacaaagagaaaccaaatagggtcttatgctcattgcaacaaaatgacttggtttattatcctgagaatattgaagatcctgttttgaaaatctcctcaagagacgagtttcaggaatggatagatattaatgaaaataaaacaaaattctgtaaaagaatatacaaagttgtcaagttcacagggaaagattgcttctttatacctcataattatgcgaatagcataagtgtcgcaaaagacatatccgatgaagaaaaatcgaaattaaaattagaattcattgacaagaaaattccgaaacaaaagttaaattttgaggagtttggttcatttggtaatagtacaaagtcagaaccaaataaagcttttgtattagccttaacacagaatgaaactggtgaaagaataagtaaaattcaagattcatgtataaaattgaatattgattggttagggaatgttttccctgaaaccttcaaacactaatgcaagaagtttcagggaagatccgaaagttccatgcaggggtgaaagaaggtttcgggaacacctaaaaagttctcgcatactgaagtaaggtttcgggaatacccgaaagttacaaacaccggagaaaagcgggttcgggaatacccgacaatagaaactataaaaaatagaatagcgattgagatgatcgttctttgagtattaaccattttaatttaattcgtatgattaacgcgattgatctggcaaagcttcgcaacggcgaatttttgcaatttgggaccaatgtttccgatttggtcgaatctaacaatccgaaaggacttaatgttgaaccgcaacatctggtttttaaaactaaaatcggtgagatgggcgaactcttcaatacggaacgggcaagcccaatcacccaggagttggtcatgctcgatgatcgccgcgaccgcgccatcaatgggatatcaggggtaatatcggcgtactgctcccattttgttccggaaaccgcaaacgctgcaaatctgcttgctggtgatttacaactttttggtacaggtgttgcccgtcagaacctaccgtcagagacggccctgatcaacgggatcatcaatgactgggaaacaaaaccgggactaactgcagccctggcaaccctgggacttgctccatgggttgcggaactcaaaacggctaaccagactttcgaccagaaatatattgaacgaactaaagaatatggggctgccaatcccgatactctgaaggctaaacgggatgaaaccatgctggcctactatgagcttagaaaatatctcgaagcttattccgtaatacaaaataccccggaataccaaaaaactatcaacgaactaaacgcgctgatcgatcaatacaatcttttgatcaacagcaggatcaaagggcccactccggcaccggcaccggcaataaaataagcaagtgaacgggtgactttaaattcctgaacactgtcacccgttcactaccagacagactcttttgaatataaattctgatgtgaaaacaaagatggatctcgaacaaggacatatttatcatctatacaatcagggaaataatcacgaaaaaatctttttcaccagtgcaaattattcctatttcctgaagaaaatcgaacagcatatcgccccattggccgatattctggcctggtgcctgatgccgaaccattttcatctgataattgcagtgccctctgaaagtgaccgggttagtgaccgggtgacttcgagtcatccggtcactttaaacagttcaatcgctatcatgctccgttcctatacgcgggctattaatattcaggaacatcgttcaggatcattattccgtgaaaggacgaaagcaatattgttgggaaccggacaaagtgaaaaactgaaacatcaaaatcgaattaagactgaacgtacaggtgcttcaaattcagaggaggagtatctgcaaacttgtttccggtatatccattttaatccggtcaaagctggtttagtccaaaaggatgtcgattgggaattctcttccgcaagggattttaccggaatgaggaacgaatccctgatcaataaaaaattagctgaggaattgggactaaaaatttcatctgagtgaccctgtgactttcagatcctcaacatagtcacccggtcactatttaaaattgccatgatcaaacgaactctgttttttggaaaccctgcctatctccatttcaaggacgaacaactggtgattactcttccagagacctctttactccccgaaaaagaccggataattaccataccgattgaggatatcggtgtaatcgtgatcgaacatccacagattaccgtgactcacctgctgataaattccctcctgaaaaataatgttgctgtaataacctgtgacagtcgccatatgccatccggattattgctccccctggagggaaacaccacccagcaggagaggttcaggcatcagattaatgcttcagagcccttgcggaaacaattatggcagcaaactgtgcggcaaaaaatactgaaccaggccatggttctgaaccaggaaggaattaaaaccgaaaacatgaaattctgggccgatcaggtcaagagcggtgatactgaaaatcatgagggtcgggcagctgcttattactggagtgagctgtttgaatcgtcacttgaattcagacgcgatcgggaaggatttgcccccaataacctccttaattatggttatgccatcctgcgtgcaaccgttgcccgttcgctggtggcttcaggaatgctcccgacctttggcattcaccatcacaaccgttacaacgcctattgtctggctgatgatatgatggagccttaccggccttatgttgatcagctggtgctcaggattataaatgaagatcagattccggacgaactgactagggtacataaggcaaaactacttcagattccggtattggatgttacgataaacaaccggaggagccctctgatgctggctacccagcaaactgcagcttcacttgcgaaatgctttcaaggtgaattgcgaaagttggagtttccggagatgaattagtctgttaatccgcattgaaagtgaacgggtgacggtgttcgtgcattgaaagtcacccggtcactgtcgagttacattttaagagatcagttttgatgatagaggtgaccgggtgagtacttcagggacaacaactcacctggtcactacggcaaaaagatggaacgactaagtgaatatcggattatgtgggtgatggtactctttgatcttccgactgagaccaaaaaagagcggaaaatctatgcaattttcagaaagcaattattgaaagatggttttaccatgttccagttcagtatctacctgcgtcattgtccgagcaaagagaacgccgacatccatattaaacgggtaaaactcgaacttcctccacttgggcacatcggaattttgtgcatcaccgacaaacaatttggggatatggaattgttttacgggaaaaaaccagctgaaaagaagggacaggtacaacaactggaactgttttagaccaactcctttcggtactgaaataaaaaatccggtctttaaaccggattttttatgctgataacccctcgatttttaattctgattcagaccttaacaatcaaacatacagcatattgaatgggggtatggtgattatcaataggtcaaagatacaatttgaaagcaaatcacaacgaaagatactgtgtagcagtttactcccagggtgattatcaataggtcaaagatacaatttgaaagcaaatcacaacgctgtctcactcaattcattaaactcatatggtgattatcaataggtcaaagatacaatttgaaagcaaatcacaacattgcaaaggtcggctctgaaaaggtcggggtgattatcaataggtcaaagatacaatttgaaagcaaatcacaacaattaaggtgtctgagattatgccgtcttgggtgattatcaataggtcaaagatacaatttgaaagcaaatcacaactcttgctgaactttacctgcgtcacgatatggtgattatcaataggtcaaagatacaatttgaaagcaaatcacaacttcaagcgcataagtgcgattcatcccagaggtgattatcaataggtcaaagatacaatttgaaagcaaatcacaacggtacagcgtagattttactttatatccccggtgattatcaataggtcaaagatacaatttgaaagcaaatcacaacgtggcatggcaattgattattaattgtttaggtgattatcaataggtcaaagatacaatttgaaagcaaatcacaacgggaggaagtggggttccattatggtagtgggtgattatcaataggtcaaagatacaatttgaaagcaaatcacaacgtcgtttaagtgtttgatttttggctcatcggtgattatcaataggtcaaagatacaatttgaaagcaaatcacaaccggcggaagatgttggccttcctgctctttggtgattatcaataggtcaaagatacaatttgaaagcaaatcacaacatcctttaaacgtttcttaattgctcttttggtgattatcaataggtcaaagatacaatttgaaagcaaatcacaacgcgtttgaccttcatctcaattatcatcggggtgattatcaataggtcaaagatacaatttgaaagcaaatcacaacaagaaaaggatccggagcgaaatcattaatggtgattatcaataggtcaaagatacaatttgaaagcaaatcacaacgcagggcggatcatttgctttgttatccgcggtgattatcaataggtcaaagatacaatttgaaagcaaatcacaactaagtttaagcgaggccataaaatagagctggtgattatcaataggtcaaagatacaatttgaagtgaacgggtgactgggttcaggatctgaagaaatttcagtgaacgggtgacggtgttcaggagctgataaaaatttagtgaacgggtgacctgttcaggaattgaaagtcacccggtcactgatgaattaaccttttaaaagataaatttatggcaggagtgaccgggtgagtaattcacggacaccagaactcacccgatcactaaaaatccatttagaataattattaatagtcgtttaattacttcttccgaaatattttatgtaaatttaaagaacctaattttaaagattgatttcgttcttaaaccttacctaaaatagttcaatatagaattatcattatcaggtctattcatccaatttggctgagtcgctctgatcttaacagattgtattgctatgacttaatcagacatttagggattaagttgtaaataattgcataaaacttaaacctatggaatcacacgatacaatttggtattatattctttgtgcccttggtgtccttccaattctaatcccatttataacaaagctattttcttccattcgacataagcatcaactatttgtgacaacaagccaacattctcctgccggacgaggaatacataacgtaatttcatgcaaaggctgtatgcaaacatgggatatgcatggttgtgattattatggaacatcaagatctctaaaaggtgaaaaaatgaatcgccctttaaaacaaaaagaagtcgcccaagttcttcttgaatatgctctttctcaaggacatataactaaagcctattttaatgaattatctttacgcaaagaatcaaattgtcctgttgaaaatgcaggaggacttgataattctatacggagatttttacaaaacccacagaaaatattaaagccatacattaagaaaggaatgacggtccttgatttaggctgcggaccaggcttcttctccgttgaaattgcgaaaatggtttttgaaacgggaaaagttattgcggcagatttgcaaaggggaatgcttgaaaaagtatttaaaaagattgatggaacagaattagagctgagaattgaattacacaaatgtcaggaagacaggattggagtaactgaaaaagttgattttgttttcgctttctatatgattcatgaggttccaaatcaaaggacactttttaaggaactgaaatcaattttaaagcacaatggacaaatctttattattgaacctaagatccatgtttcaaaaaaatcgtttgaagaaatgattgatgaagtcaaaattatgggatttgaaattaaagcaagaccgaaagtgttttttagccggacagtattattggaaatgaagaatatgtaaaatacgcatacgttcattgtttagaccgcaccactgaatatcaaaataatagaaataattgacccattcacgattctaaaaatcaaagatacgatttgaattttaatcctcgtattcatccgtcaatgcgtaccagccaaagatagctaatccggtaacaatcagaggcaacagaatgaaaaatattatgatgccaaaaaccagatcatcctgtttgcccgaagttaatttgcttccaaagattcctatgaaatagtaggaaactgccattgccagcagaatccagacaaatcccaaatatttttttaatttattcataccagaggtgttagtcgtgaagtgtattaattttccgatcgatataaatcattccaatgataaaacataccgctgcaattccaatcggataccataatccttcgagatagaactcgggatttccgatgcttttagccgttgttacaaaataggtggagatagcgggtaacaatcctccaaagattccattacccacgtgatagggcaatgacattgaggtatacctgatctttaccggaaacatctcaaccaggaatgcggcgataggtccataaaccattgtcacaaaaaggacctgaacgaatactaaaaataccaaataccatttgacatcactggcaatatccttgataacaataatattggccctggtactaatgccgtgttggtgagatttatgggttgtgcttccatcctgatattgccgaagtgacacagtttcgagtgtatctgtttttgtggtggaatccctggcttttaaactgtttttaattttcactttgtgatgaaccacggcaccagctgagtcgtcggtatcatattttaaccagatttcgccagccgcgttacttttagaatcataggccagttcctttgccaggtataaagtatctgttttggtataatgaaatttagcaccacttgcgaacgttgaatcagattttgattcaataaataccctcgtatttttaattgccgggtccgctttgtcagcttctgtgagaattcttgccaccggtgaacctaccgctttacagctttcaggaactaagatatttccaccttctttcatcgctttggaatctgtaagtacgtacatctgccggtaaattggccggtaaaaaaaaacagccagtaacaggccggtcatcatgattgatttacggccaattctatcactcagccatccaaatacgacgaagaagggagtcccgattaacagggcaatacctaatagtgtatcaacctgtgaagagtcgatgttttgtacggttttcataaagctcatcgcataaaactgtccggtataccacacaactccctgtcccattgtggcgccgaataaagccaataaaacaaatttaaggttaaaccggttattgaaactctcttttattggatttactgaggtcttcccttcaagttttgccttggcaaaaactggtgattctgccatgtttttgcgaatcaggtaagagatcactaccataatgattgaaatccagaacgggactctccacccccactcctcaaaagcttctttggacaggattccctttgtcaaaagaatcaccattagggacaccagtaaaccggcagtggctgtagtctgtatccacgatgtccagtaccctttctgattttttggagcatgttctgccacataggtcgccgcaccaccatattctccccctaaagcaagaccctgaagtaatcttaaaagtaataccaataatggggccaggaaaccaatggttttataacttgggatacatccgatcaaaaacgtcgcccctcccattatcagcagtgttaccataaacgtatactttctcccgataaggtctcccaatcttccaaagaaaagtgctccaaagggacggaccacaaagccggccgcaaaagtagccaatgtagacaagaaagccgctgatggattgtcagttggaaagaatttagtggataaaacaacagccagactcccaaaaatgtagaagtcataccactcaatcattgtacccagggaggaagccgtaattactttccaaatcccttttgttgatttactactcataaatggaataattggttcgtaagattttaattaagaagaatacacacaagcgacaaaaaagttctgattcttccggaatctaaattcccagatcaccgcatttatcagaaatttaaaggaatacaattcagtggggcggatatataaattgcaaaggcttcacttaaaatgaaacctttgctattataaatatcttccaaaaacgaaaaatcatctctaatgatcgaaaaagtgtgagactaaacccgatcctctgttggtaggatcaaaggcatgtaatccaaactcatcggagagaatcttaaagctggcaagtccacgaaccgagttaccattggtatccagacggggtgaaaaagttccgattccaagttgccggtttacaatgccaagaattcctccaccgactccacttttggccggcagccctacatcgtaggcccagtttcctgaatagtcatacatcccgcaggtaaacattacagataatgtgttgcgcaccgccgtcatgtcgaat

SEQ ID NO: 1950 - DNA, 19514 bp, synthetic construct
  source 1..19514: mol_type = other DNA
  misc_feature 1..19514: note = Synthetic
gtgtttgagccggtttgtgaagtacctccggcaactatttttccatcaggattaatatatattgtattgataatctcagacattgagcctatggtataaattgcttttccatttaaaccaaaatttgaatccaaagtgccgttggtattatatttaactaatgcatagtttgaaagtgtcctaccggcaagaacaatcttttctgttccaggttctatggccaaagcatttgcctgatcccattgtgtgcctaatggtgttctcacttttccgctatttccaaatccaccatccaaggttccatttgtattgtatcttgctactgcaaactcgccatttgctaatgtatcaaatgaaacaccacccaaaacaatttttcctgaagatggaactattgctacaccatatgctatatcgaatcccaaatctaatgctgtctgtacaataccattggcgccaaattgattatcaagtacaccgattgaggttaacctggccattgcaaaatgtgaataggtttgattttcaagattaccggcaacaattattttaccgtcattttgtattgctatggaacgcgccacactatttcctgtaccaattgaaaaaacaactttccctcctgttccaaactgattgtcaattgtgccatcagaaagatatctggcaattgcaaaacgattaaaagttccgttgtgactttcaccggcaacaacaatttttccatctgattgcacagctatggctcgcgctacacaagcaaagctattaaacgatgaagttactttaccatttaccccaaaggtagaatcaataatgccaggatactgaacctgagccattgattgaaatgtaaaaaatgtaaaacctgctatcaggtaagtgtgtagaaattttctcattttaaaagttttttaccaatgatgcaaatatatggtttagcctgaatgacaactgtcaacagattaatatttcttaaagattagtggctaggctaaattatttatctgctatcctcctatcctaagttgtttaaagtaacggcatgtcaataaaatataaaaaactaccctgactaatttaattaaaactgtaactttgagcaataaaattttgcacgtaaaatactatgtcacaagttgaattgaagatgcctaaaatgggcgaaagtgttgctgaggcaacaattactaaatggttaaaaaaagaaggagatagcgttgaacaggatgaaccaattcttgaaattgcaacagataaagttgactctgaagtgccttctacaacagcaggaatattagtaaaacaattatataacgaaggcgatgttgttgccgttggaaaatccatagctattattggtgattctgcatcatctgcaacgccaattccatcagcccctaaggtagaagagataaaaattgcacctgcacctgtattatcaacacaaccggctgctactgcaagcatgggagtttcatcgtcaaaattctattcaccattagtaaaaaatattgcacaacaggaaaatgtttcctcagcagagttagatgccattaccggaaccggtgccgaaggtcgtgtaactaaaaaagatattcttcaatttattgagaacagaaaatccggcaatgggcagatagcaaaaactacatcagcagaatctgtaccgtctgcaaccatacaacataccaaagcacctgctgccataccaatgactgatggagatgttgagattattgaaatggacagaatgcggaagttgattgcagaccacatggtcatgtcaaagcatacgagcccgcatgtgacatcttttgtagaggcagatgttactaatatggtattatggcgtaataaagtcaaaaatgattttgagaaaagagagaaagaaaaaatcactttcacaccattgtttatagaagcaatagtgcgtgccataaaagatttcccaatgattaactgttctcttgacggcactaaaatacttctcaagaaaaacattaatataggtatggcaacggcattaccaagtggcaatctgattgttccggtgataaaaaatgccgacagaatgaatcttgttggattaacaaagtcagtaaatgacttgagtggaagagcacgcaaaaacaaactctcacctgatgaaattgcaggtggcacttttacattgaccaatgtaggtacatttggcaatgttatgggtacaccaattatcaaccaaccacaagttgccattttggctgcaggtgccattcgcaaaaaacctgctgtaattgaaaccgaatttggtgacacaatcggtatccgtcaaatgatgttcctctctttatcttatgaccatcgaattgttgatggaagtcttggcggcagttttcttcgaaaaatagctgactatcttgaacagtttgatattaacagaaatttattgtaattaattatgagatttttatttgcccttattccaatactctggctgaatgttacagttgcacaacaatctaaaaaacaggaaaaaaaagttgcattaggaaaagatcaggtttctgaattgaaaaaagcaggtgccgaatattttaagagtgataactacaaatcggcactgcccatttataaacaacttcagcaaaacgacccgaacaatactgagtttaattacagacttggcatctgttatttatacaccaatgtaaacaaaaaatcagctgcaggttttctgataaaagcagccgaaggaaaagatgttccaaaagatgtgtattattataccggtcgtgctctcctcattcttgaagaaactgatgatgccgcagatgcttttgagaaatttaaaatagctcatggcggaaaagttaatgcaaaactaaatcttgaaaacaatgtggaatggtgctatcacttccgtgatatgaagaaaactcctactgcagtaagctttaccaatttgggtaaattggttaattcaacaaataacgattacagacctgtttgtgatatgcttggcaacaatatttacttcagttcaaacagaaaaggaaacatcggtgcaattgttgatggatatggcgaaataatttcagacggttattatacaaaaaaagatacgggattcagtaaagccaaaaatcttggcaccaatatcaacaccatgtactatgaagaacctttacaattaaatgcaaacggtgataaattgttgatttctaaagaaggtggcagcatttcatctccactatatactgctgaacttagcggaaaatccttcgaaaaagcagttgcaataaataaatttccagcttcaagagtagatggcgcctgcatgacagatgatggaagaacgatttatttttcagcagatcttaaaggtggtaaaggcggaaaagacatctggatgacaaccttaaatagtaaaaatgagtggtcatcacctgtgaatcttggtgatgctgtaaatacaaaatatgatgaaataaacccttggttgttttttgataatcagacattattttttgcatcagaagggcataatagcattggtggatttgatattttttatagcaccaagccacatgagtctatggactggagtgctgcaaaaaatgtcggctatcctttaaatactactgacgatgataaatatttatccttaactgctgattgtaaaacaggttttgtcagtaagatttctgaaaatggttttggtgaactggatattgtaaaatttgtgtgcgcaaacccaatcattaaacaagaaaaagttgtttgtgattttacatttttaaaagctgatggtgcttttgcacgtgatgcaaattgtttgattatcagaaacgataccggtgaatcatcaggagtgaaaacaataaacggctcaaatggtaaactctatgtttatctcagtcccggaaattataaggttaaagtaaaaggtgtaaagtctggtcgtgccgatgaagattttatcatcacaggcaatgaacctaaaatgcaattggtaaaaacttttaaacttacccctccggttaaagaaggaaaataaaatgaatctgaagctacatagaccgcttgctttttttgatcttgaaactacaggagtagtaattggtatggacagaattgttgaattgggaattttaaaaattcttcccgatggaacaaagaccaataaaacctggcgtataaatcctgaaatgcacattcctgaagcagtctcaaaaattcatggtatatatgataaagatgtggcagactgccctactttcaaagaagtggcaaacgatgtaaatcattatctgcaaaatgttgaccttgccggatataattcaaaccggtttgatgtgcccttgctggttgatgaatttttaagagcaggtattgaatttgacatacgtgaccgaaaattaattgatgtgcagcacatctttcataaaatggaacaacgcacattgattgctgcatataaattctactgcaataaggagttgatagatgcacattctgcagaagcagatgttagagcaacctatgaagttctggaagcacaactggaaagatatagcgatcagctacaacctgatgcatcatttctgcactcattttgcaataacattaaaaatgttgatttggccggaaggatagtgtatgatgacaaaaagcgcgaagtatttaattttggaaaatataaaggccgcctggtagcagacgtttttaaaaccgatccgagctattatgactggatgcttaaaggtgatttttcaagagataccaaacaagttgtaactgcattacgcttgcgtgaaagagaaaactaaatatgtgtttggcttgtttgatttgttctgctgattaaaatttgcaggtaatataaaaatctgtacttttatgctgatgggttccgaaaataattcagataaaaataatcttcctgctgttaccgattcaggaaaaggcagaaaagatgctattgaccttgaagcagagaaaaaagaaatcagtaagcgctatcggcatctattacgtgcctgcaaatccaatcttgataagaaagataaaaaacttataaggttagcatttgacactgcacttgaggcgcacaaagatatgcgcagaaaatctggtgagccttacatctatcatcctattgccgttgcacaaattgttgctgaagaaatcggacttcgctctgccatcccagtggtttgtgcattgttgcacgacactgttgaagacacctatcttacattagaagacatcagggacttgtttggtcctgttgctgaacaaattattgacgggttgacaaaaattgcaggagtctttgatcatacaagttcattgcaggcagaaaatttcagaaagatgttgctgacattaagtgtagatgtgcgggtgatactcatcaaacttgctgacagactccataacatgcgcaccctcggcagtatggcacgcgacaagcagttgaaaatagcttctgaaacagcctacctctatgcaccattggctcatcgtctgggactatacaatgtaaaaacagagcttgatgaccttgccttaaaatatacagaacctgaagtttataaaagtattgctgataaacttcgcgaatcaaaaagagaacgtgataaatttattgcagaatttattcatccaattaaagatgaactgaatcatcagggatttaaattcgaaattaaagggcgtccaaaatccattcactccatctgggagaaaatgaaaaaacagggcgttacctttgaagaaatttacgacctttttgctatcagaataattattgacacaccacaaaatcaggagaaagccgattgctggaaagtttactccattgttaccgatagctaccgccctaatcctgacaggctgcgtgattggatatctacaccaaaatcaaatggctatgaagcactgcacaccactgttatgagcgatcaaggaaaatgggttgaggtacagattcggtcacagcgcatgaacgaaactgctgaaaaaggttttgcagcacattggaaatacaaggaatcatcacaggagtctgcattggatgagtggctgacacgaatcagagagatgctcgaaaatccggatagcaatgcacttgattttgtggatgactttaaacttaatctttttgcagacgaaatttttgtatttacgccaaaaggagatttaaaaactttacctgttaacagtacagctcttgactttgcctacgaaattcacacggatattggcagcaggtgtattggggcaaaaataaatcatcgtttagtgcccatatcacataaactcaacagtggcgatcaggttgaaattttaacctcagacaaacaacgccctaaagaagactggctgagctttgtgattacggcaaaggcaaaaggccgaattaaatctgcattaaaagatgaaaaaagaattctgggtgagcaaggcaaagaaatttttgaccgcaaaataaaacatcttaaaattccggcagcagaagttaatatgaacgacattttgttgtactacaaactacctaatgtattagagttgtattaccgcattgcaatggatgctgttgacctgaaacagttgcgtgaagcagtaaattataaagatcagcgtgttcgcaatacacgcacagagcccaccttggaagatctggtgacgcaggccagaggcactaccgacatgctggtgattggtgagaacctaaataaaattgattataaactgtcgccatgctgcaatcctattcccggtgatgatgtttttggctttatcaccatcaatgacggaataaaaatacatcgtgtaaattgccccaatgccatgcagcttatgagcaattatgcttataggattgtaaaagccaaatggacaggtcaggaacaaatttctttccttgccggcatcagaatcacaggtatggatgatgttggtgttgtcaataacatcaccaaggttatttcaagcgaactaaaagtaaatatgcgttccatctctatcgaaagtaatgaaggtttgtttgaaggaaccatcatgctgtttgtgcatgataccgtacacctgaccaaactgatgaaaaaactttcatcattgagtggtatattaaatgtaacaagaataacttaaattatgcacattcccttcgaacaactacctgatgattcacgtatctggattttccagtccgataaagaactgactgaaaaaaatattgaatccatcacaccattgctaatgtattttatcaatgactggactgcacatcaacaaacattaaaagcatcattcacttttatgcataattattttattgttatttctgttgatgaaaacatgactgctgccagtggctgttctatagacaaggtctatcatataatccgcgcatgtggccagcttatcggctgcgatttctttaaccggctgcgcattgccgcaatggaaaataattcaatttcaacttacagcgtcaatcaaatagtggaaaaggcagagagcaatctccatgataagtcaactttggtctttaataatatcattgaaaccaaaggcgaacttacaaccaactggcttgtgcctattgaaaaatcatggcttgcttcaaagttaaagacaggaaataaagtttaattttaaaacatacgatatgaattttcttttaaaactgattatctcaacgctggcagtcatgatggtttcatacatcctgccgggcgttcatgttcaaagctttggcattgcacttatggtggcctgcatattggcttttttaaatgcattgatcaagccaattttaatattattcaccctaccaatcacaatcatcaccttgggtttgtttctacttgtcatcaatgccatcatcattgtcattactgacagacttgttgatggttttgaagtaaatggatttggcattgccctgcttttttctttaatactaagtattgtcacttcagttatggagtcgcttgcaggaaatggcaggcaataaaaaaaccggcaactcttaaaagatgccggtctaaatttttcaattaaaaaatcaattcgacaaaaactttgctattttttcgaaataaacattcttgtctgtagtgaaattttctgcatttgatggtgagttttttactacatacgtttcgctgataccttttatttgctttatatcagaaggattaaccaaattgtcctgtggtgaaacaatcaccatcagacttttaattccctttggtttttccatagcatacattggctcgtgattcttgtcaaaaccgaaaggcatcaccacttctttgcctgtcttttctttaatttttttcttcatcacttccaaccctacccatggaccatcggcaattaccttttgtgtttctgttctgttggcgcccactccaatggagagccctgctcctattgatttgccatacaaattaaatttagttatggctcttgacttacgcaagtaatcacatacagcattaaggtcaacaataaactgaggatatataaacaaatccggatctattttaaaatcgctgctgctgccatagccgcgatagtcatacatagcaacattatatcctgcactcaagaatgaattggctatttcaatattatcagccatattgccatcaccactaccactcattattatccagttggtagatttcttgggaagttcaaacatccatgcattgagaatagcaccatcaggtgttttaattttttcttccttataagtcatgccgtacttgtcaggaagtaccttatactcctttgaaggatttagtgcaaaagcacctgaaacaaataaagccatgcaggcaactaatgaaattgatttaagcatcgtaattttgattattaaattaggcttcaaaaatagctacactaaccatgaagtagtaattaactttttaacaattcttgcactttgagtgctgaaaagaatattcctgctgcaatcagacctattttattcatggtttttatcttttaaaacccaatcaggcaacgcagtggtgaatgacagtaacccttcggaacaaattatctgtagcgatcgggatagtcggtaatgataccttgcacaccaccatatttcagtttcagaaacactttatcattgttaacagtccatgcaaatagtttaatgttatgctgcctacaaaaatcaatggtcttggctgttgcaaaaacataccagggtgaataaacaggtgtaacaaaacccaactcattaaaaaaagtttcagcatctcgttgtgtttcatttaaagcagcaatggtaatatcaggatagtgagtgtgtaaaatccgcaatacttccttgtcgaacgactgaacgataaacctttcactttcgctgtattgcataatcactttcatcaccaattcaaccatggtctttgggtcgggctgaaatttgccgtaccagtcgtttcgacttttaatctcaataaaataaaaaggcatcactcctgttttaccacaagaaaatgaatcggcagtagcaatcacttcatcaagcaatggtttgtaggttttcattttatgctgccccggatactttggattaaacttgctgccgcagtcataactttttatctgctcataggtcatttgatacatgttgtatttgccacgactgtaattaaccagtggtgtactatcaggcatcagacaggtttcattgtttatccaaggctcatgcgacactaccacttgcgagtcggcagagattactacatccaactccagatgtaaaacacctaactctattgcttttaaaaaagcaggaatagtattttcgggcatcaaaccacggcagccacggtggccgtaaacaacaaacgatgtgtcttgtgacatgagttgatgagcaacagaactaaaaaaaactatgagtaaaaatcgcacgttaaaaatatgctgccaaaataaataaaaacgaggcaatcttgcgaatgccccgtagtagatgttttcacaacggaataatccttattgtgatttgctttcaatatgcaaaaatgtaaataaaatttcattttgcaaatttttactggaaaattcattatttcttttttatttttattcgctcatattaattactaataatgttatgaaaaaaatacttggacttgatttaggaacaaacagcattgggtgggcattgattgacaatgaacaaaagaaaattctaggaatgggaagcaggattattccgatgggaactgataaacaagactacgaaaaaggcgtaggaataacaaaaaatgccgatagaagaacaaagcgtactattcgcaaaatgaataaacgctataaacttcgtagaaacaaactgctttatattttacacgaattgggaatgttacctgaacaatttcaattaaacaatggtattcctgaagcaaataaaattcaggatttagaactattaccgattaaaaaaggaacattgcaattagattctttagctcattatacgttacgagcaaaggcaattaatgaaaatgttgagttaaaagaacttggtaaaatattatacagtttcaaccaattgcgtggttatgcaggtgggaatagcgatgatgattctaaaaagaaaaaagaagaagataatgatgaaaacgaaagcataaaaaaatacgaagtattcaatcaaaaagtaaccataataaaagtaaaacaatcggaaacaaaatttcaagggcgaggaaagaataaaggtcaagagtttaataaatttgatataaccgtttcttttgatgacgtagaattggaaggcgaaactgaactacaaaatttgaaagaaaaggaaggacaggaagaagaattagaaatccgaattagacgaaataaaaaaggagaaacaaaatctgttgtatttgcattacctcaaaagaccaattggcgtaagcaaatggaaaaaacagaagaagacctaaatcaaggcaatttgtacatcagccaacttatattacgagatttaaaagaaatcaaatggactaaaatcagaaatcgtgtattcttacgaaatcgctatcaagcagaatttgatgcggtttgggaaacacaaagtaaaaaacacgacatattagaaaattgttcgcaaacaacgatagaaaaaattgcgaattatttgtttccaggaacaagcgagtcacaacaaaagctgcgaaatgaagccataaatggaggtttgaaacacctcattagaaaccaggtgatttattatcaacgtccattaaaaccacaaacagagttaattagtaaatgtcaatttgaaaaagacgaacaagttttggcaaactcgcacccattgtttcaagagtttagatgctgggatcaaataaacagaatgtatattacttcaaaacaagaagtatggaatgagaaaaagaagaaaactgtttttcaatacacagacagatttttaacaaatgatgaaaaacaaaaaatctatgaaaagttgcaaacccaaaagcaattaggttttggcgaagttgcaaaaattgtaaatctgaaaaacgataaaacaggatacttaaacggattaaatacaaaagccaaactaaaaggttgtgatacgcaaatagcaatcaaaaaaatacttggcgaaaattttgaaacgctatttcaacacgacaacgagattgtacttaaaatttggaaagcaatttttgacaatgcaaataacggaaatgaatacgacccgaatagtttaaaagtttcttccattaaagatattttaaagacattaaaagatgaagctgctacggaagtatccttaaaatttgcacaaactattaaatttccaagaaaatacgcaagcctttccgcaaaggcaatcaacaatattttgcccttaatgcaattaaatcagcccaatgtttcagatgaaataaaaaccaagtttgaaaacattaagaacttagttgaaacaggcgaaattgttaatgatatagacaataacttggaagattatgtaatcagttttgtacaaaataatcccaaagctattgaaacaggaggattgatgtacgcttttgcaagttctttggtatatggaaaacacacagccgaaaaaattattgcgcaaatcaaaaattaccacgacataaaatatgaaaacagaaacttacgaaacccaatcgtagagcaaatttcaaacgaaacaatgcaagtggtaaaagccatttggaaacaatatcaattcaagcccgaagaattggaaattcgtgtagaattggcaagagacttgaaaaatagtgctgcagaaagagataagatttggaaagggcaaagaaaaaatgaagacacaaacaaaaagataaaagatacattacaatcagagggtattcctattactgatagaaatgtcttaaaatataaattatatgtacaacaaaacttcatttcaccgtacactcaaaataaaataataccacttagtactttatttgatgataagttgtatgacattgaccatattattcctaaatcaagatactttgatgattctattagcaataaagttgtttgtgaaacaaatataaatgaggaaaaaagcaacagaacagcttgggaatacatctcacagcaaaattcaaagtttgaaatacgttccgtagataattatatcaaacatataaatgacattttctacggtaaaaagaaaaagaatttgttgttagaaaaaataccgacaaatcctgttgagcgacaattaaaaaacacacaatacatcacggtttccgtgaaaaatgaattagcaaaagttgtgggcagcgacaatgtaaaaacttcaacaggtgaagtaaccgattttttaagaagtcgttgggggttgaaaaaattatttatggaacttaccgaaagtcgtttcaaacaaatggaactttgggatttggacgaaaacggtaatccaaaatccgaatggataaaaagatatgttgatgaacacggaaagaataaatacgaaatcaaaaactggagtaagcgttatgaccatcgacaccacgctattgatgctttggttgtggctttaacagaacaaagccatattcaacgattgaataatttgaataagtatttgcaagatgaattaacaaatagaaaagaagagtttaaattagaagtaaaagaagatgaaaatattttagaagccttttttaatcttgaagaaaaacgcagagaagaaatccaaaaacaaatagaaagttcacgatattttgaacaaccatttgaagatttggtaaaacaagccaaagcccatttggaagcaatgaccgtttccattaaaccaaaagataagctcggaataaaaactgacgaaaaaggaaacaaacaattaaaaataagaggtgcgttacatcaagaaacttactacggaaaactgaatggcaaagacaccaaaataatagatatttcaaaactttcagcaaaagacatttcaaaaattattgatgatgttctcaaaaaagaaattgacgaacacagaaagaaatacgattcaatgaaagaggcttttacaggcgaaggattgaaagcgtttaacgaaaacagatttcaaagaaagaagccaaccgaactaaaaccgcctgtttacaaagtaaaagtttggtacagcacaaaagaagatgaagaaagtacattgcaaaggctttatgataaaaataaaaaattaagcgttgttacaggcgataattatttgtttatggtaatggagaaaaacagaaaacgaatttttgacattgcttctttgtatgattctgctgacattgctaaacgagcattgaaagaaaaagacgaaaattataaacagcgcatttgcgaagattttagagtaaaacacaaagacaagcccgataaagttttgtttacgttgcaacaaaatgatttagtttacttacccgaaaacgtagaagaccaagttttgaacaagaatgacgaagaatttaaaacatggttaaatattattgaaaacaaaaagaagttcagtaaaagaatttacaaagtcgtaaaatttgcaggaaaagattgtttctttattccaaacaattatgcaaatgttataagtgtttctaaagatttaacggaagaacaaaaagaagcattgaaaaaacaatatgctgacaagaaaattccgaaaaaggaattgaattttgtagaatatggctcatatcaaaattgttcaccttatgaagcgggggaaaattttgtaaaaagcctcaatgaaaccgacaagaaaaagaagaaagaactaaaacttataaaaattcaagaaacttgtattaaactaaaaatagattggttaggcaacatctcaaaagcataaaaaatggtcatacagttcaacacctgctaccatatctacaaccatgccaatggcgatgacaatctttttcgagaagagaagaactattctttctttcttgaaaaatatcgtcaacatattgaccctattgctgaaaccatagcctggtgtctgatgccgaaccatttccatctgctggtgaaaattagaagtgaggatgaggttttcgataatttatcaacgtcttcaagctcttccaaagtttcgaactttggaagagctaaagaagaagacgaagaagtaaaacgaaaactccttagcaagcagttcgctaattttttcagcagctatacgcaggctttcaataatatgtacaacagacgtggttctttgttcatcaagaattttaaaagaaagcaggttgaagatgaatgctatctccaaaatctgattctttatattcacctgaaccctatcaaacatggctttgttagtcttatcagtgagtggattcctacatcatatcattctttccctaccgagaaaccaacatttctgacaagtgtgttttctaatgaggcagcttactttcagcaacacgcagataagcaacgagtctttaaagaatatcaaaacatagagaatgatttaaaaataagcttatgatcaaacgtaccctatactttggcaaccctgcttacctgagcctgacaaacagccaactggtggtgcggttgcccgaagtagaaaacaacaagcagctcgacactgcatttaaacagcaggcacaagctagcatacctgttgaagatattggtgtggtggtgctcgaccataaacagattaccattacacatggcctactggatgccttgatggaaaacaatgttgctgtaataacctgcaacagcaccagacatcctgccgggttgttgctgccattgcagggtaacaccctgcagcatgagcgatatgccgaccagctggcagcaagcgaaccactacgtaagcaattgtggcaacaaaccattgtacaaaaaataaaaaatcaggctgttgtgttgcaacatcaacaaattgatgcagcccgcctctaccctgtttacaacaatgtgaaaagtggcgatagtgaaaatgctgaaggcacagccgcagctttttactggactaatgtttttaccaaactacctgcaggcatggcacatgcaccgggcagccttttcagaaggcaacgcgatggactgccccccaacaattatttgaattatggctatgccatactgcgtgccaccatggcaaggagtattgtagttgccggattgctgcccactaaaggcatacaccaccacaaccgctacaatgcctactgccttgccgatgatctgatggagcctttcagaccctatattgacaaattagtgattgatattatactcaagcatggcattaccacagaccttaccaaaaacattaaagccgacttgttgaccatacccgtaatagatgttaccatggaaggcgaaagcagcccgctgatggtagcaacacagcgcacggcaacctcgctagtaaagtgctttgccggagaacaacgcaaactcatctatccggagttgtcatgaattcagaacgactaaatgcctatcgtgttatgtggacacttgtaatgtacgacctgcctacagaaactaaaaaacaacgaaaactggcagcaaaattccgaaaagacttattgcaggatggttttcagatgtttcagttcagtatgtatttgcgacacagcagcagcagcgagaatgcagaagtacacagaaaaagggtgaagcgctcattacccgctgaaggaaaggttggcatactacaaattaccgataagcaatttggacagatggaaatattttatggtaaaaaagcccacgacaagccgcctacatctcaacaactggagctattttagcaagctttatcagcacaaaacgtcagtaacagaaataaaaaatcccgctatacaagcgggattttaagttcttaaccttgatttttttatcctgttttagcgccaacgttctgactatctaaccgttattataaagatattgtaagaacgttgtcaaagataaaagttgaaagcaaatcacaacttcaccaggcttaattaatttcatgttcggcattgtaagaacgttgtcaaagataaaagttgaaagcaaatcacaacatgtggttcgtgttccaattacaaaagaagattgtaagaacgttgtcaaagataaaagttgaaagcaaatcacaacaatacaatccatcatataaactaagtttggattgtaagaacgttgtcaaagataaaagttgaaagcaaatcacaacaaaaagattgttataaatggcgttattgatattgtaagaacgttgtcaaagataaaagttgaaagcaaatcacaacgtttccatcattatccagaaccaaggcaccgattgtaagaacgttgtcaaagataaaagttgaaagcaaatcacaactgtttccatcattatccagaaccaaggcacattgtaagaacgttgtcaaagataaaagttgaaagcaaatcacaacatgtaatgaaattcaatcgaaacctgaaagattgtaagaacgttgtcaaagataaaagttgaaagcaaatcacaacgtccgtttattgctctgttgttataggtcaattgtaagaacgttgtcaaagataaaagttgaaagcaaatcacaacattactggccatgataagatagtacattttattgtaagaacgttgtcaaagataaaagttgaaagcaaatcacaacggcagaactgtctgaggtagatcgtagcaaattgtaagaacgttgtcaaagataaaagttgaaagcaaatcacaacattacgggccttgataagatagtacatttattgtaagaacgttgtcaaagataaaagttgaaagcaaatcacaacatgttttttgatattattttgtttcgtcaaattgtaagaacgttgtcaaagataaaagttgaaagcaaatcacaactattttgtgtttggtgaaaaatttaggttcattgtaagaacgttgtcaaagataaaagttgaaagcaaatcacaactagtcccaaattcatcaagaactagagcacattgtaagaacgttgtcaaagataaaagttgaaagcaaatcacaacagtctttataagtcgtaaaaatggttgtagattgtaagaacgttgtcaaagataaaagttgaaagcaaatcacaacccgccactgaaaagcctcttcgcgttaattattgtaagaacgttgtcaaagataaaagttgaaagcaaatcacaaccattagtcatatagtaagaaattaaaaatattgtaagaacgttgtcaaagataaaagttgaaagcaaatcacaaccgtgctgcgcgcatgttggcaatcttataaattgtaagaacgttgtcaaagataaaagttgaaagcaaatcacaacaattccttgctataaacatactgaattgggattgtaagaacgttgtcaaagataaaagttgaaagcaaatcacaacggccatgataaggtaatacatcttacgtgcattgtaagaacgttgtcaaagataaaagttgaaagcaaatcacaactctcgatgggcggcttgccactggatcagattgtaagaacgttgtcaaagataaaagttgaaagcaaatcacaacgaaatttgtttataatttaccgcaactacattgtaagaacgttgtcaaagataaaagttgaaagcaaatcacaaccattacttttgtagggttaaaagttgtaagattgtaagaacgttgtcaaagataaaagttgaaagcaaatcacaacgctctactacagcattaaaatccacagtgtattgtaagaacgttgtcaaagataaaagttgaaagcaaatcacaacttgtgtggcggtataaactccacttcctcaattgtaagaacgttgtcaaagataaaagttgaaagcaaatcacaacaaaagttcagttatggcaaattcgatatatattgtaagaacgttgtcaaagataaaagttgaaagcaaatcacaacatcggtaaacagataaaaaaaattcagccaattgtaagaacgttgtcaaagataaaagttgaaagcaaatcacaactagcagtgatttatatttttcaatgatgttattgtaagaacgttgtcaaagataaaagttgaaagcaaatcacaactggtttgcgtgcaatagcctacatcattacattgtaagaacgttgtcaaagataaaagttgaaagcaaatcacaactatctttgcattatgaaattgacattgcagattgtaagaacgttgtcaaagataaaagttgaaagcaaatcacaacttgctcatcttccaaatcatttacatctaaattgtaagaacgttgtcaaagataaaagttgaaagcaaatcacaacttaatgaggtcattaatttttcgttgcagaattgtaagaacgttgtcaaagataaaagttgaaagcaaatcacaaccaaaaatagatcagttattatttcatattcattgtaagaacgttgtcaaagataaaagttgaaagcaaatcacaactaattgcctgtgttttttgcaattcaacttattgtaagaacgttgtcaaagataaaagttgaaagcaaatcacaacacaggacattgtaatttattgttccaatcgattgtaagaacgttgtcaaagataaaagttgaaagcaaatcacaacatgaatttatgttgttaatttgttgttatattgtaagaacgttgtcaaagataaaagttgaaagcaaatcacaacttggcggtttcgtccaataatatcttcaaaattgtaagaacgttgtcaaagataaaagttgaaagcaaatcacaacgtacagatgtctgttatttcgtggcctattattgtaagaacgttgtcaaagataaaagttgaaagcaaatcacaacagtgcctgatagctgccatacaatgcgaacattgtaagaacgttgtcaaagataaaagttgaaagcaaatcacaactagcatgaccgctaacgtcagtctgtgaaaaaaatattttttcagcaattacaaatgtaaaataattt

SEQ ID NO: 1951 - DNA, 19207 bp, synthetic construct
  misc_feature 1..19207: note = Synthetic
  source 1..19207: mol_type = other DNA
tttacaggatttacaggtttatttttttgacaggattaacaggatttacaggattaaataggtcgagaggatttacagggtttacaggattcacagaattaattttttgacaggatttacaggatttacaggattatttttttgacaggatttacaggattcacaggattaattttttgacaggatttacaggatttacagtattatttttttgacaggatttacaggatttacaggattaattttttgacaggatttacaggattcacaggatagacaggttttaataggttgacaggatttacaggattcacaggatagacaggaataaataggttgacaggatttacaggattaacagaattgccggatcaggaggttgctgatgccggacgcaattccagggaaaactgttatttcataattctaacctcaaccctggttgctgagcgacggttggtgggcgcagccgaaccaagccgaagcacaacctcaacctcaacctcaaccttagcctcagctatatccgtttccggatctcactctcagcgcgaatttcaatccggcttccggctccgttttttttactacttttgcaccttcttagaaatcagctttcattacacatggaaattcctgccaaatacgacccttcgggtattgaaaacaaatggtaccaatactggctcgacaataaattctttcaatcggttcccgatgagcgtgaaccatataccattgtgattcctccgcccaacgttaccggtgtgcttcacatgggccacatgctcaacaataccattcaggatgtgctggtgcgccgtgcccggatgcaggggaaaaacgcactgtggctgccgggaacggatcatgcttccatcgcgacggaagccaaggtggtggccaaacttaaagaagaaggcatagaaaaatcgtcgcttacccgtgaagagtttctggcccatgcctgggaatggaaggataagcacggcggcatcatcctggaacagctgaagaaactcggcgcttcctgcgactgggaacgcacaaagtttaccatggacgaatccatgtacgggtcggtgattgatgtgtttattgacctgtacaacaaaggcctcatctaccgcggggtgcgtatggtgaactgggaccccaaagccctgaccgccctcagcgatgaggaggtgatatacaaggaggttaaatcgaagctttattacgtccgctataaggttgaaggcagcgccgacgaatgggttaccatcgccaccacccgtcccgagaccattctgggcgatacagcagtgtgttaccatcctgaagacgagcgttttaaacaccttgccgggaaacgtgtactggtgcccctcattaaacgctctgtcccgatgatcgctgatgaatacgttgaccgcgaatttggtaccggatgccttaaaatcacgcctgcccatgatatcaacgactacaacatcggactgaagcacaaccttgagtccatcgatatctttaacgacaacggaacgctgaacgagaaagccctgctatacaccgggcaggaccgttttgccgtacgcggacgcatcgtggaagacctgctgaatcacggccatatccttaaaattgaggattacgtgaataacgtgggcttttcggaacgtaccgacgaggtgattgaacccaagctttcggtgcagtggttcatgaaaatggatgaaatggccaaaccggccctggatgtggtgatgaacgatacggtgaggtttcatcctgaaaaattcaaaaatacctatcgccactggatggagaatgtgcgcgactggtgcatcagccgtcagctctggtggggtcagcgaatccctgcctactaccttaaaaccggagaggtgatcgttgcaaaatcagcagaagaggcgcttgaaaaagcccgtattctcaccggaaacactgctttactccctcaggacctgcggcaggacgaggatgtgctggatacctggttttcttcctggctgtggcccatctctgtattcgatggcatccgtaatccgggtaatcccgatataaaatactattacccgaccaacgatctggttacagcgcctgaaatcctctttttctgggttgcccgcatgatcatggcagggcttgaatatcaaaacgatatcccgtttaaaaatgtatatcttacgggaatcgtaagggacaagcttggccgcaagatgtcgaagtcgctcggcaactcgcccgatccgctggaactgatttcaaggttcggcgccgacggagtaagggtgggaatgctgctcacatccccggcagggaacgacctcccgtttgatgaaagcctctgcgagcagggacgcaacttcagcaataaaatctggaacgcgctacggctggtcaaaggatggaccatcaacccggcgttaagccaacccgcctatgccgcggtgactgtacagtggtttgagtcacggtttaatgatgccctggagcagattgaggagaacttcaataagtaccgtttgtcggaagccctgatggcagtgtataagcttgtttgggacgacttttgcgcatggtacctcgaaatggtgaaacctgcctatcagcaaccaatcgacccggctaccatgtcggcaaccacggcatttttcagccgcctgatgcaggtgttgcacccctttatgccttttatcaccgaggaaatctggcaactgctcgaagagcgtaaacccggcgaaagcattatggtcagcgctataccggtttcaggagcttatgatgcagcgaagctgtcggcattcgagcacgccgaacaggtggtaatcggaatcagaaacatacgcaaggagaaaaacattgcctttaaggacagcattgaactgtttataaaaggggagaaccccgcatccggttttgatgaagtggtagccaaactcggaaatgtaagcgcgctgaactacgtggatgataaaccatcggcagccgctggctttcttgtaaaatccactgaatattacatccccctgggtgaaggcgtggatccggatgcagagcgtgaaaagttgcagaaagagctggattatatgcagggatttcttgattcggtaatgaaaaaactgggcaatgaacgctttgtcagcaatgcaaaacctgaaatagttgataatgaaaagcgtaagcaggccgatgcggaaacaaaaatccagctgctcaaagcccggctcggagaattgtaacagatttccggcatttattaccagtgtagcagaatcctgaaatcaaccgcaacgggttgagaatctgagaattagggagaatggcggagcgtgaacaatgggtaattgccatctgccggtaaaaaatgtgaaaattttttactgtaattgtttggtaattgagaattagattatatttgcgcttattttttaatttttaccaatatcatgaaaacaggaaaagtaaaattcttcaacgaatcaaaaggttacggatttattcttgacgacgagtccggaaaagagtacttcgttcatgctaccggccttatcgaccgtatcaatgaaggtgattcagtaacttttgaacttcaggaaggaaagaaaggcttaaacgccgtaaaggttaaattagcctaactcaatagtttgcgctttaatcttatgaggctgtcgggagacagcctcttttttttcattgccctccacaggctgtggagaatttcagacaaactgccataaggtgtcagcctcttgtcattaatccacgacttattacatacctgttaatcccgatgttctgttttccggaattttaccatgttgatttaattaaatatctgtaatacagcgatataagattagcagtaatagattttttgttggcattatcattttaaagctgtattcgggggcggctgccaaattcaattcgacattcaggatgcattccggcctttttcttgataagggtataacggacaataattctgttttccctaactttgaaggagttcagggaatcagacattataattcaaacctaaaatttattattatgaagcgattgttgatgattttggttgcattatcgctggtgacagcgggttgtaaaactacccgcacgcagcgtggcgctgcagtcggagcagccaccggtggcgccctgggcgccatcatcggaaaaacggcaggcaataccagcgccggcgcggtaatcggcgccacagtcggtggtgtggccggtgccgttatcggtaaacagatggacaagcaagccgaggagatcaggcgcaaggtgcctgatgccgaagtaatccacaaccccggagaagaagggattgttgttaattttaactcaaaggtgctttttgcattcgataaaagcgaactgaccgatgcctcgcgcagcagcatacgcgaactcgcctatgtgctgaaggattatccggatacggatgtcatgatacaaggccataccgatagcaaaggttcggtgagttataaccagacactttcagaaaaaagggccagcgccgttgccgcttacctccgtcagcttgatattcctgcttcgcggttaaccgtgaccggatttggcgaaacccagccgattgccagcaacgatacagaagccggcagggccgaaaaccgcagggtcaccttcgtgattgtcgccaacgcgaagatgcgggaaaatgccatgaaacaaaccgatcattaatttaaaattcctgattatgaaaaagatattgacctcaatgattgtactgctgatgatggcatcagccggaccgctcactgcacagaccgccttcggcatcaaaggttcattcaacctctttaacttggccgttaaggatgcggatgatgataaaattgaaatgcagatgatccctgtttttgatgccggcgtattcgcggagatcccggtagccgatgaatttttcctgcgtcctgaattattgtttgcgcaaaagggaggcaagtatgataatatcatcgaaacaactacccgcatttcttacctggaactgcccgtgaattttctttacaaaggcgccctttcaggaggtaatgtgctggtcggattcggtccctattttgccctgggggttggaggaaacgcgaaatccggtaatgtaagcctggatgttaagtttaagaacgattataccgatgccgatgaactggccgtttattacaagcccttcgatatgggcgccaacgtgatggccggctatgaactgcctgcagggtttcaggtgattctgaatgcttccctcggtatcgccaacattgaaccggacttcaacggaaaaaaaccagcgtccagcactaaaaatatgggctttggcctggcactgggatatgttttttaaaattacagccctgatccgttaagacagtaagaatctgtctcagaagctgagttgaatgaacctggcaatattccggtagccgtatatcttaaatctttgtgaaacaaccggttggcaaacttatgcaatgagcggaaatgtcagaaaaatgagaaaaatgcttttgagacagatttttttttaatccgttacttttgttctgatttttttcataattttaacatatgaatctttagggtccgggagaggttataataaaacccggagcggattgatagtatcggatgatttgagtgataagcatcggtaaattcagcctctaattgctgatacatgttgttcggatttataaaataaagtgtactaattataatgtttttaaacaggcaggcgtggagataagcctgccagcctgatctgatggtaaaataacccagcgctttttcacctacgatccggccatataacttacagccatgccaatacgaagaatccgcaaaattatcaggcctttgatgccttatcgtcctccccgatacggagttgtacttgaatttgccgggtgggccgtgcttgccgccacctggctgtatgttctgatcagctacgagcacctgccctatatcatccccacacatttcaacgcggccgggcaggccgacgcttacggggccaaatcagccataattatgctgccggtgatttccacggtaatatttaccgtgatcacgctggttaactttctgccccgcatgctgagccttaaggacacgctgagccctttggaagcagggcggaaatatggcggcatcatacaactgctgagggcattaaaacttatcatggctttagccttcggttatctggccttccggaccattcagcaggcaaaaggggatccttccggattgggccgatggtttctgccggtttttattgcgctcacaataattcccatagtgattttcatagccgggtggctcaggaaacgttgaaagataaaatctgatatacaccctgtgtggaaacgcggcaggcggggttacaaccggtaatgaaggcgcggatggtgcggaaatatactggttgggggcggtatggtataaatacggaattaaagcgaataaagtaataaacgtattccagaatatatgagcatttgaggtagtgcacgtgaagcgctccagcattggttgctggcaaaactcagttcagtttttgttggttataattttaatctatagctatgccggtaaattatgtattggttgagcggccgaatccgctggattcagcggtgccgcgtaagtgctatgcccaggccaaagcctcaggcagcattcatctgaaacaactcagcaaaaatatggcagccaggtgtacggttacctcttccgatatcctggccgtgcttgatgcgctgaaacaggagattgttaaacacagttcagctttgggtattgcgccggcccatcagcttttcgatgcaataaaaatcgaaaagaatgacaagggtaggcctgcccggtcatttggtgactatactgttaccatagacaaatcatttattcctcaaggagttgaactcattgagatgttataggaaatggaggtcacgtttaccataaaccccggccttcaggccggggtaagtaaaacctatattgaaccgggctttagccctaaaagtctgttttatgtcttatgtaagaatctggctacactgcgtttgggcaacaaaaaatcgggttcctttgctaacaaaagagaaaaaggagcttgtaattgaacacattaagcaaaatgcaaagcttaaatcaatttatcttgattctctgaacggtaatactgagcatttgcattgcattatcagcttgggccccgatcagtctgtttctaaggtaatgcaacttattaaaggtgagtcatctttttggatcaacaaaaacaacatagcgggagctccgttcgaatgggcagatgaatattttgctgtatcagtaagtgaatcacagattcaaaaagtgagaagctacatttccggtcaggaagaacaccataagataaagtcatgggaagaagaatatagtgaatttataacttcttatggctttgagcgtttgcagggctaaagccccataatgagatgcattgcacagccccagcctgaaggctggggttattatcagaattgaatcttttttaccggttttcaatatgtacactgacgaagacctgcttatgttatccggaattcagcactttgctttttgcgaaaggcattgggctcttatacatatagagcagtaattggctgaaaatgttaaagcaacagaagggcatcatttgtacgaaagggctgataatcctttcaacagtaacaaaagaaggaatatttcaactttcagtgcgggatgttgatacaagctacgcacagaatagtcgtgttccggccgggcgccgaactgaaacagatgctgtccacccttacctacctgaaagtttaagacctgctttattcctggtcagagaagcttggtttccgtatccgggcttttggctgttgcaaaacgaaagcacgttccgggaatttcgtgctgatgatttgccaaaaaggaacgttcgtttttaacaaaaggaacgttcgttctgagtaaaagacatagtggttttcagggcatcgaacctgcaagattgataacttcacataacgcgatggggaagtggcggttttatgatttcaggttgctaaaaatgtcaggtgaaaaacccgggtagattattgtataacgataataatatcctggttcattgaattgaaatatcaaatatttttaagttgatttgatttcattcaaactttttatatatttgaaacgtgttgcatgcgtataagcgatattacggaacgttatactgagattatacagaagaattattgcgatggaattcaggctgtaatattggcttagctgagagatacaaaaaaaaaggcgagttgccccgccttgaatgttttcacaacggaataatccttattgtgaattgctttgaattgtgcaacaaatatacaaccggaaatctaaaagtcaatagatcatgaaaaaaattttaggattggatttggggaccaacagtattggatgggctcttgttgatactgatgaaaagaaaatattgggtatggggagtcgtataattccgatgggaacagacaagcaagattatgaaaaaggagttggaataacgaaaaatgcaactcgtagagagaaacgtacagcgagaaaaggcaataagcgttataaacttcgcagaaacaaacttttatttatactgcacgaattaggaatgttgcctgaacagtttcagtttaaaaatggaatacctgaaccaacaaagttgcaaaacttggagcttttgccagtgtcaaaaaaaacaaagcaattagatgccttgggctttatagaattaagagttaaagcactggaagacccaattgaattgaaagactttggcaaaatactctatcaatttaatcagcttcgtggttattctggagggaataatgacgactcaacaaagaagaaacaagacgaggaagaagatgctgtaaaaaagaaatatgaagttgttgtacagaaagttgagattcttgaagtcaaacaatcggatgatgcttttactgtaagaggaggaaaaaacaaaggtgaaaaacaatgttatttcgatgtgaaaataattttcgaaggagcagaaattgaaggactaactgaattacagaacttaaaagaaagagaaggacaagaagaagaactcgaaatacgaataacaagaaaaaaagatgatgaggtgacatacaaatttgctttacctcaaaaatcgaattggcgcaaagcaatggagttatctgaaaaaactttaaaagaagagaacctttttatcagtcagttgcgcttacgcgatttaaaacaaaataaatgggctaaaatccggaatagggtttttcttcgaaatcgatacaaagaggaatttgacaaggtttgggaaacacaagtagaaaaacacctgattttgaaagattgcccaaaagatacgttggaaaagattgcatattatattttcccaggagatagtgaatcgcaacagcagttacgaaaaactgctcttgaaaaaggactgaaatacattatcaaagaacaggtaatttattatcaacgtcctttaaagccacaaacagagttaattggtaattgccgttttgaaaaagaagaaaaagttattcctacttcacatccgtttttccaagaatttagatgttggaagcagataaacaacctatttattacatccaaaacgttagtagggactaaatacacctatcaaaacagatatttgacttccgaagagaaatgggctatttatgaaaaactgcaaacgcagaaggaagttggctttgcgacggtagttgaaatccttaatatggataaaaccaaaggcaaattagataaagagcaaaaagactattttctcaacggtttaaatgtaaaggcaaaattgaaaggttgcgatacatttttatccttcaagaaagaacttggcgaatactttaatgatttcatttctcaggacaaacaacttgttgagcaactttgggctgtaatttttgatgtaaaaaaccatgatggtagtgagtatgatgtggaaagtaagcgagtctattcaattgttgaggtgttaagaaattacattgatgaggaaacagcaaaagaattgtcattgaaacttgctcaaaaaattaagtttcctcgaaagtacgcaagcttgtcgaaaaaagctatacagaatattttgcctttgatgttgcccaatccacagagcatacccagttcggttcaacagcgatttaagaatattcaaacgctaatcgaaacaggggaaattaatgaaaatttgaattgcgatttagaagattatgtgtttgattttgtgaagaacaatccgaatgttttagaatacggcggaataatggaatcgtttgctatttcgttggtttatggtaaacatacagccgaaaccataaaaccacagataaaaaattatcacgacattaagtttgaaaaaaggaacttgcggaatcctgttgttgaacaacttgccaacgaaacgatgcaagttattaaagcaatttggaaacagtacaaattcaatcccgaggaacttgaaattcgagtagagttggcacgagaattaaaaaacagcgcagcagaaagagagaaaatatggaatggtcagcgaaagagcaaggtaatcaacgataaggcaaaagaaatattgagtgaaaatggcattgccattacagctgagaatattttgaagtatcgtttgtacgagcaacagaaatttatgtctccttatacccaaaagaagattatacctttcagtaagttgttcgatgacaaagaatatgatgttgaccatataatcccaaagtcaagatattatgacgattctttttctaataaggttatttgtgaaaagtatattaatgaagaaaaaagtaacagaactgcttgggaatatatctctcagcaaaattctaaatataaaaatgaaaatggaaaacttgaaatagtatctgcaaatgagtttctctgccacataaacgataattactttggcaaaaagaaaaagaatctattagctgaaaaaattccgtcaaaccctgttgaaagacaactgaaagacacgcaatatatttcagtagctattaagagtgaattggcaaagattgttgggagtgataatgttaaaacaagtacaggagaagtaacagattttttacgaagccgatgggggctaaggaaattgtttatgaatcttaccgaaagtcgttttaaacaaatggagctttgggatttggatgaaaatggaaatccagaaacacaatgggttaatcggtatgtagatgagaataacaaaaatcaatacgaaattaaaaattggagcaaacgttacgaccatcgccatcattcaattgatgctttggttgttgctcttaccactcaaagtcatattcatagattaaacaatttaaacaagtactatcaagatgaactaacagctcgtaaagaagagtttggaattacagtcaaagagggagaaggcattttagaaggatttttcaatttggaagcaaaacgcagagatgaaattctacagaaaattgaaagctccagatattttgaaatgccattcgataatttagtagatcaagttaaaagtcagttggaaacaatggttgtttcgcataaaccgaaagataaattaggaattaaaactgatgattttgataaaaatacacctgacaagattttaaaaaaacagattaaaattagagctggattacaccaagaaacttattatggcaaacttaatggacgcgatacaaaacgtgttgatatttcttctctttccttgcctgatgtatccaaaattttaatagacaaagtattggcaaatgaaatcattgaacacaaaaaacagtatggctcaatgaaagaggcttttacaggagaagggttgaaagcatttaatgacaaaagaatagctgatggcaaacaacctgcctacaaagttaaagtctggtacaacaaagaagaaaagaaagagagtggattacaacgtttatatgagaataatgataaacagagtgttatcaccggtgataattacttgtttgtagtaatggaaaagaatagaaaaaggatatttgatattgcctcgttatatgattctgtttctattgccactgatgcattaaaagatggtgtcaatgatttcaagaaaagaattgttgaagattataggataaagcataaagataaacccgaaaaggtcttatttactttacaacaaaatgagttagtttatttacccaataacattgaagaacgagattttcttttgggaatgtctgttgatgagtttagagattggattaatattaaagctaataaaaaagctttcagcaatagagtttataaagtggtaatgtttacgggcatggattgcaagtttattcctcacaattattctaatgttataagtgtccctaaagaattaacaaaggagcaaaaagatcaactaaagaaaaaatacgaggagaaaaagggtattccaaagaacgaattgaattttgttgaatttggttcttacagagattgttcaccttatgagactggagaaatatttgtgaaaagccttgtaaataaaaaacaaaaacaaaagcctttaaaaattcaagactcttgtattaagataaaaattgattggcttggtaatatagaacttgcataatgataaaacgaacccttaattttagcaatccctgctatctcaaaaagaaggatatgcaagtgagtataggttttcctgagcatgtcgggaagccagatgcctcggttccaattgaagatattgggattatggtgcttgaccatccccaaataaccttgacccaagcattgatttctgctttgtctgataataatgttgccattataaattgcgatgccaaacatctgccgaatggattaatgctgcctatgttttcgcaccatgcctttaccgaaaaaatatacgagcagttggagagttcattgccattgcgcaagaacctgtggcagcagacggtaattgcgaaaattagcaaccaggcagcaatgctgaggagcatcggcgcggatgacgggaagatgcagtattatctgaagctggttaaaagcggcgatccccagaatgtggaaggaagggcggccgcgtattactgggaaaatcttttcggtaacaaaagtaattttgtcagagaccgggacgaagatgggatcaatgccatgctgaattatggttacgccattctgctggcagttgtagcaagggcattggtgtccagcggcctgcttccggcagtggggattcatcaccggaacaaatacaatccctggtgcctggcgtcggatattatggagccttaccggccttatgttgaccggattgttttgcaggtttcggaagaatttccggaatccggtgaactgacgccggaaataaaaagaagattgcttcaggtgccggtagctgacattgaaatcgatggaaaaaaaagccccctcatggtgggtatatcaaggaccaccgcttcattgtcagcctgttttggtggtgtttcaagaaaaattttgtatcctgaattcagttaatcctattggccgcgactaaatttgacagactaaaccagtatcagatcttgtggatttttgtattttttgatctgcccaccgaaaccaaaaaggatcggaagaattacgcccagttccgcaagaacctgcagaaggatgggtttaccatgatgcagtattccatatacgtgaggcattgcagtagccgggagaatgcggatgtgcacataagaagggttaaatcattccttgcgccgaagggggagattgtcattttttcacttacagacaaacagttcggcatgatggagtttttccggagtcaaaaggaggcagaaaggccgggcactccccagcaactggaactattctgaagtagaaataataaagtccttccggcctgaggcggaaggactttcgctgagcacttttttcttttctgtattgagcattaaaacgctgaaaaagagcctttcagacagtggtatgttgtgctcaatatctcaaagatacaattcaaaagcaattcacaacgccggacggtaggcaagacgatgtctgactgttgtgctcaatatctcaaagatacaattcaaaagcaattcacaacaatgacttccatcgtcccaaaatcctaccagttgtgctcaatatctcaaagatacaattcaaaagcaattcacaacacttctctgatgttgttcttcaccagccgggttgtgctcaatatctcaaagatacaattcaaaagcaattcacaaccggcacgctcaagtgagccgatctcgtcgggttgtgctcaatatctcaaagatacaattcaaaagcaattcacaacaaatcacaggaaatatgaacgacaaacaccgttgtgctcaatatctcaaagatacaattcaaaagcaattcacaacagcccttcggcctgggcatttacctgctttgttgtgctcaatatctcaaagatacaattcaaaagcaattcacaactctgtgcagaaggagagttgtattcattaggttgtgctcaatatctcaaagatacaattcaaaagcaattcacaacttacgctctaatgtcaacggtataccggtgttgtgctcaatatctcaaagatacaattcaaaagcaattcacaacatcgcttccttgtatgcctcagcgtcacggttgtgctcaatatctcaaagatacaattcaaaagcaattcacaactttggttggaatacaaacggaattggaaaagttgtgctcaatatctcaaagatacaattcaaaagcaattcacaacgatggttacatttcgggggatccactttcggttgtgctcaatatctcaaagatacaattcaaaagcaattcacaacaaaatacgttctgcatcaatgaacaattcagttgtgctcaatatctcaaagatacaattcaaaagcaattcacaacatcaaacctgcgacaacaatagctgccggtgttgtgctcaatatctcaaagatacaattcaaaagcaattcacaactaccgaagttaaagggttctttccccgcccgttgtgctcaatatctcaaagatacaattcaaaagcaattcacaacactcctccgacgttgaacggctggtcgttagttgtgctcaatatctcaaagatacaattcaaaagcaattcacaacgtctcctgatcaatccccgggtaaaactgtgttgtgctcaatatctcaaagatacaattcaaaagcaattcacaacaacaccagcgaatttttctggcgtaagctagttgtgctcaatatctcaaagatacaattcaaaagcaattcacaacgattttcaatacgttgagtttttaacctagttgtgctcaatatctcaaagatacaattcaaaagcaattcacaacgcaatggctgttgcggctgataacgcttttgttgtgctcaatatctcaaagatacaattcaaaagcaattcacaactcagcgtccatccctatgtgtttcatgatcgttgtgctcaatatctcaaagatacaattcaaaagcaattcacaaccggccacgccagtacttcggaagtggctgggttgtgctcaatatctcaaagatacaattcaaaagcaattcacaaccaggcagtcgctatcatcataagcagggcagttgtgctcaatatctcaaagatacaattcaaaagcaattcacaacaaatattctattctagatttagcgtctaatgttgtgctcaatatctcaaagatacaattcaaaagcaattcacaaccatcgaaggcctcgacagccggagggtgtagttgtgctcaatatctcaaagatacaattcaaaagcaattcacaacaatgtacgaaccacataatcagttgtcattgttgtgctcaatatctcaaagatacaattcaaaagcaattcacaacattgatgcacttgttggcacaccatcaactgttgtgctcaatatctcaaagatacaattcaaaagcaattcacaacgcactgttctcccatgcttcggacgcggaggttgtgctcaatatctcaaagatacaattcaaaagcaattcacaacaccactgccaaacataggcgaatggtgcgagttgtgctcaatatctcaaagatacaattcaaaagcaattcacaacggcaccgttgatatatacatagacggtatcgttgtgctcaatatctcaaagatacaattcaaaagcaattcacaacaggctctgaccttcgctgcgccagattgtagttgtgctcaatatctcaaagatacaattcaaaagcaattcacaacgtgcttcttacttacaaggctcagatatcgttgtgctcaatatctcaaagatacaattcaaaagcaattcacaacgtgtttggttaaacaatgccataaaattaagttgtgctcaatatctcaaagatacaattcaaaagcaattcacaactattactcagatgctgaaaaaggcatagcagttgtgctcaatatctcaaagatacaattcaaaagcaattcacaacagaatcattgatcaactcagagaatattcagttgtgctcaatatctcaaagatacaattcaaaagcaattcacaacaaaacaatccaaaatgtctgcaattattaagttgtgctcaatatctcaaagatacaattcaaaagcaattcacaacgctaccagaaccttgaagattcaatttcaggttgtgctcaatatctcaaagatacaattcaaaagcaattcacaacaaagagatagaaaaaaagtacgattgcaaagttgtgctcaatatctcaaagatacaattcaaaagcaattcacaacacagcaggagactgtccctcatggtataacgttgtgctcaatatctcaaagatacaattcaaaagcaattcacaacgaccggcagtgccggcaggtacagtttcacgttgtgctcaatatctcaaagatacaattcaaaagcaattcacaacgggtcgataaaaaaggttatgttaagtcaagttgtgctcaatatctcaaagatacaattcaaaagcaattcacaactatccgctttgcaaaatcaatatcagcgaagttgtgctcaatatctcaaagatacaattcaaaagcaattcacaacattacgcagcaccaccggtatcagggtgctgttgtgctcaatatctcaaagatacaattcaaaagcaattcacaacagcctatatcgttgcagacgtgattgtcatgttgtgctcaatatctcaaagatacaattcaaaagcaattcacaactgatgccgtactttgactctacctcttcaagttgtgctcaatatctcaaagatacaattcaaaagcaattcacaactaaatacccgcatggtcatgtctgcagttggttgtgctcaatatctcaaagatacaattcaaaagcaattcacaacccaaaggggcccgcagctcccaccggcaaagttgtgctcaatatctcaaagatacaattcaaaagcaattcacaacaaatttcgtgacgttccgcctcaaggtcgtgttgtgctcaatatctcaaagatacaattcaaaagcaattcacaacgaagccgttgtgccagccgaaggctacactgttgtgctcaatatctcaaagatacaattcaaaagcaattcacaactgtcggcgctctacataattaaaataatagttgtgctcaatatctcaaagatacaattcaaaagcaattcacaacggggcgggaacccgatggcacaaaacaaaagttgtgctcaatatctcaaagatacaattcaaaagcaattcacaaccctgaagtgatgtttcaagattcccgaaaagttgtgctcaatatctcaaagatacaattcaaaagcaattcacaacggaagaaaagattgataatactttcgtatggttgtgctcaatatctcaaagatacaattcaaaagcaattcacaacaggttgatcaacgcggtatcttttccctttgttgtgctcaatatctcaaagatacaattcaaaagcaattcacaacagcatatcgtattcagcaaatcgtgtgtaagttgtgctcaatatctcaaagatacaattcaaaagcaattcacaactgattccggatggtatcagtcattgtcagagttgtgctcaatatctcaaagatacaattcaaaagcaattcacaacaaacttacggtgatgtgtatctattgggaagttgtgctcaatatctcaaagatacaattcaaaagcaattcacaacaagttccttcatgcccttgaatgtgtgcgcgttgtgctcaatatctcaaagatacaattcaaaagcaattcacaacggtgaagttctgctcaattgaggtcagcaggttgtgctcaatatctcaaagatacaattcaaaagcaattcacaacattgcacgggttcgacccggatggaggaagaatatagtgaatttataacttcttatggctttgagcgtttgcagggctaaagccccataatgagatgcattgcacagccccagcctgaaggctggggttattatcagaattgaatcttttttaccggttttcaatatgtacactgacgaagacctgcttatgttatccggaattcagcactttgctttttgcgaaaggcattgggctcttatacatatagagcagtaattggctgaaaatgttaaagcaacagaagggcatcatttgtacgaaagggctgataatcctttcaacagtaacaaaagaaggaataatttaactttcagtgcgggatgttgatacaagctacgcacagaatagactcgcttctcgcgggcgcgtggattgaaccgaccatactttgaggttccgatcctgcagctccggtcgcgctctgcgtaagtgtctggcttgaaacatgttggtgatgaaagccgggaatcagtttgcagtaatgttcctctaaaagatacaattcaaaagcaattcacaacattgcacgggttcgacccggatggaggaagaatatagtgaatttataacttcttatggctttgagcgtttgcagggctaaa
